United States Patent Application Publication US 2007/0048301 A1 - sequence listing, part 3

SEQ ID NO: 3711 - DNA, 3270 bp, Homo sapien
ctaagacaggtgcagacgtatgtcggctttggcgtatccatcaagctttatattgctttgattatgatttggaggaaagtggagaaattaaagatatgttacttgagtgcttcataaatattaattatatcaagaaagaagagggaagaagatttcttagttgtctcttcaactggaatatcaacttcatcaaaatgatccacgggaccattaaaaaccagttacagggattacaaaagtctttgatggtatacattgcagaaatttatttcagagcttggaaaaaggcttcagggaaaatactggaggcgattgaaaatgattgcatccaggacttcatgtttcacgggatacaccttccgaggaggtctccagtgcattccaaagtgcgggaggttctgagttactttcaccatcaaaagaaagttcggcagggagtggaagagatgctttatagattatataagcccatcctttggagaggattaaaggccagaaactctgaagttcgatcaaatgctgcattgttgtttgttgaagcatttcctattagggatccaaaccttcatgctattgaaatggatagtgaaatccagaaacagtttgaagagctctatagccttttagaagatccttacccgatggtccgttccacagggatccttggtgtttgtaaaataacttctaagtactgggaaatgatgcccccgaccattcttattgacctcctgaagaaggtgactggggaactggcatttgacacgagctcagctgatgttcgttgttctgtctttaagtgtctgccaatgattttggacaacaaactgagccacccattgttagagcagctccttccagctctcagatacagtctccacgacaattcggagaaagtgagggtagcttttgtggacatgctgttgaagatcaaagctgtgagggctgctaagttttggaaaatatgtcccatggagcacattctggttcgtctggaaactgattctcgacctgtgtctcggcgcctggtgagcctcatctttaattctttcctgcctgtgaatcagccggaggaggtctggtgcgagcgctgtgtcaccctggtgcagatgaaccacgccgctgccaggaggttctatcagtacgcccacgaacacaccgcctgcaccaacatagcaaagctgattcacgttattcgtcattgcttaaatgcctgtatccagagggcagtgagagagcctccagaggacgaggaggaagaggacggaagggagaaggagaatgtgactgttctggacaaaacactgtcagtaaacgatgttgcatgcatggcaggtttactagaaatcattgtgattctctggaaaagtattgacagaagtatggaaaataataaagaggccaaactttacacgattaacaagtttgcctctgtgcttccagagtatctgaaagtatttaaggatgatcgctgcaagatccctttattcatgctaatgtcctttatgccggcctctgctgtccccccattcagctgtggtgtgatttccacgctgagaagccgggaggagggcgctgtggacaagagctactgcactttgttggattgcctctgctcctgggggcaagtggggcacattctggagcttgttgacaactggctgcccacagagcatgcccaggccaagagcaacacagcttctaaaggtagggtgcagatccatgacacacgcccagtcaaacctgaattggcattggtctacattgagtatctgctgactcatccaaagaaccgcgagtgcttgctctctgctcctcggaagaaacttaaccatcttttgaaagcccttgaaacgtcaaaggcagatctggagtcacttctgcagacaccgggtgggaagcctcgtggcttcagtgaagcagctgccccgcgagcctttggtctccactgtcgcctgagcatccatcttcagcacaagttctgctcagaaggaaaggtgtatttgtccatgttggaagacactggcttttggttagaaagcaaaattttatcttttattcaagatcaagaagaagactacctgaagcttcatagggtcatttatcagcaaattatccagacctacctgactgtgtgtaaagatgttgttatggtaggccttggtgaccatcagtttcagatgcaactcttacagcggagtcttggaatcatgcaaacagtgaagggatttttttatgtttcattacttcttgacattctgaaagagataactggaagttccttgattcagaaaacagattcagatgaagaagttgcaatgctgttggacacagtccagaaagtatttcagaaaatgttggaatgtattgcacggagcttcaggaagcagccggaagaaggcctgcggctgctttattctgttcagaggcctcttcatgagttcattactgctgttcagtctcggcacacagacacccctgtgcaccggggtgtactttctactctgatcgctgggcctgtggttgagataagtcaccagctacggaaggtttctgacgtagaagagcttacccctccagagcatctttctgatcttccaccattttcaaggtgtttaataggaataataataaagtcttcgaatgtggtcaggtcatttttggatgaattaaaggcatgtgtggcttctaatgatattgaaggcattgtgtgcctcacggctgctgtgcatattatcctggttattaatgcaggtaaacataaaagctcaaaagtgagggaggttgcagccactgttcacagaaaactaaagacattcatggaaattactttggaagaggatagcattgaaagatttctctatgaatcatcatcaagaactctgggagaacttttgaattcataaccaagccaacatctccagacatgtaaaaatagggaaaagtgattcaaattgaaatgcctgtgtattttcctattgtttttaatgttaataacccatataatagggaaagggtgggatttttttgtgggaatgtgggaaggtgggggttatggaggagataactcaaaacttcttcaattttgcctagtgcctgcgtaaataatatatttaatataaaggactccaggtataaatggtgtagaaatccatgattccaagaaaaaacacttttctagcaaacctggttgtttttaaaatgacttttatatatgtaatattgcttggaaactatgagtaataaagcaatgacaacaaaaaaaaaaaaaaa

SEQ ID NO: 3712 - protein, 935 aa, Homo sapien
MLLECFININYIKKEEGRRFLSCLFNWNINFIKMIHGTIKNQLQGLQKSLMVYIAEIYFRAWKKASGKILEAIENDCIQDFMFHGIHLPRRSPVHSKVREVLSYFHHQKKVRQGVEEMLYRLYKPILWRGLKARNSEVRSNAALLFVEAFPIRDPNLHAIEMDSEIQKQFEELYSLLEDPYPMVRSTGILGVCKITSKYWEMMPPTILIDLLKKVTGELAFDTSSADVRCSVFKCLPMILDNKLSHPLLEQLLPALRYSLHDNSEKVRVAFVDMLLKIKAVRAAKFWKICPMEHILVRLETDSRPVSRRLVSLIFNSFLPVNQPEEVWCERCVTLVQMNHAAARRFYQYAHEHTACTNIAKLIHVIRHCLNACIQRAVREPPEDEEEEDGREKENVTVLDKTLSVNDVACMAGLLEIIVILWKSIDRSMENNKEAKLYTINKFASVLPEYLKVFKDDRCKIPLFMLMSFMPASAVPPFSCGVISTLRSREEGAVDKSYCTLLDCLCSWGQVGHILELVDNWLPTEHAQAKSNTASKGRVQIHDTRPVKPELALVYIEYLLTHPKNRECLLSAPRKKLNHLLKALETSKADLESLLQTPGGKPRGFSEAAAPRAFGLHCRLSIHLQHKFCSEGKVYLSMLEDTGFWLESKILSFIQDQEEDYLKLHRVIYQQIIQTYLTVCKDVVMVGLGDHQFQMQLLQRSLGIMQTVKGFFYVSLLLDILKEITGSSLIQKTDSDEEVAMLLDTVQKVFQKMLECIARSFRKQPEEGLRLLYSVQRPLHEFITAVQSRHTDTPVHRGVLSTLIAGPVVEISHQLRKVSDVEELTPPEHLSDLPPFSRCLIGIIIKSSNVVRSFLDELKACVASNDIEGIVCLTAAVHIILVINAGKHKSSKVREVAATVHRKLKTFMEITLEEDSIERFLYESSSRTLGELLNS

SEQ ID NO: 3713 - DNA, 2265 bp, Homo sapien
agagactcagacggcggagcctggaggagcccacgcagtctgttcccggcacccggtgcgtgtgaagggacttgagggcagcgagatggaatcagcaagagaaaacatcgaccttcaacctggaagctccgaccccaggagccagcccatcaacctgaaccattacgccaccaagaagagcgtggcggagagcatgctggacgtggccctgttcatgtccaacgccatgcggctgaaggcggtgctggagcagggaccatcctctcactactacaccaccctggtcaccctcatcagcctctctctgctcctgcaggtggtcatcggtgtcctgctcgtggtcattgcacggctgaacctgaatgaggtagaaaagcagtggcgactcaaccagctcaacaacgcagccaccatcttggtcttcttcactgtggtcatcaatgttttcattacagccttcggggcacataaaacagggttcctggctgccagggcctcaaggaatcctctctgaatgcagcctgggacccaggttctgggcctggaacttctgcctccttcctccgtgatctgccaggctcgtgggcactttccacagcccaggagagcttctgaaaggacagtatagctgcccttgctccctacccacagcacctgagttaaaaagtgatttttatgttattggtctaagggacttccatcttggtctgaagtcctgagctcagacgcaggtactgccagccataccttcctggtagcatctgctggacctaagtaaggcatgtctgtctaaggccaagtctgcccggcttaaggatgctggttctgactctaccccactgcttccttctgctccaggcctcaattttcccttcttgtaaaatggaatctatatctataaaggtttcttcaaatccaaaaaaaaaaaaaaaaaaaagttgggggacaggggtctgggtttggctccaggtgggaacaaggcctggtaaagttgtttgtgtctggcccacagtgactctctgtgcacgactcaactgccaagggcatcactggccaattcttggatttagggattggctaggagttgctggggtccactcctgggcctgccccagctccttgcccagggagagggaaagagttaacggtgtgggccactccagcttgcccttccactgccactcactggggtgaggctgggggtcagcttggtgaggattggggcttctagattgtctaggcaggaggtgaaacttaggccagagtcagatttgagctgagccaggggaggccttggcaacctacttctactcagatttcattgctggatgcggaaggggtaggcccaaaatatatacaggatcttactgtcccttgaagcccagccacaagtgttggagctgcagagagaccccaaaggtagtagattgtgccagatacaaatgggtcccatccagtgcttcatactccttcagtcactatcccagacagtgagccccagatctcctagctctggcttctgtgtcccacacggcctgttcccagcttctctcctggttcccttgttacggattcatttatccattcagtgtttcctgggcctctgctcagaggcaggtcaccactgggccctgtggatcaatgcaagatgacaaaggctttttttttttttttttttttttttttttttgaggagtttcgctcttgttggctaggctggagtaaaatggtgcgatctcggctcactgcacctccgcctcccaggttcaagcgattttcctgcctcagcctcccgagtagctggggttacaggcatgcaccaccatgcctggctaattttctgtatttttagtagagacggggtttctccatgttggtcaggctggtcttgaactcctgacctcaggtgatctgcccgtctcggcctcccaaagtgctgggattaccggcatgagccactgcgcctggccgacaaaggctttgatatcagaatgaactgtcaagggaggtgctggagagggattaacctgtgctgcctgggaccctcagggtcttaggttggggagtgtgaataggagtttgcagatggagaataggaagggcattccaggcagagggaaacctgtgcagagaccaagaggtgtggaaggaaaagtggggttggggctgggtggtctggattatggcctggatgcaataaagtactgtgacagtaaaaaaaaaaaaaaaaaaaaaaaaaaaaaaaaaaaaaaaaaaaaaaaaaaa

SEQ ID NO: 3714 - protein, 142 aa, Homo sapien
MESARENIDLQPGSSDPRSQPINLNHYATKKSVAESMLDVALFMSNAMRLKAVLEQGPSSHYYTTLVTLISLSLLLQVVIGVLLVVIARLNLNEVEKQWRLNQLNNAATILVFFTVVINVFITAFGAHKTGFLAARASRNPL

SEQ ID NO: 3715 - DNA, 2432 bp, Homo sapien
agctgtttccctgtgggtcgggttggactgacttttgacagtcagccttcggctgcggagggggctcggcggcggccggcggagaaagttgctccgagaagaggctgggtcgagctgggccgagccgggcgcgcagggcgggcgtcgcgggcgtcccgggcggacgcggcgcggagactgccggcgcgtcccgggggttccgatttgaagaccttgcttctcatcacccactggattatgccccaggcttccctacccaatgatcctcttgcaacacgccgtgcttcctccacctaagcagccctcaccctcgcctcctatgtcagtggccaccaggtctacaggaaccttgcagcttccaccacagaagccttttgggcaggaggcttccttgcctcttgcaggggaagaagagttatcgaagggaggggagcaagactgtgccctggaggagctatgtaagcccctgtactgcaaactctgcaatgtcaccttgaactctgcacagcaagcccaggctcattatcagggtaaaaatcatggtaagaaactccgaaattactatgcagcaaatagctgtcctcctcctgctagaatgagcaatgtggtcgagcctgcagctactccagttgttccagtccctccgcagatgggctcctttaagccaggaggccgagtgatcctggccacggagaatgattactgtaagctctgtgatgcctccttcagttccccagctgtggctcaggctcactatcaagggaagaatcatgccaagaggctgcggctggcggaagctcagagtaactcattctcggaatcctcagagctgggtcaacggcgggccaggaaagaagggaatgagtttaagatgatgcctaacaggagaaatatgtatacagtacagaataattcagcaggtccttacttcaatccccgctctcggcagagaattccacgtgatctggccatgtgtgttactccaagtggccagttttactgctcaatgtgtaatgttggagctggcgaagagatggaattccggcagcatttagagagcaagcaacataagagcaaggtgtctgaacagcggtacaggaatgagatggagaatctgggatatgtatagtgattatcatattaagatagagcagcttttcctgcctgttgtttgccttttgtcaacttgccctgctttgtggtctttttgatatgagtacattcctctgcttaatgttaatacatgtaacccacagtggtaccatgagatgtcaaaacctgggggcccgggggcggggcggggggaggtgggtgtgaagaacgtgcttcttaggtcataacgcttttgcagggtcaatggtgttgagccgctcatagcatgtgacctacctaccccatcagaaataactttttatcttgctcaagttctggtcaactagtagcctgacggcttagaactttgactatttaaaagtttcattttcttttgcaattttagttttatgtactgttaaagaattgtactgaattctttttagatcacagtaaaaataggttggcagagatttcagtttcccagggcttaaccagaaccgccacctcaatgcattgtcagtagaatacattattagaaactgttaaggtctttcccgggacatttttttctgccattttcttttgcaattgtagttttatgtactgttaaagaattgtattgaattctttttagatcaaagtaaaaataggtcagcagagatttcagtttcccagggcttaaccagaaccgccacctcaatgcattgtcagtaggatacattattagaaactgttagggtctttcccaggacatttttttttctgtatcatgtctccccatcattgaagcgcaaattttcttgaattcaaatactcccaatgagcttgtatacttccaaacagctaaacttgatttccagttgtggatttcacacatataattgccgccttcttccctcctcttttttcccccctagttgaatcagcttgtctaacaagcccattttcatgccccagctgtgctgtgggttttccaagcctcatatttgaatattcaatgagtttaagatggatatgatttcaaaaaatagggccgggcgcggtggctcacgcctgtaatcccagcactttgggaggccgaagcaggcggatcacgaggtcaggaggtcgagatcatcctggctaacacagtgaaaccccatctctactaaaaatacaaaacattagccgggcgtggtggtgggtgcctgtagtcccagctactctggaggctgaggcaggagaatggcgtgaacccgggaggcggagcttgcagtgagccgagatcgcgccactgcactccagcctgggtgacagagcgagactccgtctcaaaaaaaaaaaaaaaaaaaaaaaaa

SEQ ID NO: 3716 - protein, 289 aa, Homo sapien
MILLQHAVLPPPKQPSPSPPMSVATRSTGTLQLPPQKPFGQEASLPLAGEEELSKGGEQDCALEELCKPLYCKLCNVTLNSAQQAQAHYQGKNHGKKLRNYYAANSCPPPARMSNVVEPAATPVVPVPPQMGSFKPGGRVILATENDYCKLCDASFSSPAVAQAHYQGKNHAKRLRLAEAQSNSFSESSELGQRRARKEGNEFKMMPNRRNMYTVQNNSAGPYFNPRSRQRIPRDLAMCVTPSGQFYCSMCNVGAGEEMEFRQHLESKQHKSKVSEQRYRNEMENLGYV

SEQ ID NO: 3717 - DNA, 1823 bp, Homo sapien
ttgcggccgccaacgccgcccggactggagccctgacattgctgcgctcggggggctccaggcagcccgtatcggggcctttatttctcgtcggcggcgccctgcaccgcgcctcgcaaagccaaacaccagagcaccctagaaggtttaactaaaagaatgctcatgtttgacccagttcctgtcaagcaagaggccatggaccctgtctcagtgtcatacccatctaattacatggaatccatgaagcctaacaagtatggggtcatctactccacaccattgcctgagaagttctttcagaccccagaaggtctgtcgcacggaatacagatggagccagtggacctcacggtgaacaagcggagttcacccccttcggctgggaattcgccctcctctctgaagttcccgtcctcacaccggagagcctcgcctgggttgagcatgccttcttccagcccaccgataaaaaaatactcacccccttctccaggcgtgcagcccttcggcgtgccgctgtccatgccaccagtgatggcagctgccctctcgcggcatggaatacggagcccggggatcctgcccgtcatccagccggtggtggtgcagcccgtcccctttatgtacacaagtcacctccagcagcctctcatggtctccttatcggaggagatggaaaattccagtagtagcatgcaagtacctgtaattgaatcatatgagaagcctatatcacagaaaaaaattaaaatagaacctgggatcgaaccacagaggacagattattatcctgaagaaatgtcaccccccttaatgaactcagtgtcccccccgcaagcattgttgcaagagaatcacccttcggtcatcgtgcagcctgggaagagacctttacctgtggaatccccggatactcaaaggaagcggaggatacacagatgtgattatgatggatgcaacaaagtgtacactaaaagctcccacttgaaagcacacagaagaacacacacaggagaaaaaccctacaaatgtacatgggaagggtgcacatggaagtttgctcggtctgatgaactaacaagacatttccgaaaacatactggaatcaaacctttccagtgcccggactgtgaccgcagcttctcccgttctgaccatcttgccctccataggaaacgccacatgctagtctgattgcctctgtgtcctgcctcagcgtgactccccactcacttggctctctctctgtcctgcctcccattatctaacacattttttacatgtacattttaatttgattcagctggtctgaatctctgaatttatatcatccaaaacttccatatggtcagtagtagatgttctctaatcctccctctccttaccacgggtcagacctaaagaatgtgaacactttttttttttttttctggggatgctaagcaaacccttcttacagatacgtttaatgtaataagaacaagggaacatgtaaactaacataaccaattgtcagttctccatgtattcctcaaaagaatgtcagagtaaatgtattagaaatacagtatccagactgctagtccttgccagagacattcttacctctgccctgtgatcatattttatgcttgacagcgaaaacaagtgtggccccttgcaccggttagctagaagtacagccagatttcaagctagtgcaatcacctcttccgccaattttttacaaatcttgtcaacctggatcttacacttcatctgaattcagttctttgccctccttcgcgcctgcagctcatatggaagtctttgccaccaat

SEQ ID NO: 3718 - protein, 345 aa, Homo sapien
MLMFDPVPVKQEAMDPVSVSYPSNYMESMKPNKYGVIYSTPLPEKFFQTPEGLSHGIQMEPVDLTVNKRSSPPSAGNSPSSLKFPSSHRRASPGLSMPSSSPPIKKYSPPSPGVQPFGVPLSMPPVMAAALSRHGIRSPGILPVIQPVVVQPVPFMYTSHLQQPLMVSLSEEMENSSSSMQVPVIESYEKPISQKKIKIEPGIEPQRTDYYPEEMSPPLMNSVSPPQALLQENHPSVIVQPGKRPLPVESPDTQRKRRIHRCDYDGCNKVYTKSSHLKAHRRTHTGEKPYKCTWEGCTWKFARSDELTRHFRKHTGIKPFQCPDCDRSFSRSDHLALHRKRHMLV

SEQ ID NO: 3719 - DNA, 4285 bp, Homo sapien
ggcggctccggcgcagaccttggagagcacagctgccggcccgcgagccagcctcggttcccgcggcccgccgaggctcggagccatccagcgacccggcgaccggcctcaggccccgccatggggaagaccaacagcaagctggcccccgaggtgctggaggaccttgttcagaacactgagttcagcgagcaggagctgaagcagtggtacaagggcttcctgaaggactgccccagcggcatcctcaacctggaggagtttcagcagctctacatcaagttcttcccctacggcgacgcctccaagttcgcgcagcacgctttccgcaccttcgacaagaacggcgacggcaccatcgacttccgggagttcatctgcgccctgtcggtcacctcccgcggcagcttcgagcagaagctcaactgggcctttgagatgtacgacctggacggcgacgggcgaatcacgcgcctggagatgctggagatcatcgaggcaatctacaagatggtgggcaccgtgatcatgatgcgcatgaaccaggacgggctcacgccccagcagcgtgtggacaagatcttcaagaagatggaccaggataaggacgaccagattacattggaggagttcaaggaggcagccaagagtgacccatccattgtgttgctgctgcagtgtgacatgcagaagtagaagctggtgaggggcagggtccctggccagaaggggcatggccacctcccaacctgatgacctctctggctggcctcccaggaggagggacactccagcccccctctctggcccacccagtcctctgcccaagcccttcctcccctccatcaagatctttgagggaccacctcaccctgcaaaagagacaggtcctccagtaccctgtcttctagccccacctcccacttggccagaaccaatgtccattgggcataggggagttggcttttgccccaggaggtgaggttaaggagttgggggcctggggttctggttaggaattctcttgatcctgggattatgctttataggatgtggtcccacaggcctgtcacagggccaaattgggtctgtccattcctgaggctccagatcccataaagggggtctcttccccatcccttctactctacctggcccttccagccccagcctttggagcgttcattcagtcctttcttcagctaatgattactgagcacctgtttggtgctaaggatatggtcatttacaagacacatcttgtgccctctggaagctcatagggttgtgaggcaaacttccagccgtcagggtctcagctaagcagaaggtgctggaaggctggttagtctgggaggagctatttcatcttccagctcagctccacacaaagctgcagaaggacgaaatgaaaagcatttggaagtttaggagccacgtgagtgaaagttttaagaaaaatgaaatttatgtcatacttatttttttagtaccctttaaaggagctacagtcattttattatttcaggaggttaaaatatactctatattacttggtttattataaaatgattaaatgaatagagaaaatattaattttcaaggggaaaaaacctgagaagaaagggagaaaagaccatgaaatttaccagataacactttttaagactaagtcctgagctgccactctcagcagtttttgctgcttcagctcttcctttttattacctttttcaattcaacaagcaactttctgctacatacttactccggttgggtgctgacttcagggacaggaaaaagcaaggtttgcaaagagtgaaactagtgtatattccgtatcttggtagttcgtttctggattgggtttagtttcagaactggacttgttccttcactgccacagaatcagaaagagctagaagaaaaggctcacctggccactgtttaggcacccagacataatttatggacgaaatgcctaaaaatgtgccaggcatgctctgtttgagaggctttttctaaccccaaatcttagatctgccaggtagttcaacatcttccaagtgtgctggttctgctttccaatgcctgcttcccaattttggatccatgagctatacagctgcatgctttgactgccggaaaaattaatcttgcttcttcatcaggtctttctcctgtacttgtgatcagaaattacctttgacgtgcagtgacagttgatttcctcttgaactgccggtgaaaacagtctagtacacaggtgctgtcagcccagggtgggagcaggaaatgattgctgagcccggggcaggggaattgcatctgcaggaaagagatgcagcatgctcctcactcctgagtgcccacctgtcctgcttctctgcaggtgaaaactctgggggatgctgatcaatagagcttggtcccaagctctactgggcccttggaggtagcaaggccactgggttgctatcctcttgatggggatagcaaccactggtttgcaaccactgggttgctatccttttgctatcctcttgctcatgaccagccatatggtgaggctggggagttcacatcctcaggcaggaactagcagttgtttatccagcaatgcctcaaggatgttgcattgctcccaggagctggctattaggtatgtcttgtgcggtcagtcagcatcacagacacatagatgctcaccagcctggcttagctgggacctaaatcttctggtgaaaagcttttcactaagtgaggttccttccctgcaaatgctgaatctagcctaattcgcaaccacacagaatttcatggctttcaaaggcttgccatgtgccccatctcattctatactcacatcccatggaggtgaggattttcacttcttttctctagacttggaagctgagattcagagaggaagcatcccttgtgcaagatcacatagtcaggaggtgacacagggctaagacttgaaccaaggctctaagaggatttcttcttttcagagtctcttccctgtccatttctgtgactaagctgtgcagaggttgacagcagggcaagttacattgatattcatcctttataggcttcctgctaaaaagcttctgagattgtggtcttccaaaaaaaataggagcttggttgaagtccccacattttcaagcactcagtgttctgcctctggcagctgtgctaacagctcagtgctgtcctgggagtcctctgactcagaaccctcgaagcatcctgcattgtctttacccaccatcatcgtcactaagagaaacatgcctacccatgaaggcgtgtttgattactccaggcttctggacacacatacccatgggtgatttttgctcctcaggcccaatattctcagacagcccagcagtgtgaacacacaatgccaggccaggaactgggaccaccatcttgctgatggaaggaacaacaggtggcccaggacatgctcctgcatactcctgggtgtcccagggactgtgtgctcaggagcactgtggtagagcactggccctgccttgagaagagacacaggtctcccgtccctgcaccagctgagagagacttgccacaaagcacaaggctggcagagatttatgtatgacttgcacagacacaaaaatatacagacaatcaaaacattgatatattcaaactctcctttaaattccaatcttattgcaacaactctgtgaattgcaaggtcccagaatctgccttctcacatactctaccctcattcatccttttgggctaattgatgagcatcttatttcttatctctaaaaattatcagcaaaggctacttcagatggccactttagtcctttcagctgtagtcaggattatttaacttacctgtatatcaaaagtgaagaaaaagttagttcataagtaaaggcactaaatcctttcctgacaatggcagagtctctagaggtagaaatttgccttgctgcagagagagaaggaatggcgtgggatgggggaaagaaaagaaagagaagaagagaagaagctggggtctccaggcagggtagtaagctgacactaaatattttttacacaaaaatgtattgaagcaacaaatatttcctgaagatccaccctgggtgaggctttgagctgactttagagatcactgtggggtcaagaatgtcttacatgttttattcatcattcttgaaaaaagaaataattcaaaccttggaattaaaaagtcagaaaaacaaaaaaaaaaaaaaaaaaa

SEQ ID NO: 3720 - protein, 191 aa, Homo sapien
MGKTNSKLAPEVLEDLVQNTEFSEQELKQWYKGFLKDCPSGILNLEEFQQLYIKFFPYGDASKFAQHAFRTFDKNGDGTIDFREFICALSVTSRGSFEQKLNWAFEMYDLDGDGRITRLEMLEIIEAIYKMVGTVIMMRMNQDGLTPQQRVDKIFKKMDQDKDDQITLEEFKEAAKSDPSIVLLLQCDMQK

SEQ ID NO: 3721 - DNA, 2112 bp, Homo sapien
cccgcttctggagtgttatcgtcaccatgtccctaatggtctcggctggccggggcctgggggccgtgtggtccccaacccacgtgcaggtgacggtgctgcaggcgcggggcctgcgggccaagggccccgggggcacgagcgacgcgtacgcggtgatccaggtgggcaaggagaagtacgccacctccgtgtcggagcgcagcctgggcgcgcccgtgtggcgcgaggaggccaccttcgagctgccatcgctgctgtcctccggacccgcggccgccgccaccctgcagctcaccgtgctgcaccgcgcgctgctcggcctcgacaagttcctgggccgcgccgaggtggacctgcgggatctgcaccgcgaccagggccgcaggaagacgcagtggtataagttgaaatccaaaccaggaaagaaggacaaggagcgaggagaaattgaggttgacatccagtttatgagaaacaacatgactgccagcatgtttgacctttctatgaaagacaagtctcggaatccatttggaaagctgaaggacaagatcaaggggaagaataaggacagtgggtcagacaccgcctccgccatcatccctagcacgacaccttcggtcgacagtgatgatgagtctgtggttaaagacaagaaaaagaaatcaaagatcaagaccttactttccaagtcaaatttgcagaagacgcctctttcccagtccatgtctgtcctgccgacttcaaagccagaaaaagtgctgcttcgtcccggagactttcagtcccagtgggatgaagatgacaatgaggatgagtcctcctcggcctcggatgtcatgtctcacaagagaacagcgagtacggatcttaagcaactgaaccaggtcaactttacccttcccaagaaggaaggactttcctttcttggtggccttcggtctaagaatgatgtcctttcccgctctaatgtctgcatcaatgggaaccatgtttacctggagcagccccaacccaccggtgagatcaaggatagcagcccgtcctcctccccatcccccaagggtttcagaaagaaaacattgttctcttctacagagaacctggcggctgggtcttggaaggagcctgctgaaggaggtgggctgtctactgacagggatgtctccgaatcttccaccaaggactccttgaagtctatgaccttgccgacctaccgacctgccccactgatcagtggggacctcagggaaaaaatggcccccgcaaactcagaggccacaaaagaagctaaggagagcaagaagccagagagcaggaggtcctctttgctgtctctgatgacggggaagaaggatgtggctaagggcagtgaaggtgaaaaccttctcacggtcccagggagggagaaggaaggcatgctgatgggggttaagccgggggaggacgcatcggggcctgctgaagaccttgtgagaagatctgagaaagatactgcagctgttgtctccagacagggcagctccctgaacctctttgaagatgtgcagatcacagaaccagaagctgagccagagtccaagtctgaaccgagacctccaatttcctctccgagggctccccagaccagagctgtcaagccccgacttcatcctgtgaagccaatgaatgccacggccaccaaggttgctaactgcagcttgggaactgccaccatcatcagtgagaacttgaacaatgaggtcatgatgaagaaatacagcccctcggaccctgcatttgcatatgcgcagctgacccacgatgagctgattcagctggtcctcaaacagaaggaaacgataagcaagaaggagttccaggtccgcgagctggaagactacattgacaacctgcttgtcagggtcatggaagaaacccccaatatcctccgcatcccgactcaggttggcaaaaaagcaggaaagatgtaaatcagcagaaaaaaaacaccgagacgtttctgtgacttcactttcacctgctccaggggtcaaggacttgccttgcctgataaccagccagcaggctccgaatcaccatctccctcacatgttatccggcaagagt

SEQ ID NO: 3722 - protein, 649 aa, Homo sapien
MSLMVSAGRGLGAVWSPTHVQVTVLQARGLRAKGPGGTSDAYAVIQVGKEKYATSVSERSLGAPVWREEATFELPSLLSSGPAAAATLQLTVLHRALLGLDKFLGRAEVDLRDLHRDQGRRKTQWYKLKSKPGKKDKERGEIEVDIQFMRNNMTASMFDLSMKDKSRNPFGKLKDKIKGKNKDSGSDTASAIIPSTTPSVDSDDESVVKDKKKKSKIKTLLSKSNLQKTPLSQSMSVLPTSKPEKVLLRPGDFQSQWDEDDNEDESSSASDVMSHKRTASTDLKQLNQVNFTLPKKEGLSFLGGLRSKNDVLSRSNVCINGNHVYLEQPQPTGEIKDSSPSSSPSPKGFRKKTLFSSTENLAAGSWKEPAEGGGLSTDRDVSESSTKDSLKSMTLPTYRPAPLISGDLREKMAPANSEATKEAKESKKPESRRSSLLSLMTGKKDVAKGSEGENLLTVPGREKEGMLMGVKPGEDASGPAEDLVRRSEKDTAAVVSRQGSSLNLFEDVQITEPEAEPESKSEPRPPISSPRAPQTRAVKPRLHPVKPMNATATKVANCSLGTATIISENLNNEVMMKKYSPSDPAFAYAQLTHDELIQLVLKQKETISKKEFQVRELEDYIDNLLVRVMEETPNILRIPTQVGKKAGKM

SEQ ID NO: 3723 - DNA, 1014 bp, Homo sapien
ttcctcagaaacgagcaaacctgaaagctactctctcagcttcagagggaaaaaatggttgtagatttctggacttgggagcagacatttcaagaactaatccaagaggcaaaaccccgggccacatggacgctgaagttggatggcaaccttcagctagactgcctggctcaagggtggaagcaataccaacagagagcatttggctggttccggtgttcctcctgccagcgaagttgggcttccgccaagttgcagattctgtgccacacgtactgggagcactggacatcccagggtcaggtgcgtatgaggctctttggccaaaggtgccagaagtgctcctggtcccaatatgagatgcctgagttctcctcggatagcaccatgaggattctgagcaacctggtgcagcatatactgaagaaatactatggaaatggcatgaggaagtctccagaaatgccagtaatcctggaagtgtccctggaaggatcccatgacacagccaattgtgaggcatgcactttgggcatatgtggacagggcttaaaaagctacatgacaaagccgtccaaatccctactcccccacctaaagactgggaattcctcacctggaattggtgctgtgtacctcgcaaaccaagccaagaaccagtcagatgaggcaaaagaggctaaggggagtgggtatgagaaattagggcccagtcgagacccagatccactgaacatctgtgtctttattttgctgcttgtatttattgtagtcaaatgctttacatcagaatgatgaaaataggcttgccactttctcttattttaattccatggtagtcaatgaactggctgccactttaatataactgaaaattcattttgagaccaagcaggatcaagtttgtagaataaacactggtttcctagctatcctctgaaaacagtatgaaacatgaccaagtacataatggatttagtaataaatattgtcgaattgctaaaaaaaaaaaaa

SEQ ID NO: 3724 - protein, 246 aa, Homo sapien
MVVDFWTWEQTFQELIQEAKPRATWTLKLDGNLQLDCLAQGWKQYQQRAFGWFRCSSCQRSWASAKLQILCHTYWEHWTSQGQVRMRLFGQRCQKCSWSQYEMPEFSSDSTMRILSNLVQHILKKYYGNGMRKSPEMPVILEVSLEGSHDTANCEACTLGICGQGLKSYMTKPSKSLLPHLKTGNSSPGIGAVYLANQAKNQSDEAKEAKGSGYEKLGPSRDPDPLNICVFILLLVFIVVKCFTSE

SEQ ID NO: 3725 - DNA, 3401 bp, Homo sapien
aaaatttgaagacaagatgggcacctactctacaattctgataaaaacagaggtcatcgaatgtgggaactactgtggagtacgcatcattcactctttgattgcagagttctcactggaagaattgaagaaaagctatcacctgaataaaagtcaaattatgttggatatgctaactgagaatttgttcttcgatactggtatgggaaaaagtaaatttttgcaagatatgcacacactcctactcacaagacaccgcgatgaacatgaaggtgaaacaggaaattggttttccccatttattgaagcattacataaagatgaaggaaatgaagcagttgaagctgtattgcttgaaagtatccatcggttcaacccaaatgcattcatttgccaagcgttggcaagacatttctacattaaaaagaaggactttggcaatgctctaaactgggcaaaacaagcaaaaatcatagaacctgacaattcttatatctcagatacactgggtcaagtctacaaaagtaaaataagatggtggatagaggaaaacggaggaaacgggaacatttcagttgatgatctaattgctcttttggatttagcagaacatgcctcaagtgcattcaaagaatctcaacagcaaagtgaagatagagagtatgaagtgaaggaaagattgtatccgaagtcaaaaaggcggtatgatacttacaatatagctggttatcaaggagagatagaagttgggctttacacaatccaaattctccagctcattcctttttttgataataaaaatgagctatctaaaagatatatggtcaattttgtatcaggaagtagtgatattccaggggatccaaacaatgaatataaattagccctcaaaaactatattccttatttaactaaattgaaattttctttgaaaaagtcctttgatttttttgatgaatactttgtcctgctaaaacccaggaacaatattaagcaaaatgaagaggccaaaactcggagaaaggtggctggatattttaagaaatatgtagatatattttgtctcttagaagaatcacaaaacaacacaggtcttggatcaaagttcagtgagccacttcaagtagagagatgcaggagaaacctagtagctttaaaagcagacaagttttctgggctcttggaatatcttatcaaaagtcaagaggatgctataagcactatgaaatgtatagtgaacgaatatacttttctcttagaacaatgcactgtcaaaatccagtcaaaagaaaagctaaatttcatcttggccaacattattctctcctgtatccaacctacctccagattagtaaagccagttgaaaaactaaaagatcagcttcgagaagtcttgcaaccaataggactgacttatcagttttcagaaccgtattttctagcttccctcttattctggccagaaaatcaacaactagatcaacattctgaacaaatgaaagagtatgctcaagcactaaaaaattctttcaaggggcaatataaacatatgcatcgtacaaagcaaccaattgcatatttctttcttggaaaaggtaaaagactggaaagacttgttcacaaaggaaaaattgaccagtgctttaagaagacaccagatattaattccttgtggcagagtggagatgtgtggaaggaggaaaaagtccaagaacttttgcttcgtttacaaggtcgagctgaaaacaattgtttatatatagaatatggaatcaatgaaaaaatcacaatacccatcactcccgcttttttaggtcaacttagaagtggcagaagcatagagaaggtgtctttttacctgggatttcccattggaggcccacttgcttatgacattgaaattgtttaagagcctgatattcttcctccaagaatttgatctcagtacccatttaatttttttggactcaagatctatgctttaaaccggcaaggttatagatacagcctctagctcttcagatctgtacatgcagtatttaatttcctcttaaacatgttatgagttctacaaggacaatagtgaaaaaggaaggagtgagatatatgaaaagtagcaaatatgttccttggtttggttaacatcattgatgacaaaataataaggagctatgactggagtcaggagaagttagtgtaataagctggctacacagaaccccactacttaccaggcatggattgaagaagattgtctactcaaatggcatttagacattagaatgtctgggaaaatatttctcaaagacagcaaaaacctctcaaactgaggagcaacatttattcttactaagcagatcatcaatgtatcatgtgcttggcactcaaggatcttccaaaacagaggaccaaccagtcttctgaaggtcatgcccacagaagtcatcggaccttaccaaagtaggttggagaattagattgccttttcatgcagtgagattcagttaagcaaaaatgaaatttgtctctatagctaattagcttatcaactcccctccaaacaaacaattaaaaaaaaaacatacagacactcaaattccacaagctaatgaacaaaagggactcttgtgagaagactaatgagtccctcatccagaagatgccaatgtactggcagattaacatacaacctatgttttgaacaaaaacaaccagcgatacgtaatcaaaatgtaattttcccctaataaaattatggatatgggcagtcatcaatggctgccaaaaccattaagtggaaagctgattaaaaaacaaaaatttctaatggatttatcaaactgtcccaaatcctgataaatattaacatcacagaggaagaccagacattatgggcctggaagtactataggagtgcacacatcacccgtgacatggtcttgccaaataattaaacctgaatttgatcaggtctctggatcttatttgcaattcaaaagaaattttaaaaaaatcctactaacaccaccacaaatatgcaatcagcaatatccagaaaggggaaattcacaggacaaaaacctggttttcttttttggtttcttcaaccaaaaaagaaagaaattgcaaaggaccaaaaaaatgttggggaatctatacattataagggacttaacaactaaagggcaacatatagactttagatcctaatttgagcaaaatctaaaatcaattattaggcaatcagaaaaatttgaacacagactagatatttgaggatattaaggtactatattattgaagattccatggttatgttttttaaagagttcatgccttttagagatacatactaaagtatttgtaaataaatgacatgatctagaaaaaaaaaaaaaaaa

SEQ ID NO: 3726 - protein, 630 aa, Homo sapien
MGTYSTILIKTEVIECGNYCGVRIIHSLIAEFSLEELKKSYHLNKSQIMLDMLTENLFFDTGMGKSKFLQDMHTLLLTRHRDEHEGETGNWFSPFIEALHKDEGNEAVEAVLLESIHRFNPNAFICQALARHFYIKKKDFGNALNWAKQAKIIEPDNSYISDTLGQVYKSKIRWWIEENGGNGNISVDDLIALLDLAEHASSAFKESQQQSEDREYEVKERLYPKSKRRYDTYNIAGYQGEIEVGLYTIQILQLIPFFDNKNELSKRYMVNFVSGSSDIPGDPNNEYKLALKNYIPYLTKLKFSLKKSFDFFDEYFVLLKPRNNIKQNEEAKTRRKVAGYFKKYVDIFCLLEESQNNTGLGSKFSEPLQVERCRRNLVALKADKFSGLLEYLIKSQEDAISTMKCIVNEYTFLLEQCTVKIQSKEKLNFILANIILSCIQPTSRLVKPVEKLKDQLREVLQPIGLTYQFSEPYFLASLLFWPENQQLDQHSEQMKEYAQALKNSFKGQYKHMHRTKQPIAYFFLGKGKRLERLVHKGKIDQCFKKTPDINSLWQSGDVWKEEKVQELLLRLQGRAENNCLYIEYGINEKITIPITPAFLGQLRSGRSIEKVSFYLGFPIGGPLAYDIEIV

SEQ ID NO: 3727 - DNA, 6140 bp, Homo sapien; identical to SEQ ID NO: 2999

SEQ ID NO: 3728 - protein, 500 aa, Homo sapien; identical to SEQ ID NO: 3000

SEQ ID NO: 3729 - DNA, 2344 bp, Homo sapien
gttggttctgtgcgcctcagagttggagcacacagctgtattaaaaaggcaaatcgaaggccgggcgcggtgactcacgcctgtcatcctagcactttgggaggccgaggcggctgaatcacttgaggttaggagtttgagatcagcccgggcaacatggtgaaaccccgtctctacaaaaatagaaaaattagccgagcgtgatggtggatgcctgtaatcctagctcctcgggaggctaaggagtataatgtctcaggaaggcgattatgggaggtggaccatatctagtagtgatgaaagtgaggaagaaaagccaaaaccagacaagccatctacctcttctcttctctgtgccaggcaaggagcagcaaatgagcccaggtacacctgttccgaggcccagaaagctgcacacaagaggaaaatatcacctgtgaaattcagcaatacagattcagttttacctcccaaaaggcagaaaagcggttcccaggaggacctcggctggtgtctgtccagcagtgatgatgagctgcaaccagaaatgccgcagaagcaggctgagaaagtggtgatcaaaaaggagaaagacatctctgctcccaatgacggcactgcccaaagaactgaaaatcatggcgctcccgcctgccacaggctcaaagaggaggaagacgagtatgagacatcaggggagggccaggacatttgggacatgctggataaagggaaccccttccagttttacctcactagagtctctggagttaagccaaagtataactctggagccctccacatcaaggatattttatctcctttatttgggacgcttgtttcttcagctcagtttaactactgctttgacgtggactggctcgtaaaacagtatccaccagagttcaggaagaagccaatcctgcttgtgcatggtgataagcgagaggctaaggctcacctccatgcccaggccaagccttacgagaacatctctctctgccaggcaaagttggatattgcgtttggaacacaccacacgaaaatgatgctgctgctctatgaagaaggcctccgggttgtcatacacacctccaacctcatccatgctgactggcaccagaaaactcaaggaatatggttgagccccttatacccacgaattgctgatggaacccacaaatctggagagtcgccaacacattttaaagctgatctcatcagttacttgatggcttataatgccccttctctcaaggagtggatagatgtcattcacaagcacgatctctctgaaacaaatgtttatcttattggttcaaccccaggacgctttcaaggaagtcaaaaagataattggggacattttagacttaagaagcttctgaaagaccatgcctcatccatgcctaacgcagagtcctggcctgtcgtaggtcagttttcaagcgttggctccttgggagccgatgaatcaaagtggttatgttctgagtttaaagagagcatgctgacactggggaaggaaagcaagactccaggaaaaagctctgttcctctttacttgatctatccttctgtggaaaatgtgcggaccagtttagaaggatatcctgctgggggctctcttccctatagcatccagacagctgaaaaacagaattggctgcattcctattttcacaaatggtcagctgagacttctggccgcagcaatgccatgccacatattaagacatatatgaggccttctccagacttcagtaaaattgcttggttccttgtcacaagcgcaaatctgtccaaggctgcctggggagcattggagaagaatggcacccagctgatgatccgctcctacgagctcggggtccttttcctcccttcagcatttggtctagacagtttcaaagtgaaacagaagttcttcgctggcagccaggagccaatggccacctttcctgtgccatatgatttgcctccagaactgtatggaagtaaagatcggccatggatatggaacattccttatgtcaaagcaccggatacgcatgggaacatgtgggtgccctcctgagaatcttgaggcactgtgaaatttaagtgtaagacattgagccacaaacatggaatctcttctttgtactggatgtccacttcccttaaagtcttatttgcacccttacaaaatctttccaaaggtcactcttatgaatggatgttggttatacttttaatggacattaacattcctaataaagtattagtttcttaaaaaaaaaaaaaaaaaaaaaaaaaaaaaaaaaaaaaaaaaaaaaaaaaaaaaaaaaaaaaaaaaaaaaaa

SEQ ID NO: 3730 - protein, 608 aa, Homo sapien
MSQEGDYGRWTISSSDESEEEKPKPDKPSTSSLLCARQGAANEPRYTCSEAQKAAHKRKISPVKFSNTDSVLPPKRQKSGSQEDLGWCLSSSDDELQPEMPQKQAEKVVIKKEKDISAPNDGTAQRTENHGAPACHRLKEEEDEYETSGEGQDIWDMLDKGNPFQFYLTRVSGVKPKYNSGALHIKDILSPLFGTLVSSAQFNYCFDVDWLVKQYPPEFRKKPILLVHGDKREAKAHLHAQAKPYENISLCQAKLDIAFGTHHTKMMLLLYEEGLRVVIHTSNLIHADWHQKTQGIWLSPLYPRIADGTHKSGESPTHFKADLISYLMAYNAPSLKEWIDVIHKHDLSETNVYLIGSTPGRFQGSQKDNWGHFRLKKLLKDHASSMPNAESWPVVGQFSSVGSLGADESKWLCSEFKESMLTLGKESKTPGKSSVPLYLIYPSVENVRTSLEGYPAGGSLPYSIQTAEKQNWLHSYFHKWSAETSGRSNAMPHIKTYMRPSPDFSKIAWFLVTSANLSKAAWGALEKNGTQLMIRSYELGVLFLPSAFGLDSFKVKQKFFAGSQEPMATFPVPYDLPPELYGSKDRPWIWNIPYVKAPDTHGNMWVPS

SEQ ID NO: 3731 - DNA, 3108 bp, Homo sapien
ggagcccatgatttcctggaagagccctagagctttgctttttctctcctgcagcacttaaccgaaaccagttttgcaatcaattcctgttcaaaggccaccctactcttcctatccgtctttctccagcccagacactcacagccccctgccagaccaggggacctcggagaggcaaggacagaggttcaggatcttcctctccctcgggacccaaggccacaaaggagagctccgtggagagaagaaaatcatttgactcctggggacacagatttgctgccacagaggctgatggacaaccaggcggagagagaaagtgaggctggtgttggtttgcaaagggatgaggatgacgctcctctgtgtgaagacgtggagctacaagacggagatctgtcccccgaagaaaaaatatttttgagagaatttcccagattgaaagaagatctgaaagggaacattgacaagctccgtgccctcgcagacgatattgacaaaacccacaagaaattcaccaaggctaacatggtggccacctctactgctgtcatctctggagtgatgagcctcctgggtttagcccttgccccagcaacaggaggaggaagcctgctgctctccaccgctggtcaaggtttggcaacagcagctggggtcaccagcatcgtgagtggtacgttggaacgctccaaaaataaagaagcccaagcacgggcggaagacatactgcccacctacgaccaagaggacagggaggatgaggaagagaaggcagactatgtcacagctgctggaaagattatctataatcttagaaacaccttgaagtatgccaagaaaaacgtccgtgcattttggaaactcagagccaacccacgcttggccaatgctaccaagcgtcttctgaccactggccaagtctcctcccggagccgcgtgcaggtgcaaaaggcctttgcgggaacaacactggcgatgaccaaaaatgctcgcgtgctgggaggtgtgatgtccgccttctcccttggctatgacttggccactctctcaaaggaatggaagcacctgaaggaaggagcaaggacaaagtttgcggaagagttgagagccaaggccttggagctggagaggaaactcacagaactcacccagctctacaagagcttgcagcagaaagtgaggtcaagggccagaggggtggggaaggatttaactgggacctgcgaaaccgaggcttactggaaggagttaagggagcatgtgtggatgtggctgtggctgtgtgtgtgtctgtgtgtctgtgtgtatgtacagtttacatgaatgttcctcaggacatggcatacaatggccttggaggtccaaataatatcaagtacatcttggagatgagggtgcctgtcctggacagacctcggcatgccttctgtttctccttcaatgctccttaaggcctatgtgctgggaaaagggtcttccctgtttgtttgtttgtttgtttgtttgtttgttttgagactccagtctgggtgtcagaatgagaccccatctcaaaaaaaaaaaaaaaaaaaaaaaagaagaagaatacagtcatgtatctcttggtgacagggacgcattctgataaatgtgtcattaggcaattgcattgtagtgtgattatcacagattgtacttatacaaaacttagatggcatagcctactgcatacctaggctatatgggagagcctattgctcccaggctacgcacctgtacagcatgtgactactgaatactataggcaattgcagcacaatgggaaatatttgtgtatctaaacatatgtaaacagagaaaaaggaaagtaaaaatatggcataaaagataagaattggctctcctgtacagggcacttactacgaatggagcttgcagggctgagagttgctccagatgagtcagtgagtggtgaatgaatgtgaaggcctagggcattactgtatactactgtaggctttataaacacagcacacttagggtacacaaaatgcatattaaaacattttcttccttcagtatattaggcaataggaatttttcaagtccactataaatcttatcaaaccatggttgtatatgcagttgaccgaaacattgttattggacacataactatagttgaaagaataagcaaaaagtctatctaggtgtgctgtcttgagcaacttttaattattctcctgtcctgcaatatgagttaatcttctctgatcgatgtagattccaggaaggggtgtccaggacaattaccttccttctggagaaacttcccttaatcaaataagagaacttcaaagaaaatccctccctgtgctttggaagggaagggaggtgggcagcagtgggtcagagatagacctttgttctcttatttctgaggcccttcagtctcctttattcaaagcactcagcatgccaaagcaccctattttagggtatctttttctgagccctaaacactgtgttggggatgtcaactgtgacaggaaaatatcttggggccccagaatcactaaggaaaactcaagcttagggaaacttcttagggcaaacccacctcccactctattcaaagttatctctctgctcactgagatagatacatatctgattgcctcctttggaaaggctaatcagaaactcaaaagaatgcaactgtttgtgtctcacctatctgtgacctggaagctccctccccactgaaccaatgttcttcttacatatattgattaatgtcttatgtctccctaaaatgtataaaaccaaggtatgccccaaccatcttggccacatgtcatcaggacttcctgagtctgtgtcacagtgtgtcctcaaccttggcaaaataaactttctaaattaactgagacctgtctcggattttctgggttcacattttggaaaccatgaatggattctgggtggagatgcccctgacccttgacaaatctatcggtgcttggtaccagcatgagctaactttatggctcaaaccaataggacaatttgctgaggtctgagaggactccctccagaaaatccctgatctcttaaaatttggta

SEQ ID NO: 3732 - protein, 343 aa, Homo sapien
MDNQAERESEAGVGLQRDEDDAPLCEDVELQDGDLSPEEKIFLREFPRLKEDLKGNIDKLRALADDIDKTHKKFTKANMVATSTAVISGVMSLLGLALAPATGGGSLLLSTAGQGLATAAGVTSIVSGTLERSKNKEAQARAEDILPTYDQEDREDEEEKADYVTAAGKIIYNLRNTLKYAKKNVRAFWKLRANPRLANATKRLLTTGQVSSRSRVQVQKAFAGTTLAMTKNARVLGGVMSAFSLGYDLATLSKEWKHLKEGARTKFAEELRAKALELERKLTELTQLYKSLQQKVRSRARGVGKDLTGTCETEAYWKELREHVWMWLWLCVCLCVCVYVQFT

SEQ ID NO: 3733 - DNA, 4290 bp, Homo sapien
  Unsure 3043: Unknown base
ccgggccgcccgcgtgcccaagcccacgtgagagggcaggacgcctgagagcttgaggccacacgaggctgtggagcggcgtgactcaaacgtggcgcgcatcagctcgcacacttccaaacctcgcgatagctactggccctgggcgagccgttgggattgcgcttgcgcacagcgtgtcttctggatcgccatacctaccctgtggtcctcatcttcctggcctcatagctcctcctcgccaagcatgtcttccccgttgcaaagagctgtgggagataccaagagggccttgtctgcatcttctagttcctctgccagtctaccctttgatgacagggactcaaaccatacctcagaggggaatggcgactctttgttagctgatgaagacactgactttgaagacagcttgaatcgcaatgtgaagaagagagcagcaaaacgaccaccgaaaacaacaccggtggcaaaacatccaaagaaagggtcccgagtggtacatcgtcatagccggaaacagtcagagccaccagccaatgatcttttcaatgctgtgaaagccgccaaaagtgacatgcagtctttggtagatgagtggctggatagctacaagcaagaccaggatgcaggatttctggagcttgttaactttttcatccaatcttgcggatgtaaaggcattgtgacccctgagatgttcaagaagatgtccaactcagagatcatccagcacctaacagagcagtttaatgaggactcgggggactaccctctcatagctccaggtccatcctggaagaagttccagggcagcttctgtgaatttgtgaggacattggtctgtcagtgccagtacagcctcctctatgatggcttccctatggacgacctcatctccctgctcactggcctctcagactcacaagtccgcgccttccgtcacactagcaccctggctgctatgaaactgatgacctccctggtaaaagttgccctccaactgagtgtgcaccaagataacaatcagcgtcagtatgaggctgaaagaaacaaggggccagggcagagggcacctgagcggctggagagcctgttggagaaacgcaaagagctccaagagcatcaagaggagattgaggggatgatgaatgccctcttcaggggtgtctttgttcatcggtacagggatgtccttcctgagatccgtgctatctgcattgaggaaattgggtgttggatgcaaagctacagcacgtctttcctcaccgacagctatttaaaatatattggttggactctgcatgataagcaccgagaagtccgcgtgaagtgcgtgaaggctctgaaagggctgtacggtaaccgggacctgaccgcacgcctggagctcttcaccagccgcttcaaggaccggatggtttccatgatcatggacagagagtacagtgtggcagtggaggccgtcagattactgatacttatacttaagaacatggaagggttgctgacggacgcggattgtgagagcgtctaccccgttgtgtatccttctaatcgaggcctggcttctgccgcaggcgaatttctgtactggaaacttttctaccctgagtgcgagataagaacgatgggtggaagagagcaacgccagagcccaggcgcccagaggactttcttccagcttctgctgtccttctttgtggagagcgagctccatgaccacgctgcttacttagtagacagtctgtgggactgtgcaggggctcggctgaaggactgggagggtctgacaagcctgctgctggagaaggaccagaacctgggtgatgtgcaggagagcacactgatagaaatccttgtgtccagtgcccggcaagcttcagaggggcacccgcctgtgggccgggtcactgggaggaagggcttaacctctaaggagcgcaagacccaagccgatgacagggtgaagttgactgagcacctcatccccctgctgccccagctcctggccaagttctcagctgatgcagagaaggtcactcccctgctccagcttctcagctgctttgacctccacatctactgcactgggcgcttggagaagcacctggagctgttcctgcagcaactccaggaggtggtggtgaagcatgcagagccagcggtgcttgaggctggggcgcatgccctctacctgctctgtaatcccgaattcactttcttcagccgggcggactttgcccgcagccagctagtagatttgctgactgaccgcttccagcaggagcttgaagagctgttacagtcgtccttcctagatgaggatgaggtatataatctggcagccactctgaaacgcctctctgccttctacaacactcatgacctgactcgctgggagctctatgagccatgttgccaactcctgcagaaggctgtggacacaggagaggttcctcaccaggttatcctgccagccttgactcttgtctatttttccattctctggacactaacccacatttctaaatcagatgcttcccagaagcagctgtcgagtttgagggacagaatggtggccttctgtgaactctgccagagttgcctctcagatgtggatactgagatccaggagcaggcttttgtcttattaagtgatctacttctcatctttagccctcagatgatagttgggggccgtgatttccttaggccacttgtcttttttcctgaagctactctccagtctgagctagccagcttcctcatggaccacgtcttcatccagccgggagacctgggcagtggtgattcccaggaggatcatttacagatagagcggctacaccagcggcgccgcctcctagccgggttctgcaagctgttgctttatggggtgctggagatggatgcagcctcagatgttttcaaacactacaacaagttctacaatgactatggtgacattatcaaggaaacattaactagagcaaggcagattgaccgaagtcattgttcccgaatcctgctgctgagcctnaagcagctgtacacagaactgctgcaggagcatgggccccagggcctgaatgagcttcctgccttcatcgagatgagggacctggcccggaggtttgccttgagttttggaccccagcagctgcagaaccgtgacctcgtggtcatgctacacaaggaaggcatccagttctccttgtctgagcttcctccagctggctcctccaatcagcctccaaatctggcattcctggagctcctttcagagttttccccccgactcttccatcaggacaagcagcttttgctgtcctatctagaaaagtgcctgcagcatgtctcccaggcacctggccatccctggggcccagtcaccacctactgccactccctcagccctgtggagaacacagcagagaccagccctcaggtcctccccagctccaagaggaagcgcgttgaagggcctgccaagcctaacagagaggacgtctcctcgtcccaggaagaaagtctgcagctgaacagcatcccgcccacgcccaccctcacctccacagctgtgaagagcaggcagcccctgtgggggttgaaagagatggaggaagaagatggctcagagttggattttgcccaggggcagcccgtcgcaggcaccgagaggtcaaggttcttgggtccacaatatttccagactccacacaacccttcaggtcctggcctgggcaaccagctgatgcgactcagccttatggaagaggacgaggaagaagagttagaaatccaggatgagtcaaatgaagaacggcaggatacagacatgcaagcaagtagctactcttccaccagtgagcgcgggctggacctcttagattctacagagctggatattgaggatttctgacaggactctgggcccctccccagctccactccctacctcaagaatgtgaccatttggaaaaggcaaagagaaaaggagcaaaatgaagcattcccccaggcttcagccctgggctctgaggggaaagagttgggcattgtttttctaacctaacctttccctctggggtagagaagccgagagaccctgtcctccctaatgcactgtggcccagtccccttgcctttttcctgttctgtttggagtggagaagggcagcacctctgtgtttaatggaaatagcccatagtctcctggatttttggaacatctttctcagcctattttgtgtcctaatgattcgctcaataaacatgtttgaatcc

SEQ ID NO: 3734 - protein, 1225 aa, Homo sapien
MSSPLQRAVGDTKRALSASSSSSASLPFDDRDSNHTSEGNGDSLLADEDTDFEDSLNRNVKKRAAKRPPKTTPVAKHPKKGSRVVHRHSRKQSEPPANDLFNAVKAAKSDMQSLVDEWLDSYKQDQDAGFLELVNFFIQSCGCKGIVTPEMFKKMSNSEIIQHLTEQFNEDSGDYPLIAPGPSWKKFQGSFCEFVRTLVCQCQYSLLYDGFPMDDLISLLTGLSDSQVRAFRHTSTLAAMKLMTSLVKVALQLSVHQDNNQRQYEAERNKGPGQRAPERLESLLEKRKELQEHQEEIEGMMNALFRGVFVHRYRDVLPEIRAICIEEIGCWMQSYSTSFLTDSYLKYIGWTLHDKHREVRVKCVKALKGLYGNRDLTARLELFTSRFKDRMVSMIMDREYSVAVEAVRLLILILKNMEGLLTDADCESVYPVVYPSNRGLASAAGEFLYWKLFYPECEIRTMGGREQRQSPGAQRTFFQLLLSFFVESELHDHAAYLVDSLWDCAGARLKDWEGLTSLLLEKDQNLGDVQESTLIEILVSSARQASEGHPPVGRVTGRKGLTSKERKTQADDRVKLTEHLIPLLPQLLAKFSADAEKVTPLLQLLSCFDLHIYCTGRLEKHLELFLQQLQEVVVKHAEPAVLEAGAHALYLLCNPEFTFFSRADFARSQLVDLLTDRFQQELEELLQSSFLDEDEVYNLAATLKRLSAFYNTHDLTRWELYEPCCQLLQKAVDTGEVPHQVILPALTLVYFSILWTLTHISKSDASQKQLSSLRDRMVAFCELCQSCLSDVDTEIQEQAFVLLSDLLLIFSPQMIVGGRDFLRPLVFFPEATLQSELASFLMDHVFIQPGDLGSGDSQEDHLQIERLHQRRRLLAGFCKLLLYGVLEMDAASDVFKHYNKFYNDYGDIIKETLTRARQIDRSHCSRILLLSLKQLYTELLQEHGPQGLNELPAFIEMRDLARRFALSFGPQQLQNRDLVVMLHKEGIQFSLSELPPAGSSNQPPNLAFLELLSEFSPRLFHQDKQLLLSYLEKCLQHVSQAPGHPWGPVTTYCHSLSPVENTAETSPQVLPSSKRKRVEGPAKPNREDVSSSQEESLQLNSIPPTPTLTSTAVKSRQPLWGLKEMEEEDGSELDFAQGQPVAGTERSRFLGPQYFQTPHNPSGPGLGNQLMRLSLMEEDEEEELEIQDESNEERQDTDMQASSYSSTSERGLDLLDSTELDIEDF

SEQ ID NO: 3735 - DNA, 2204 bp, Homo sapien
gaaaacattttgctgaaaatataagcaaacatcggccttgtcctccttgtgttcatacactgtggaagcttttctctgcctcctccgtgagagtgcgtggccgggagaccagaaacgtggtcctttctcttgcctgtgagctggtgcagagatggaggaagaagaatatgaacaaattccccaggagaatcccccagaagagctgtcccaggatcctgtgctggagctgtcaggaggtctcgccagaggtggcagacgctatctgccaagccatcgtcttatccgccccagggccccacgccgtgctcctggtgacacaactgggccggttcacggatgaggatcagcaggtggtcaggcgcctgcaggaggtctttggagtgggggttctgggtcacaccatcctggtgttcacccggaaggaagacctggctggcagctccctggaagactatgtgcgagagaccaacaaccaggcccttgcctggctggatgtgacccttgcacggcgccattgcggcttcaacaacagggcacagggggaggagcaggaggcccaactgcgagagctcatggagaaagttgaagccattatgtgggaaaacgaaggagattattacagcaacaaggcttaccaatatacccagcaaaactttcggctgaaagaactacaggaaaggcaagtaagccagggccaaggctctgaggacgtgcctggtgaggagtcttggctggaaggactgtcccagatccagaaggaatctgaggaagcccacagatgcctgctggggaaggctgacctttgagcctgtgctggacttgagccaaggacaccatcagcctttgcacccccctgtgtccagccctctgtttctctttccatcccatggagtgcttcccagtctccaggtcatgacgtctggtgtaggaagaggggcatggggcttgaggacagggtccagcatgcccagatcacattccagttccttcattccttcttccagaacatctgggtcctccctcctctgtgccccaacagcacgctgtcttcctattggaccttctatctcattggcattgcctttcatgagttacttgtctatactctgatagaaccaaagtttcttgagggcaggcctgtatcttttacttctgtgtaacttccacagcttttgactgcattggagtcatgcagtcacgtttggtgcggcaactccatgcaagctgttgaccagatgacttctcatctctccccacaccatgatggtttaaggtgcctgttgtgtctggtggagacagtgctgggagatgatcagaaatctcagggcacagcctcaggtctacctggacactcatccactgttggagatgctcaacagctagacacagatgctcacagccgacctgtggcctcttgctctgaagccatcccccatcttccctagacacagcagacatctgagaaagcttcagcatttctcttgctaacagattcagaaaagtgtctcaaagcagagcacagagttatttggtgtttgctgaagacagcctttgtgccacaatcacttattaaataagcgatcaatttcccattgaactgaacatgcaacatttatcatacattcagctctcattcacactccttaagatttggtcagaatttttatttctgttcatgtcttctacttttctactcctgtatgaataaaatattgatttgattacagtggctttgactataatgtgggagccaatttttgcctcagtcttcatttttatatttaccttgttattctcaggcatttttttcttctatgtgagagttaaaatcattctgtaatttccccccaaaatcatattggtattctagttggcaatgtcttacatttatgttaagtttgagggaattggtagttcaagtataagttaattaaggccattttatttctaagtgaacagacttgaaactccagagctactgaagtaaaagttagaatcatttgcattttcattcagataggagataattttgtaaattttgatgctattattttaactctattagcttaagtaatgtcataatagaaaacacaagcatttgaccaaatgagatccattcagcgactaactggcaaggcactcaaaacatgtcattcattaaatgttgtttttatttacctcaaaaaaaaaaaaaaaaaaaaaaa

SEQ ID NO: 3736 - protein, 212 aa, Homo sapien [sequence omitted]

SEQ ID NO: 3737 - DNA, 3916 bp, Homo sapien
agagtgctgatttagaagaatacaaatcatggctgaaaatagtgtattaacatccactactgggaggactagcttggcagactcttccatttttgattctaaagttactgagatttccaaggaaaacttacttattggatctacttcatatgtagaagaagagatgcctcagattgaaacaagagtgatattggttcaagaagctggaaaacaagaagaacttataaaagccttaaaggacattaaagtgggctttgtaaagatggagtcagtggaagaatttgaaggtttggattctccggaatttgaaaatgtatttgtagtcacggactttcaggattctgtctttaatgacctctacaaggctgattgtagagttattggaccaccagttgtattaaattgttcacaaaaaggagagcctttgccattttcatgtcgcccgttgtattgtacaagtatgatgaatctagtactatgctttactggatttaggaaaaaagaagaactagtcaggttggtgacattggtccatcacatgggtggagttattcgaaaagactttaattcaaaagttacacatttggtggcaaattgtacacaaggagaaaaattcagggttgctgtgagtctaggtactccaattatgaagccagaatggatttataaagcttgggaaaggcggaatgaacaggatttctatgcagcagttgatgactttagaaatgaatttaaagttcctccatttcaagattgtattttaagtttcctgggattttcagatgaagagaaaaccaatatggaagaaatgactgaaatgcaaggaggtaaatatttaccgcttggagatgaaagatgcactcaccttgtagttgaagagaatatagtaaaagatcttccctttgaaccttcaaagaaactttatgttgtcaagcaagagtggttctggggaagcattcaaatggatgcccgagctggagaaactatgtatttatatgaaaaggcaaatactcctgagctcaagaaatcagtgtcaatgctttctctaaatacccctaacagcaatcgcaaacgacgtcgtttaaaagaaacacttgctcagctttcaagagagacagacgtgtcaccatttccaccccgtaagcgcccatcagctgagcattccctttccatagggtcactcctagatatctccaacacaccagagtctagcattaactatggagacaccccaaagtcttgtactaagtcttctaaaagctccactccagttccttcaaagcagtcagcaaggtggcaagttgcaaaagagctttatcaaactgaaagtaattatgttaatatattggcaacaattattcagttatttcaagtaccattggaagaggaaggacaacgtggtggacctatccttgcaccagaggagattaagactatttttggtagcatcccagatatctttgatgtacacactaagataaaggatgatcttgaagaccttatagttaattgggatgagagcaaaagcattggtgacatttttctgaaatattcaaaagatttggtaaaaacctaccctccctttgtaaacttctttgaaatgagcaaggaaacaattattaaatgtgaaaaacagaaaccaagatttcatgcttttctcaagataaaccaagcaaaaccagaatgtggacggcagagccttgttgaacttcttatccgaccagtacagaggttacccagtgttgcattacttttaaatgatcttaagaagcatacagctgatgaaaatccagacaaaagcactttagaaaaagctattggatcactgaaggaagtaatgacgcatattaatgaggataagagaaaaacagaagctcaaaagcaaatttttgatgttgtttatgaagtagatggatgcccagctaatcttttatcttctcaccgaagcttagtacagcgggttgaaacaatttctctaggtgagcacccctgtgacagaggagaacaagtaactctcttcctcttcaatgattgcctagagatagcaagaaaacggcacaaggttattggcacttttaggagtcctcatggccaaacccgacccccagcttctcttaagcatattcacctaatgcctctttctcagattaagaaggtattggacataagagagacagaagattgccataatgcttttgccttgcttgtgaggccaccaacagagcaggcaaatgtgctactcagtttccagatgacatcagatgaacttccaaaagaaaactggctaaagatgctgtgtcgacatgtagctaacaccatttgtaaagcagatgctgagaatcttatttatactgctgatccagaatcctttgaagtaaatacaaaagatatggacagtacattgagtagagcatcaagagcaataaaaaagacttcaaaaaaggttacaagagcattctctttctccaaaactccaaaaagagctcttcgaagggctcttatgacatcccacggctcagtggagggaagaagtccttccagcaatgataagcatgtaatgagtcgtctttctagcacatcatcattagcaggtatcccttctccctcccttgtcagccttccttccttctttgaaaggagaagtcatacgttaagtagatctacaactcatttgatatgaagcgttaccaaaatcttaaattatagaaatgtatagacacctcatactcaaataagaaactgacttaaatggtacttgtaattagcacttggtgaaagctggaaggaagataaataacactaaactatgctatttgatttttcttcttgaaagagtaaggtttacctgttacattttcaagttaattcatgtaaaaaatgatagtgattttgatgtaatttatctcttgtttgaatctgtcattcaaaggccaataatttaagttgctatcagctgatattagtagctttgcaaccctgatagagtaaataaattttatgggcgggtgccaaatactgctgtgaatctatttgtatagtatccatgaatgaatttatggaaatagatatttgtgcagctcaatttatgcagagattaaatgacatcataatactggatgaaaacttgcatagaattctgattaaatagtgggtctgtttcacatgtgcagtttgaagtatttaaataaccactcctttcacagtttattttcttctcaagcgttttcaagatctagcatgtggattttaaaagatttgccctcattaacaagaataacatttaaaggagattgtttcaaaatatttttgcaaattgagataaggacagaaagattgagaaacattgtatattttgcaaaaacaagatgtttgtagctgtttcagagagagtacggtatatttatggtaattttatccactagcaaatcttgatttagtttgatagtgtgtggaattttattttgaaggataagaccatgggaaaattgtggtaaagactgtttgtacccttcatgaaataattctgaagttgccatcagttttactaatcttctgtgaaatgcatagatatgcgcatgttcaactttttattgtggtcttataattaaatgtaaaattgaaaattcatttgctgtttcaaagtgtgatatctttcacaatagcctttttatagtcagtaattcagaataatcaagttcatatggataaatgcatttttatttcctatttctttagggagtgctacaaatgtttgtcacttaaatttcaagtttctgttttaatagttaactgactatagattgttttctatgccatgtatgtgccacttctgagagtagtaaatgactctttgctacattttaaaagcaattgtattagtaagaactttgtaaataaatacctaaaacccaagtgt

SEQ ID NO: 3738 - protein, 883 aa, Homo sapien
MAENSVLTSTTGRTSLADSSIFDSKVTEISKENLLIGSTSYVEEEMPQIETRVILVQEAGKQEELIKALKDIKVGFVKMESVEEFEGLDSPEFENVFVVTDFQDSVFNDLYKADCRVIGPPVVLNCSQKGEPLPFSCRPLYCTSMMNLVLCFTGFRKKEELVRLVTLVHHMGGVIRKDFNSKVTHLVANCTQGEKFRVAVSLGTPIMKPEWIYKAWERRNEQDFYAAVDDFRNEFKVPPFQDCILSFLGFSDEEKTNMEEMTEMQGGKYLPLGDERCTHLVVEENIVKDLPFEPSKKLYVVKQEWFWGSIQMDARAGETMYLYEKANTPELKKSVSMLSLNTPNSNRKRRRLKETLAQLSRETDVSPFPPRKRPSAEHSLSIGSLLDISNTPESSINYGDTPKSCTKSSKSSTPVPSKQSARWQVAKELYQTESNYVNILATIIQLFQVPLEEEGQRGGPILAPEEIKTIFGSIPDIFDVHTKIKDDLEDLIVNWDESKSIGDIFLKYSKDLVKTYPPFVNFFEMSKETIIKCEKQKPRFHAFLKINQAKPECGRQSLVELLIRPVQRLPSVALLLNDLKKHTADENPDKSTLEKAIGSLKEVMTHINEDKRKTEAQKQIFDVVYEVDGCPANLLSSHRSLVQRVETISLGEHPCDRGEQVTLFLFNDCLEIARKRHKVIGTFRSPHGQTRPPASLKHIHLMPLSQIKKVLDIRETEDCHNAFALLVRPPTEQANVLLSFQMTSDELPKENWLKMLCRHVANTICKADAENLIYTADPESFEVNTKDMDSTLSRASRAIKKTSKKVTRAFSFSKTPKRALRRALMTSHGSVEGRSPSSNDKHVMSRLSSTSSLAGIPSPSLVSLPSFFERRSHTLSRSTTHLI

SEQ ID NO: 3739 - DNA, 2115 bp, Homo sapien
gaaatgaacctctcttattgatttttattggcctagagccaggagtactgcattcagttgactttcagggtaaaaagaaaacagtcctggttgttgtcatcataaacatatggaccagtgtgatggtgaaatgagatgaggctccgcaatggaactgtagccactgctttagcatttatcacttccttccttactttgtcttggtatactacatggcaaaatgggaaagaaaaactgattgcttatcaacgagaattccttgctttgaaagaacgtcttcgaatagctgaacacagaatctcacagcgctcttctgaattaaatacgattgtgcaacagttcaagcgtgtaggagcagaaacaaatggaagtaaggatgcgttgaataagttttcagataataccctaaagctgttaaaggagttaacaagcaaaaaatctcttcaagtgccaagtatttattatcatttgcctcatttattgaaaaatgaaggaagtcttcaacctgctgtacagattggcaacggaagaacaggagtttcaatagtcatgggcattcccacagtgaagagagaagttaaatcttacctcatagaaactcttcattcccttattgataacctgtatcctgaagagaagttggactgtgttatagtagtcttcataggagagacagatattgattatgtacatggtgttgtagccaacctggagaaagaattttctaaagaaatcagttctggcttggtggaagtcatatcaccccctgaaagctattatcctgacttgacaaacctaaaggagacatttggagactccaaagaaagagtaagatggagaacaaagcaaaacctagattactgttttctaatgatgtatgctcaagaaaagggcatatattacattcagcttgaagatgatattattgtcaaacaaaattattttaataccataaaaaattttgcacttcaactttcttctgaggaatggatgattctagagttttcccagctgggcttcattggtaaaatgtttcaagcgccggatcttactctgattgtagaattcatattcatgttttacaaggagaaacccattgattggctcctggaccatattctctgggtgaaagtctgcaaccctgaaaaagatgcaaaacattgtgatagacagaaagcaaatctgcgaattcgcttcagaccttcccttttccaacatgttggtctgcactcatcactatcaggaaaaatccaaaaactcacggataaagattatatgaaaccattacttcttaaaatccatgtaaacccacctgcggaggtatctacttccttgaaggtctaccaagggcatacgctggagaaaacttacatgggagaggatttcttctgggctatcacaccgatagctggagactacatcttgtttaaatttgataaaccagtcaatgtagaaagttatttgttccatagcggcaaccaagaacatcctggagatattctgctaaacacaactgtggaagttttgccttttaagagtgaaggtttggaaataagcaaagaaaccaaagacaaacgattagaagatggctatttcagaataggaaaatttgagaatggtgttgcagaaggaatggtggatccaagtctcaatcccatttcagcctttcgactttcagttattcagaattctgctgtttgggccattcttaatgagattcatattaaaaaagccaccaactgatcatctgagaaaccaacacattttttcctgtgaatttgttaattaaagatagttaagcatgtatcttttttttatttctacttgaacactacctcttgtgaagtctactgtagataagacgattgtcatttccacttggaaagtgaatctcccataataattgtatttgtttgaaactaagctgtcctcagattttaacttgactcaaacatttttcaattatgacagcctgttaatatgacttgtactattttggtattatactaatacataagagttgtacatattgttacattctttaaatttgagaaaaactaatgttacatacattttatgaagggggtacttttgaggttcacttattttactatt

SEQ ID NO: 3740 - protein, 535 aa, Homo sapien
MRLRNGTVATALAFITSFLTLSWYTTWQNGKEKLIAYQREFLALKERLRIAEHRISQRSSELNTIVQQFKRVGAETNGSKDALNKFSDNTLKLLKELTSKKSLQVPSIYYHLPHLLKNEGSLQPAVQIGNGRTGVSIVMGIPTVKREVKSYLIETLHSLIDNLYPEEKLDCVIVVFIGETDIDYVHGVVANLEKEFSKEISSGLVEVISPPESYYPDLTNLKETFGDSKERVRWRTKQNLDYCFLMMYAQEKGIYYIQLEDDIIVKQNYFNTIKNFALQLSSEEWMILEFSQLGFIGKMFQAPDLTLIVEFIFMFYKEKPIDWLLDHILWVKVCNPEKDAKHCDRQKANLRIRFRPSLFQHVGLHSSLSGKIQKLTDKDYMKPLLLKIHVNPPAEVSTSLKVYQGHTLEKTYMGEDFFWAITPIAGDYILFKFDKPVNVESYLFHSGNQEHPGDILLNTTVEVLPFKSEGLEISKETKDKRLEDGYFRIGKFENGVAEGMVDPSLNPISAFRLSVIQNSAVWAILNEIHIKKATN

SEQ ID NO: 3741 - DNA, 953 bp, Homo sapien
agcggcgcaagcggcggcggccactgccacgtattcccggcagtggtggcgggggcggcggcggcgcccgcgggcaggaataactcaagtcacctgtactggaaatcagtttgctgaaattaatcaacgattcttgaagttgaagaaaaggaggttccagccttggcaagaggagtgtggcccttcctggaatccctctggacacaccctcctagcatcctctaggaaagatgcggcagctcaaagggaagcccaagaaggagacctccaaggacaagaaggagcggaagcaagccatgcaggaggcccggcagcagatcactacagtggtgctgcccacgctggccgtggtcgtgctcttgatcgtggtgtttgtgtacgtggccacgcgccccaccatcaccgagtgagccccgcagccggctgcggaccccatcggcagggagaggaaggcgcgggagggggacgcaaacaaaaaaatggctttcatattcagagatgttcatgttgctgagctgtaagcaggagcaccctgtcttctctggtctttgacttgattaaagtatctccgctttcttgggagggaataggggatgttttatcagtgaatgtgccatacaccttatggtccacttcatgtgcctttcagacttcaaagcgcgcgcgcatgtgtgtgtgtgtgtgtgtgtgtgtgtgtgtgtgtgtgtgcttctttttctctcctaaaaatcgataagtagctccacctgaagagggatggaacctctgggtcaggaaacagctggaatccacactcacctcattcccattgtttggatcatgcttctttccaacacgtgttcacaatctccaaagggactgtatttcttctctgtgcttaatgtgatttgaaatatgttgaatcaaagtgaaatatttattttttgaataaaggagataatagccttaaaaaa

SEQ ID NO: 3742 - protein, 59 aa, Homo sapien
MRQLKGKPKKETSKDKKERKQAMQEARQQITTVVLPTLAVVVLLIVVFVYVATRPTITE

SEQ ID NO: 3743 - DNA, 724 bp, Homo sapien
caaaggtcagaggtaaagaagtcatggcggcgctgtgtcggacccgtgctgtggctgccgagagccattttctgcgagtgtttctcttcttcaggccctttcggggtgtaggcactgagagtggatccgaaagtggtagttccaatgccaaggagcctaagacgcgcgcaggcggtttcgcgagcgcgttggagcggcactcggagcttctacagaaggtggagcccctacagaagggttctccaaaaaatgtggaatcctttgcatctatgctgagacattctcctcttacacagatgggacctgcaaaggataaactggtcattggacggatctttcatattgtggagaatgatctgtacatagattttggtggaaagtttcattgtgtatgtagaagaccagaagtggatggagagaaataccagaaaggaaccagggtccggttgcggctattagatcttgaacttacgtctaggttcctgggagcaacaacagatacaactgtactagaggctaatgcagttctcttgggaatccaggagagtaaagactcaagatcgaaagaagaacatcatgaaaaataaatgaactttgcttagtggattgactcctttgctgaagtcagttattcatcaagaatgcaattagactaattgtgaataaatgattgaatgaagatataataaataaaagctataattataaaaaaaaaaaaaaaaaa

SEQ ID NO: 3744 - protein, 187 aa, Homo sapien
MAALCRTRAVAAESHFLRVFLFFRPFRGVGTESGSESGSSNAKEPKTRAGGFASALERHSELLQKVEPLQKGSPKNVESFASMLRHSPLTQMGPAKDKLVIGRIFHIVENDLYIDFGGKFHCVCRRPEVDGEKYQKGTRVRLRLLDLELTSRFLGATTDTTVLEANAVLLGIQESKDSRSKEEHHEK

SEQ ID NO: 3745 - DNA, 1420 bp, Homo sapien
cccaaatatatatttaatcttgtggttcaaataagcttttggctcacatctaagcacatcataaagaacgctgtagaagaggtgacatgatgaggcgggaagacgaggaagaggagggaacaatgatgaaggcaaaaggggacttagagatgaaggaggaggaagagattagtgagacaggagaactggttggcccttttgtgagtgctatgcccactccaatgccccacaacaagggcacccggttctctgaggcatgggaatatttccacctagctcctgctcgtgctgggcaccatcccaaccagtatgccacctgccgcctgtgtggcaggcaggtgagccgtggccctggggtcaacgtgggcaccactgcactgtggaagcatctgaaaagcatgcacagagaggagctggagaagagtggccatggtcaggctgggcagcgccaggatccaaggccccacgggccccagctccccacaggcattgagggtaactggggtaggctcctggagcaggtgggcaccatggctttgtgggccagccaaagggaaaaggaggtgcttaggagggaaagggcagtggaatggcgggagagggctgtggaaaaaagggagcgagccctggaggaggtggaaagggccatcctggagatgaagtggaaggtgagggctgagaaggaggcatgccagcgggagaaagagctgcctgcagcagtacatcccttccattttgtttaaattgggcttggagaatctattctgaaaacattgactctagacttgtagaaaagagccattttagtttcaactcaaatgtaaagcaaagtagtttggtgacattttgcttttatgtgaaatagtgcacagtatgagttaatctgagcaggtctgaattgaccaaatgcttatctacgaggttcctagagctctgctgacccttggccgaaactctaaaatgtacctattaaagataaatgcttctaccaaagtaaaactctgtgagttgtttcagggcagaatgtaccagccagtcagcgttgtttaacaaaataatcagatttttgcctagcactcggttttggtggagctgacgattttgagggctgaggctggttaggtagctggaatgtgcctatgtgaccagctcacttgcagacaccctgccggaagcagagcttaatcttcctaggactgaggtcttagcacatgtactggtggagtttccagaccaccagtatgaataaaagcttgttctgtgtgacccagcaagtggaaggacaaagaactgtgagcctcagatctttggacctttccaatgcgtctctttctcctgttattgctgcaatgtattttcttgcttatattaaagttgtttcatcagtaaaaaaaaaaaaaaaaaaaaaaaaaaaaaaaaa

SEQ ID NO: 3746 - protein, 217 aa, Homo sapien
MRREDEEEEGTMMKAKGDLEMKEEEEISETGELVGPFVSAMPTPMPHNKGTRFSEAWEYFHLAPARAGHHPNQYATCRLCGRQVSRGPGVNVGTTALWKHLKSMHREELEKSGHGQAGQRQDPRPHGPQLPTGIEGNWGRLLEQVGTMALWASQREKEVLRRERAVEWRERAVEKRERALEEVERAILEMKWKVRAEKEACQREKELPAAVHPFHFV

SEQ ID NO: 3747 - DNA, 1760 bp, Homo sapien
gcgtcgggggaggacaacaaagggccgcgggcggcgggcagtggtgtcccagtctcccggtgcttccctgaggctgaggcgcccggcctcccgcccgccgcgctccagatgaagtgtgagcactgcacgcgcaaggaatgtagtaagaaaacaaaaactgatgaccaagagaatgtgtcagccgatgcaccgagtccagcccaggaaaatggagagaagggagaattccacaagttggctgatgccaagatatttttgagcgactgcctggcatgtgacagctgtatgactgcagaggaaggagtccaactttcccagcaaaatgccaaggacttcttccgcgttctgaaccttaacaagaaatgtgatacctcaaagcacaaagtgctggtagtgtctgtgtgtcctcaatctttgccttattttgctgctaaattcaacctcagtgtaactgatgcatccagaagactctgtggtttcctcaaaagtcttggggtgcactatgtatttgatacgacgatagctgcggattttagtatcctggagagtcaaaaagaattcgtgcgtcgctatcgccagcacagtgaggaggaacgcaccctgcccatgctgacctctgcctgtcctggctgggtccgatacgccgagcgggtgctgggtcgccccatcactgcccacctctgcaccgccaagtccccccagcaggtcatgggctctttggtgaaggattatttcgccagacagcagaacctgtctccagagaagattttccacgtcattgtggccccttgttatgacaagaagctggaggctcttcaggaaagccttccccctgctttgcatggctcccggggcgctgactgcgtgttaacatcagaaattagccaggcgtggtggtgcacacctgtgatcacagctactcgggaggctgcggcaagagaatcacttgaacccgggaggcagaggttacagcgagacaagattgcaccactggactccagcctgggcggcggaggtgaaattgctcaaataatggagcaaggtgacctctcagtgagagatgctgccgtcgacactctgtttggagacttgaaggaggacaaagtgacgcgtcatgatggagccagctcagacgggcacctggcacacatcttcagacatgcggccaaggagctgttcaacgaggatgtggaggaggtcacttaccgagccctgagaaacaaagacttccaagaggtcacccttgagaagaacggagaggtggtgttacgctttgctgcagcctatggctttcgaaacatccagaacatgatcctgaagcttaagaagggcaagttcccattccactttgtggaggtcctcgcctgtgctggaggatgcttaaatggcagaggccaagcccagactccagacggacatgcggataaggccctgctgcggcagatggaaggcatttacgctgacatccctgtgcggcgtccggagtccagtgcacacgtgcaggagctgtaccaggagtggctggaggggatcaactcccccaaggcccgagaggtgctgcataccacgtaccagagccaggagcgtggcacacacagcctggacatcaagtggtgaagtcaggccagggccttccagctgctcttggggccagagccaagagcctctcagtagagggaggggctgccctgagtggagtattaaagacacttaagaaaaccgctcaaaaaaaaaaaaaaaaaaaaaaaaaaaaaaaaaaa

SEQ ID NO: 3748 - protein, 502 aa, Homo sapien
MKCEHCTRKECSKKTKTDDQENVSADAPSPAQENGEKGEFHKLADAKIFLSDCLACDSCMTAEEGVQLSQQNAKDFFRVLNLNKKCDTSKHKVLVVSVCPQSLPYFAAKFNLSVTDASRRLCGFLKSLGVHYVFDTTIAADFSILESQKEFVRRYRQHSEEERTLPMLTSACPGWVRYAERVLGRPITAHLCTAKSPQQVMGSLVKDYFARQQNLSPEKIFHVIVAPCYDKKLEALQESLPPALHGSRGADCVLTSEISQAWWCTPVITATREAAARESLEPGRQRLQRDKIAPLDSSLGGGGEIAQIMEQGDLSVRDAAVDTLFGDLKEDKVTRHDGASSDGHLAHIFRHAAKELFNEDVEEVTYRALRNKDFQEVTLEKNGEVVLRFAAAYGFRNIQNMILKLKKGKFPFHFVEVLACAGGCLNGRGQAQTPDGHADKALLRQMEGIYADIPVRRPESSAHVQELYQEWLEGINSPKAREVLHTTYQSQERGTHSLDIKW

SEQ ID NO: 3749 - DNA, 3502 bp, Homo sapien
gcgcgcagctggttcccgctctgcagcgcaacgcctgaggcagtgggcgcgctcagtcccgggaccaggcgttctctcctctcgcctctgggcctgggacccgcaaagcggcgatggagcggaggtcgcggaggaagtcgcggcgcaacgggcgctcgaccgcgggcaaggccgccgcgacccagcccgcgaagtctccgggcgcacagctctggctctttcccagcgccgcgggcctccaccgcgcgctgctccggagggtggaggtgacgcgccaactctgctgctcgccggggcgcctcgcggtcttggaacgcggcggggcgggcgtccaggttcaccagctgctcgccgggagcggcggcgcccggacgccgaaatgcattaaattaggaaaaaacatgaagatacattccgtggaccaaggagcagagcacatgctgattctctcatcagatggaaaaccatttgagtatgacaactatagcatgaaacatctaaggtttgaaagcattttacaagaaaaaaaaataattcagatcacatgtggagattaccattctcttgcactctcaaaaggcggtgagctttttgcctggggacagaacctgcatgggcagcttggagttggaaggaaatttccctcaaccaccacaccacagattgtggagcacctcgcaggagtacccttggctcagatttctgccggagaagcccacagcatggccttatccatgtctggcaacatttattcatggggaaaaaatgaatgtggacaactaggcctgggccacactgagagtaaagatgatccatcccttattgaaggactagacaatcagaaagttgaatttgtcgcttgtggtggctctcacagtgccctactcacacaggatgggctgctgtttactttcggtgctggaaaacatgggcaacttggtcataattcaacacagaatgagctaagaccctgtttggtggctgagcttgttgggtatagagtgactcagatagcatgtggaaggtggcacacacttgcctatgtttctgatttgggaaaggtcttttcctttggttctggaaaagatggacaactgggaaatggtggaacacgtgaccagctgatgccgcttccagtgaaagtatcatcaagtgaagaactcaaacttgaaagccatacctcagaaaaggagttaataatgattgctggagggaatcaaagcattttgctctggataaagaaagagaattcatatgttaatctgaagaggacaattcctactctgaatgaagggactgtaaagagatggattgctgatgtggagactaaacggtggcagagcacaaaaagggaaatccaagagatattttcatctcctgcttgtctaactggaagttttttaaggaaaagaagaactacagaaatgatgcctgtttatttggacttaaataaagcaagaaacatcttcagggagttaacccaaaaggactggattactaacatgataaccacctgcctcaaagataatctgctcaaaagacttccatttcattctccaccccaagaagctttagaaattttcttccttctcccagaatgtcctgtgatgcatatttccaacaactgggagagccttgtggttccatttgcaaaggttgtttgtaaaatgagtgaccagtcttcactggttctggaagagtattgggcaactctgcaagaatccactttcagcaaactggtccagatgtttaaaacagccgtcatatgccagttggattactgggatgaaagtgctgaggagaatggtaatgttcaagctctcctagaaatgttgaagaagctgcacagggtaaaccaggtgaaatgtcaactacctgaaagtattttccaagtagacgaactcttgcaccgtctcaatttttttgtagaagtatgcagaaggtacttgtggaaaatgactgtggacgcttcagaaaatgtacaatgctgcgtcatattcagtcactttccatttatctttaataatctgtcgaaaattaaactactacatacagacacacttttaaaaatagagagtaaaaaacataaagcttatcttaggtcggcagcaattgaggaagaaagagagtctgaattcgctttgaggcccacgtttgatctaacagtcagaaggaatcacttgattgaggatgttttgaatcagctaagtcaatttgagaatgaagacctgaggaaagagttatgggtttcatttagtggagaaattgggtatgacctcggaggagtcaagaaagagttcttctactgtctgtttgcagagatgatccagccggaatatgggatgttcatgtatcctgaaggggcttcctgcatgtggtttcctgtcaagcctaaatttgagaagaaaagatacttcttttttggggttctatgtggactttccctgttcaattgcaatgttgccaacctccctttcccactggcactgtttaagaaacttttggaccaaatgccatcattggaagacttgaaagaactcagtcctgatttgggaaagaatttgcaaacacttctggatgatgaaggtgataactttgaggaagtattttacatccattttaatgtgcactgggacagaaacgacacaaacttaattcctaatggaagtagcataactgtcaaccagactaacaagagagactatgtttctaagtatatcaattacattttcaacgactctgtaaaggcggtttatgaagaatttcggagaggattttataaaatgtgcgacgaagacattatcaaattattccaccccgaagaactgaaggatgtgattgttggaaatacagattatgattggaaaacatttgaaaagaatgcacgttatgaaccaggatataacagttcacatcccaccatagtgatgttttggaaggctttccacaaattgactctggaagaaaagaaaaaattccttgtatttcttacaggaactgacagactacaaatgaaagatttaaataatatgaaaataacattttgctgtcctgaaagttggaatgaaagagaccctataagagcactgacatgtttcagtgtcctcttcctccctaaatattctacaatggaaacagttgaagaagcgcttcaagaagccatcaacaacaacagaggatttggctgaccagcttgcttgtccaacagccttattttgttgttgttatcgttgttgttgttgttgttgttgttgtttctctactttgttttgttttaggcttttagcagcctgaagccatggtttttcatttctgtctctagtgataagcaggaaagagggatgaagaagagggtttactggccggttagaacccgtgactgtattctctcccttggatacccctatgcctacatcatattccttacctcttttgggaaatatttttcaaaaataaaataaccgaaaaactaaaaaaagaaaaaaaaaaaaaaaaaaaaaaa

SEQ ID NO: 3750 - protein, 1024 aa, Homo sapien
MERRSRRKSRRNGRSTAGKAAATQPAKSPGAQLWLFPSAAGLHRALLRRVEVTRQLCCSPGRLAVLERGGAGVQVHQLLAGSGGARTPKCIKLGKNMKIHSVDQGAEHMLILSSDGKPFEYDNYSMKHLRFESILQEKKIIQITCGDYHSLALSKGGELFAWGQNLHGQLGVGRKFPSTTTPQIVEHLAGVPLAQISAGEAHSMALSMSGNIYSWGKNECGQLGLGHTESKDDPSLIEGLDNQKVEFVACGGSHSALLTQDGLLFTFGAGKHGQLGHNSTQNELRPCLVAELVGYRVTQIACGRWHTLAYVSDLGKVFSFGSGKDGQLGNGGTRDQLMPLPVKVSSSEELKLESHTSEKELIMIAGGNQSILLWIKKENSYVNLKRTIPTLNEGTVKRWIADVETKRWQSTKREIQEIFSSPACLTGSFLRKRRTTEMMPVYLDLNKARNIFRELTQKDWITNMITTCLKDNLLKRLPFHSPPQEALEIFFLLPECPVMHISNNWESLVVPFAKVVCKMSDQSSLVLEEYWATLQESTFSKLVQMFKTAVICQLDYWDESAEENGNVQALLEMLKKLHRVNQVKCQLPESIFQVDELLHRLNFFVEVCRRYLWKMTVDASENVQCCVIFSHFPFIFNNLSKIKLLHTDTLLKIESKKHKAYLRSAAIEEERESEFALRPTFDLTVRRNHLIEDVLNQLSQFENEDLRKELWVSFSGEIGYDLGGVKKEFFYCLFAEMIQPEYGMFMYPEGASCMWFPVKPKFEKKRYFFFGVLCGLSLFNCNVANLPFPLALFKKLLDQMPSLEDLKELSPDLGKNLQTLLDDEGDNFEEVFYIHFNVHWDRNDTNLIPNGSSITVNQTNKRDYVSKYINYIFNDSVKAVYEEFRRGFYKMCDEDIIKLFHPEELKDVIVGNTDYDWKTFEKNARYEPGYNSSHPTIVMFWKAFHKLTLEEKKKFLVFLTGTDRLQMKDLNNMKITFCCPESWNERDPIRALTCFSVLFLPKYSTMETVEEALQEAINNNRGFG

SEQ ID NO: 3751 - DNA, 828 bp, Homo sapien
aaaaggcccactttgggggataatgctgagggacactatgaaatcttggaatgatagccagtcagatctgtgtagcactgaccaagaagaggaagaagagatgatttttggtgaaaatgaagatgatttggatgagatgatggatttaagtgatctgcctacctcactttttgcttgcagcgtccatgaagcagtgtttgaggcacgagagcagaaggaaagatttgaagcactcttcaccatctatgatgaccaggttacttttcagctgtttaaaagctttagaagagtcagaataaatttcagcaaacctgaagcggcagcaagagcgcgaatagaactccacgaaacagacttcaatgggcagaagctaaagctatattttgcacaggtgcagatgtccggcgaagtgcgggacaagtcctatctcctgccgccccagcctgtcaagcagttcctcatctcccctccagcctctcccccagtggggtggaagcagagcgaagatgcgatgcctgttataaattatgatttactctgtgctgtttccaaattgggaccaggagagaaatatgaacttcacgcgggaacagagtcgacacccagcgtggtggttcatgtctgtgaaagtgaaactgaagaggaagaagagacaaaaaaccccaaacagaaaattgcccagacaaggcgccccgaccctccgaccgcagcgttgaatgagccccagacctttgattgcgcgctgtgaggcccttggttgtggtgcgaggcggctgccctggtgggctctggccatggcgctctgtgcctgcggccgatgcgttgctg

SEQ ID NO: 3752 - protein, 241 aa, Homo sapien
MLRDTMKSWNDSQSDLCSTDQEEEEEMIFGENEDDLDEMMDLSDLPTSLFACSVHEAVFEAREQKERFEALFTIYDDQVTFQLFKSFRRVRINFSKPEAAARARIELHETDFNGQKLKLYFAQVQMSGEVRDKSYLLPPQPVKQFLISPPASPPVGWKQSEDAMPVINYDLLCAVSKLGPGEKYELHAGTESTPSVVVHVCESETEEEEETKNPKQKIAQTRRPDPPTAALNEPQTFDCAL

SEQ ID NO: 3753 - DNA, 3246 bp, Homo sapien; identical to SEQ ID NO: 2203
  Unsure 2530: Unknown base

SEQ ID NO: 3754 - protein, 460 aa, Homo sapien; identical to SEQ ID NO: 2204

SEQ ID NO: 3755 - DNA, 2368 bp, Homo sapien
agccgccacactttcccaagcccgcaggcgccccccccaacaccagcgctgcacccccgacccattccccgcggccccctccaggagaaaaaatgaaaccagactggccgaggaggggggcggcagggaccagggtgcggagcagaggtgagggagacgggacttactttgcgaggcgcggtgcagggcgccgccgacgagaaataaaggccccgatacgggctgcctggagccccccgagcgcagcaatgtcagggctccagtccgggcggcgttggcggccgcaggggacggggacgggcgcgcgtgcggcgggcgctctcgctgcgctccggctcgggccccggctccgcgcggctccgctcctggctcccctctggctcctggcaccaactccggacagtcacatgacgccggcgccgctcgctctgcgagcctcccggggctggcgggagaataacttgtctgactaccagtattcttggatgcagaagtgctgaagatgagcacacacacgtacggagaatttctggagaattcagctgctcagaacaagaactgagatccagagagatgatgactttgcccatagaccaaacaaagaaatacatgtttcagtcctgtgtcctcctgctatgtgtgtccggaattggtgggttcttggtctcactgactccaagaatgaagctgcggaccctcgcggaccgtgtgtgaatgcctgctctgtgagccctcagaatctactggctgaatgagtgcgtggaggaaatgtgctcagagctgctgtgtgtcatcctgtgtttgaagtgctcctgcagctatcattcatccagttaagaatttgaagaagtgtgtgcacaaagacggagtctcactctgttgcccaggctggagtgcagtggcacaatctcggctcactgcaacctctacctcctggattcaagcggttttcctgcctcagcctccagagtaacagggattacaggcatactccaccttgccctgctgattttgtatttttagtagagacaagagtttcaccatgttggccaggctggtcttgaactcctgacctcaagtgatccactgcctcagcctcccaaagtgctgggattataggcgtgagccactgcgcctggccaaatgctctactttttaatcaatgttttccaaaatagggatttttgctatgtgctttagaaattagagaacaaacggtgataatatatgctaaacttaaaattagtatgcctccttttatagacaacaagaactttgtcacttcccagtttgtcttgtcattcaggaggctcagagctacgatctgtgcccactcgtgctgcctcttcttaactttgatttcctgaagcagcgatttcatctccgtttcccctcatcacctgttcttttaactgtttaaaaacagcattacatgttgttgcaagtggcctcaaattctttttggtagaagggaaattgtaatccatgagaagaaaaaaattttcctaactattctcaggtgtgtttaagggctgcattccatgatgctatcagtgccttctttcagctcacaggatatcggccatgttaatgagtctgatgttgctagtatcacaggcaccggaaaatatgcacattatgctggagcattagaatgcaacagaaagagccctgggcttggagtatgcagaactggttcttgttacaactcctcttactagtgggctctggaagaaaacacattgaattcatgatcatggttaacctttggagagagagaggagaccaggatgaaggagccagtcgaagatcctgttcaagtgtacactgagccagcaggttcaccagaaagctattgagcgtttgctggaacacattatgcagggtgaatttcttctggaatgttgccaaggattttttatgcttctgtggcaggcatttcttgaacattgtcatttagccaagcaaagaagattttcttaaaggatagaaagtgtttaaaaatttttgtttgtttgaagataggttaaatggctatatgatctcaggataagacagagaaaatcacttatttctctaagtgatctgattaggttagtgatgttttgcctttaaacagattcatcattattcctaaagtattgctgtattaatactgtcttctagaaagtatccaccagtgcctacttttcttcgatatcattagctgtttttcgaaactgaatttgctcttcagagatttctcatatgtttgcgtataaggaactactggtaatagccaagaaaatttggaggtgcagagaacatgctgaaacagaatttttcactttcaattctagaactatgccataaaaaaaaaggaaaatgt

SEQ ID NO: 3756 - protein, 135 aa, Homo sapien
MKPDWPRRGAAGTRVRSRGEGDGTYFARRGAGRRRREIKAPIRAAWSPPSAAMSGLQSGRRWRPQGTGTGARAAGALAALRLGPRLRAAPLLAPLWLLAPTPDSHMTPAPLALRASRGWRENNLSDYQYSWMQKC

SEQ ID NO: 3757 - DNA, 2558 bp, Homo sapien
  Unsure 360: Unknown base
gaattccggctcccgcggctgcaggcgcgcgcctagagtgcctggcgggctccggcttccgcgtccgccccggccccggtccagacttagtcttcagctccgcgcccgctccgccgcggcccaccgcgcccgccggcagccgagcccccagcgacgcccgcacagctccgggtgcccagacagggggccatgccgtgccggagggaggaggaagaggaagccggcgaggaggcggagggggaggaagaggaggaggacagcttcctcctactgcagcagtcagtggcgctgggcagctcgggcgaggtggaccggctggtggcccagatcggcgagacgctgcagctggacgcggcgcangacagcccggcctcgccgtgcgggcccccgggggcgccgctgcgggccccggggcccctggctgcggcggtgccggcggacaaggccaggtccccggcggtgccgctgctgctgccgcccgcgttggcggagactgtgggcccggcgccccctggggtcctgcgctgcgccctgggggaccgcggccgcgtgcggggccgcgctgcgccctactgcgtggccgagctcgccacaggccccagcgcgctgtccccactgccccctcaggccgaccttgatgggcctccgggagctggcaagcagggcatcccgcagccgctgtcgggtccgtgccggcgaggatggctccggggcgccgccgcctcccgccgcctgcagcagcgacgcgggtcccaaccagaaacccgcacaggcgacgacgacccgcaccggcttctgcagcagctagtgctctctggaaacctcatcaaggaggccgtgcgaaggcttcattcgcgacggctgcagttacgtgcaaagcttccccaacgcccgctcctgggacctctgtcggccccggtgcatgaacccccttcgcctcgcagccctcgcgcggcctgcagtgaccctggcgcctccgggagggcgcagctcagaactggcgacggcgttcttgtgcctggcagctaacacgcccggggtggccacagcgccagcctcagactggagggcaaggggttcccttgagggctgcagttctactcaggctggtggagaactctggcttttggaagcgagagtaaaaagctaatgacgaggaaccgaaaaatcgcgagtgtttcgcgggtaactggggttgagggccaaaatatttggaatgaaggacttggccctatttaaggcagattttacagagcgcacctcaaacgtacaagtcagtaggactccttatttggcgtgacccgacctggccgcggagcctgcatttcctcgcagcctctcagtgccctccagccccgcgaccatgtggccacaatccacgcttctccggatcgcggtgcgccggaaccacggaggatgatgccagttacttgctttaccttttcagggctggctcctgatccactttgggggaggagaacatgagtagataatttcagggtgcagcccaatctgccagacttaaaaaaaccatcttgtgtctttggaggtgctgcttaatatcaaacatgcggtgccatgaagggaccctttgggggttgaataggagttaacccctgcgctctctttgcaactgtctctcttctcagagtggtgggggaaggctgtacgacacgggtggggaaaggaggtgggggcggggagtattgaatggtggtggaagggtagagaggcgcggagtgaaccccacgccctgtctaaagtgtattttcagagccggcccgcctctcctcggttcaaggtcactgtttcctgggcacgcactgggttgcgggacagagtagccagtttctgccggtgctcggagaagagcgcagtgttttgcaagtgctggagtctcctgaggacacgcgcgtcgccgccaccgcgggtgtgggaaagcgcggacgtgctgggcgtctgtgcttcggtaggcgaccaccgcccctggccgcgctccgggctttcacggaaactcccgagaccgggccctgggttcctcctctcctactcggctctgcagtcctactcaagcgggtggctctgggatcctgggggcctgggttgggggctagggagacgccatgtgatggacactccagggacacacagcctagcacagcagcttataatgggctctccggggccatttgcaataacagctgcaattccctggatagacgagttgatttcctccctctgcccctcccccagccatgccagctggcctttgtaagtgcaggaaaccgagtagaaaatgtgaccctccaaatggagaagctgccagctttgccattgtgaaccatggtgaagtgcttggaacatactgttcactcactctaaaggcgctgagactgtgctgttgttctcgtttttatagtcaatggcttgttcatcatccagatgtggctactgacatatctacacttcgcaccggagtgtctggaattgtggctatcctgattataggattttaacttaactgaaatgcctgctttgaataaatgtgttgggttttt

SEQ ID NO: 3758 - protein, 279 aa, Homo sapien
  unsure 57: unknown amino acid
MPCRREEEEEAGEEAEGEEEEEDSFLLLQQSVALGSSGEVDRLVAQIGETLQLDAAXDSPASPCGPPGAPLRAPGPLAAAVPADKARSPAVPLLLPPALAETVGPAPPGVLRCALGDRGRVRGRAAPYCVAELATGPSALSPLPPQADLDGPPGAGKQGIPQPLSGPCRRGWLRGAAASRRLQQRRGSQPETRTGDDDPHRLLQQLVLSGNLIKEAVRRLHSRRLQLRAKLPQRPLLGPLSAPVHEPPSPRSPRAACSDPGASGRAQLRTGDGVLVPGS

SEQ ID NO: 3759 - DNA, 2750 bp, Homo sapien
ggctgccggggaggccagagcgtggagcgctgcgcggcgcggcggccgggccctcgagacggggacggacacaccagcccctcagataccacttggccactcccgctgaggccactcccactgcgtggctgaagcctcgaggtcaccaggcggaggcgcggagatgcccctgcatcagctgggggacaagccgctcaccttccccagccccaactcagccatggaaaacgggcttgaccacaccccacccagcaggagggcatccccgggcacacccctgagccccggctccctccgctccgctgcccatagccccctggacaccagcaagcagcccctctgccagctctgggccgagaagcatggcgcccgggggacccatgaggtgcggtacatctcggccgggcagagcgtggcgtgcggctggtgggccttcgcaccgccgtgcctgcaggtcctcaacacgcccaagggcatcctgttcttcctgtgtgcggccgcattcctgcaggggatgactgtgaatggcttcatcaacacagtcatcacctccctggagcgccgctatgacctgcacagctaccagagcgggctcatcgccagctcctacgacattgccgcctgcctctgcctcaccttcgtcagctacttcgggggctcagggcacaagccgcgctggctgggctggggcgtgctgcttatgggcacgggttcgctggtgttcgcgctgccccacttcacggctggccgctatgaggtggagttggacgcgggtgtcaggacgtgccctgccaaccccggcgcggtgtgtgcggacagcacctcgggcctgtcccgctaccagctggtcttcatgctgggccagttcctgcatggcgtgggtgccacacccctctacacgctgggcgtcacctacctggatgagaacgtcaagtccagctgctcgcccgtctacattgccatcttctacacagcggccatcctgggcccagctgccggctacctgattggaggtgccctgctgaatatctacacggaaatgggccgacggacggagctgaccaccgagagcccactgtgggtcggcgcctggtgggtcggcttcctgggctctggggccgctgctttcttcaccgccgttcccatccttggttaccctcggcagctgccaggctcccagcgctacgcggtcatgagagcggcggaaatgcaccagttgaaggacagcagccgtggggaggcgagcaacccggactttgggaaaaccatcagagacctgcctctctccatctggctcctgctgaagaaccccacgttcatcctgctctgcctggccggggccaccgaggccactctcatcaccggcatgtccacgttcagccccaagttcttggagtcccagttcagcctgagtgcctcagaagctgccaccttgtttgggtacctggtggtgccagcgggtggtggcggcaccttcctgggcggcttctttgtgaacaagctcaggctccggggctccgcggtcatcaagttctgcctgttctgcaccgttgtcagcctgctgggcatcctcgtcttctcactgcactgccccagtgtgcccatggcgggcgtcacagccagctacggcgggagcctcctgcccgaaggccacctgaacctaacggctccctgcaacgctgcctgcagctgccagccagaacactacagccctgtgtgcggctcggacggcctcatgtacttctcactgtgccacgcagggtgccctgcagccacggagacgaatgtggacggccagaaggtgtaccgagactgtagctgtatccctcagaatctttcctctggttttggccatgccactgcagggaaatgcacttcaacttgtcagagaaagcccctccttctggttttcatattcgttgtaattttctttacattcctcagcagcattcctgcactaacggcaactctacgatgtgtccgtgaccctcagagatcctttgccctgggaatccagtggattgtagttagaatactagggggcatcccggggcccatcgccttcggctgggtgatcgacaaggcctgtctgctgtggcaggaccagtgtggccagcagggctcctgcttggtgtaccagaattcggccatgagccgctacatactcatcatggggctcctgtacaaggtgctgggcgtcctcttctttgccatagcctgcttcttatacaagcccctgtcggagtcttcagatggcctggaaacttgtctgcccagccagtcctcagcccctgacagtgccacagatagccagctccagagcagcgtctgaccaccgcccgcgcccacccggccacggcgggcactcagcatttcctgatgacagaacagtgccgttgggtgatgcaatcacacgggaacttctatttgacctgcaaccttctacttaacctgtggtttaaagtcggctgtgacctcctgtccccagagctgtacggccctgcagtgggtgggaggaacttgcataaatatatatttatggacacacagtttgcatcagaacgtgtttatagaatgtgttttatacccgatcgtgtgtggtgtgcgtgaggacaaactccgcaggggctgtgaatcccactgggagggcggcgggcctgcagcccgaggaaggcttgtgtgtcctcagttaaaactgtgcatatcgaaatatattttgttatttaagcctgaaaaaaaaaaaaaaaaaa

SEQ ID NO: 3760 - protein, 722 aa, Homo sapien
MPLHQLGDKPLTFPSPNSAMENGLDHTPPSRRASPGTPLSPGSLRSAAHSPLDTSKQPLCQLWAEKHGARGTHEVRYISAGQSVACGWWAFAPPCLQVLNTPKGILFFLCAAAFLQGMTVNGFINTVITSLERRYDLHSYQSGLIASSYDIAACLCLTFVSYFGGSGHKPRWLGWGVLLMGTGSLVFALPHFTAGRYEVELDAGVRTCPANPGAVCADSTSGLSRYQLVFMLGQFLHGVGATPLYTLGVTYLDENVKSSCSPVYIAIFYTAAILGPAAGYLIGGALLNIYTEMGRRTELTTESPLWVGAWWVGFLGSGAAAFFTAVPILGYPRQLPGSQRYAVMRAAEMHQLKDSSRGEASNPDFGKTIRDLPLSIWLLLKNPTFILLCLAGATEATLITGMSTFSPKFLESQFSLSASEAATLFGYLVVPAGGGGTFLGGFFVNKLRLRGSAVIKFCLFCTVVSLLGILVFSLHCPSVPMAGVTASYGGSLLPEGHLNLTAPCNAACSCQPEHYSPVCGSDGLMYFSLCHAGCPAATETNVDGQKVYRDCSCIPQNLSSGFGHATAGKCTSTCQRKPLLLVFIFVVIFFTFLSSIPALTATLRCVRDPQRSFALGIQWIVVRILGGIPGPIAFGWVIDKACLLWQDQCGQQGSCLVYQNSAMSRYILIMGLLYKVLGVLFFAIACFLYKPLSESSDGLETCLPSQSSAPDSATDSQLQSSV

SEQ ID NO: 3761 - DNA, 3903 bp, Homo sapien
ctttccgacactctttgggaagagaatctctaatgacggcaacagtggagaacctaacgttccagaaggacactttgggaaatgctgttgacaaaaacaggcgccacggctcgacagagccactcgtcctcgcctggtcatcccagttccggaggctgacctggggatgcgccctggacgccctgcaccgcagtccttgcgtcgctgctagtcagcacggcgttacccacctcatccgcagctccaggacgccgcactccacgcgctgccgcaaggaggacgcgcagcctggtcaccatggaaacggtgccgcctccgtcacggctcaagcgagaggtcaaaggtcagtcctgcaagttccgcttccggttccgagatcctgtttgttttctgaaagctttgtggtttcggtgagctctcagagccgatttctagcgtccgtgccggggacaggtgtccagaggtcgactgctgcagacatggcggcctccaccgcggccgggaagcagcggattcccaaagtggccaaggtgaaaaacaaagccccggctgaggtacagataactgctgaacaactcctaagagaggctaaagaaagagaacttgagcttcttccacctccacctcaacagagaatcacagatgaagaagaattaaatgattataaactaaggaaaaggaagacttttgaagataatataagaaaaaacaggactgtgattagtaactggataaaatacgcacaatgggaagaaagcctaaaggagattcaaagggctcgatccatatacgagcgtgctttagatgtagactaccgaaatattacactctggctgaaatacgcagaaatggaaatgaagaatcgccaagtcaaccatgctcgaaatatctgggaccgggccataacaacgctgcctcgagttaatcagttctggtacaagtacacgtacatggaggaaatgttgggaaacgttgccggtgcccggcaggtgtttgagcgctggatggagtggcagcctgaggagcaagcctggcactcctacatcaactttgagctgagatacaaagaggtggatcgggcccgcaccatttatgagcgatttgtcctcgtgcaccctgatgttaagaactggatcaagtatgcccgctttgaagaaaaacatgcttattttgcccatgcacggaaagtgtatgagagagctgtggaattctttggagatgaacatatggatgagcacctttatgttgcctttgccaagtttgaagaaaatcagaaagagtttgaaagggtacgagtgatttacaagtatgccctggacagaatttcaaaacaagatgcccaagaactctttaaaaattataccatctttgagaagaagtttggtgataggcggggtattgaagatatcattgtgagcaaacggagattccagtacgaagaagaagtgaaggcgaatccacacaattatgatgcatggtttgattacttgcgcttggtagaaagtgacgcagaagctgaagccgtgagagaagtctatgaaagggccattgccaatgtcccacccattcaggagaagaggcactggaagcgctacatttatctttggatcaactatgcactctatgaagaattggaggcaaaggatcctgagaggacaagacaggtgtatcaagcctctttggaactaattcctcacaaaaagttcacatttgccaaaatgtggatactgtatgcacagtttgaaatacgacagaagaatctgtcattagccagaagagcattgggaacttccataggcaaatgtccaaagaacaaattatttaaagtttacatagaattggagctacagcttcgagaatttgacagatgccggaagctttatgaaaagttcctggaatttggacctgaaaattgtacctcatggattaaattcgctgaattagagacaatccttggtgatattgacagagcacgggcaatctatgaattagccatcagtcagccacgtttagacatgccagaggtgctttggaaatcatatattgattttgaaattgagcaggaagaaacagaaagaacacgaaacctttaccggcggttgcttcaacggacgcagcatgtcaaggtatggatcagctttgctcagtttgagttgtcttcaggaaaagaaggaagtttgactaaatgcagacaaatttatgaagaagctaacaaaaccatgcgaaactgtgaagaaaaggaagagagacttatgctgctggaatcttggcgaagttttgaagaagaatttggaacagcttcagataaggagagagtagacaaactcatgccagagaaagtcaagaagagaagaaaggtccagactgatgatgggtctgatgcaggctgggaagaatactttgattacatctttccagaagatgctgccaaccaacctaacctcaaactcctggccatggccaaactgtggaagaaacagcagcaggaaaaggaggatgctgagcaccatccagatgaggacgtcgatgagagtgaatcctgatctttttttcatagacaaatgttttgttatttttataaattaattgtttggaactcttgtgactcctggaagttcttatatatttcaccagtaagaaattgattggtatctttgatggctactttttaagttattttttaaatgctcttgggttagctaggggtagggattgcaagtaaaggacttttttaactgctggatttgtttttccaactgagtccaaacttttctaatgtctgtccacatcatgcattaggaaatgtaattaaggtaacattctacagttacttttcatgtcatacccataaagatagtttatgcattcatctgaaatgtgtaactttttcatgtcttcagagtcacagacttgagttcatttcccagctctgccactcatgattatataacttaattttcattttcctcattcacaaaatgggccaatagtttgacagctcattttgaagattacattataaaaggaatatacctggtgggtgcatagtaagtgctcagtaaattgtttgttctaagccacttttaaaaatggtttcattccttgtagaattgaatgcgagtggattaataatttaccttactttcttactagtgtccagttatattgttttttagaacaacacttggaaaataatttgcagtgattatatttctgaacaaggttcagaaaacattgtttactaagaatttaatctaataatttcagttaggcgctcatcagttctccagagtggttgagtttgtaataccttgtttaaagaataatggcttgttcacgtgtgtgctatgaaaaatgatgtcccatgttcacataaatttgggaaattctggactaagacttaagtctcgttaatcaaatctctttatagttaggcttctgtatattatgtatctccagtagcaatgttgccatattatttatttcccaaacttagtggacaatggagtcatttctacctagagtaccagtaaacatctcccagtgtgctatagtagaaaatgtctactcctcactgctgacatgttaaacttactcttggtttagagcatgtgtagaaacacctaaggtagctctatgctaaataatgaagagtagcacaagaatgaatgtatttgctgatacgttgctcacattctcaagcaaaaattcaactgcattaaccgatctgagagttttcctttaacctggactgtgtttctcaagcacattttttctttgttcactgcccaaggactagaactgtatttttaaggttgttttcccctaaaaggacctttagtaagcaaatttattattaaatgtgcacatcttattcacccaagggaataaaagctacttcgt

SEQ ID NO: 3762 - protein, 836 aa, Homo sapien
MTATVENLTFQKDTLGNAVDKNRRHGSTEPLVLAWSSQFRRLTWGCALDALHRSPCVAASQHGVTHLIRSSRTPHSTRCRKEDAQPGHHGNGAASVTAQARGQRSVLQVPLPVPRSCLFSESFVVSVSSQSRFLASVPGTGVQRSTAADMAASTAAGKQRIPKVAKVKNKAPAEVQITAEQLLREAKERELELLPPPPQQRITDEEELNDYKLRKRKTFEDNIRKNRTVISNWIKYAQWEESLKEIQRARSIYERALDVDYRNITLWLKYAEMEMKNRQVNHARNIWDRAITTLPRVNQFWYKYTYMEEMLGNVAGARQVFERWMEWQPEEQAWHSYINFELRYKEVDRARTIYERFVLVHPDVKNWIKYARFEEKHAYFAHARKVYERAVEFFGDEHMDEHLYVAFAKFEENQKEFERVRVIYKYALDRISKQDAQELFKNYTIFEKKFGDRRGIEDIIVSKRRFQYEEEVKANPHNYDAWFDYLRLVESDAEAEAVREVYERAIANVPPIQEKRHWKRYIYLWINYALYEELEAKDPERTRQVYQASLELIPHKKFTFAKMWILYAQFEIRQKNLSLARRALGTSIGKCPKNKLFKVYIELELQLREFDRCRKLYEKFLEFGPENCTSWIKFAELETILGDIDRARAIYELAISQPRLDMPEVLWKSYIDFEIEQEETERTRNLYRRLLQRTQHVKVWISFAQFELSSGKEGSLTKCRQIYEEANKTMRNCEEKEERLMLLESWRSFEEEFGTASDKERVDKLMPEKVKKRRKVQTDDGSDAGWEEYFDYIFPEDAANQPNLKLLAMAKLWKKQQQEKEDAEHHPDEDVDESES

SEQ ID NO: 3763 - DNA, 2414 bp, Homo sapien
gaaatctgtacgaactattcaggctgcttttagaggcatgaaagttagacaaaaattgaaaaatgtatcagaggaaaagatggcagccattgttaaccaatctgcactctgctgttacagaagcaaaactcagtatgaagctgttcaaagtgaaggtgttatgattcaagagtggtataaagcttctggccttgcttgttcacaggaagcagagtatcattctcaaagtagggctgcagtaacaattcaaaaagctttttgtagaatggtcacaagaaaactggaaacacagaaatgtgctgccctacggattcagttcttccttcagatggctgtgtatcggagaagatttgttcagcagaaaagagctgctatcactttacagcattattttaggacgtggcaaaccagaaaacagtttttactatatagaaaagcagcagtggttttacaaaatcactacagagcatttctgtctgcaaaacatcaaagacaagtctatttacagatcagaagcagtgttatcattattcaagctagaagtaaaggatttatacagaaacggaagtttcaggaaattaaaaatagcaccataaaaattcaggctatgtggaggagatatagagccaagaaatatttatgtaaagtgaaagctgcctgcaagattcaagcctggtatagatgttggagagcacacaaagaatatctagctgtattaaaagctgttaaaattattcaaggttgcttctataccaaactagagagaacacggtttttgaatgtgagagcatcagcaattatcattcagagaaaatggagagctatacttcctgcaaagatagctcatgaacacttcttaatgataaaaagacatcgagctgcttgtttgatccaagcacattatagaggatataaaggaaggcaggtctctcttcggcagaaatctgctgctttgatcatacaaaaatatatacgagccagggaggctggaaagcatgaaaggataaaatatattgaatttaaaaaatctacagttatcctacaagcactggtgcgtggttggctagtacgaaaaagatttttagaacagagagccaaaattcgacttcttcacttcactgcagctgcatattatcacctgaatgctgttagaattcaaagagcctataaactttacctggctgtgaagaatgctaacaagcaggttaattcagtcatctgtattcagagatggtttcgagcaagattacaagaaaagagatttattcagaaatatcatagcatcaaaaagattgagcatgaaggtcaagaatgtctgagccagcgaaatagggctgcatcagtaatacagaaagcagtgcgccattttctcctccgtaaaaagcaggaaaaattcactagtggaatcattaaaattcaggcattatggagaggctattcttggaggaagaaaaatgattgtacaaaaattaaagctatacgactaagtcttcaagttgttaatagggagattcgagaagaaaacaaactctacaaaagaactgcacttgcacttcattaccttttgacatataagcacctttctgccattcttgaggccttaaaacacctagaggtagttactagattgtctccactttgttgtgagaacatggcccagagtggagcaatttctaaaatatttgttttgatccgaagttgtaatcgcagtattccttgtatggaagtcatcagatatgctgtgcaagtcttgcttaatgtatctaagtatgagaaaactacttcagcagtttatgatgtagaaaattgtatagatatactattggagcttttgcagatataccgagaaaagcctggtaataaagttgcagacaaaggcggaagcatttttacaaaaacttgttgtttgttggctattttactgaagacaacaaatagagcctctgatgtacgaagtaggtccaaagttgttgaccgtatttacagtctctacaaacttacagctcataaacataaaatgaatactgaaagaatactttacaagcaaaagaagaattcttctataagcattccttttatcccagaaacacctgtaaggaccagaatagtttcaagacttaagccagattgggttttgagaagagataacatggaagaaatcacaaatcccctgcaagctattcaaatggtgatggatacgcttggcattccttattagtaaatgtaaacattttcagtatgtatagtgtaaagaaatattaaagccaatcatgagtacgtaaagtgatttttgctctctgtgtacaacttttaaaatctgactttgttttaaaaaaacataaactgttcattacattcttcatttttatcatttatagttttatgcatgtaataaactaatatgtcataagatg

SEQ ID NO: 3764 - protein, 726 aa, Homo sapien
MKVRQKLKNVSEEKMAAIVNQSALCCYRSKTQYEAVQSEGVMIQEWYKASGLACSQEAEYHSQSRAAVTIQKAFCRMVTRKLETQKCAALRIQFFLQMAVYRRRFVQQKRAAITLQHYFRTWQTRKQFLLYRKAAVVLQNHYRAFLSAKHQRQVYLQIRSSVIIIQARSKGFIQKRKFQEIKNSTIKIQAMWRRYRAKKYLCKVKAACKIQAWYRCWRAHKEYLAVLKAVKIIQGCFYTKLERTRFLNVRASAIIIQRKWRAILPAKIAHEHFLMIKRHRAACLIQAHYRGYKGRQVSLRQKSAALIIQKYIRAREAGKHERIKYIEFKKSTVILQALVRGWLVRKRFLEQRAKIRLLHFTAAAYYHLNAVRIQRAYKLYLAVKNANKQVNSVICIQRWFRARLQEKRFIQKYHSIKKIEHEGQECLSQRNRAASVIQKAVRHFLLRKKQEKFTSGIIKIQALWRGYSWRKKNDCTKIKAIRLSLQVVNREIREENKLYKRTALALHYLLTYKHLSAILEALKHLEVVTRLSPLCCENMAQSGAISKIFVLIRSCNRSIPCMEVIRYAVQVLLNVSKYEKTTSAVYDVENCIDILLELLQIYREKPGNKVADKGGSIFTKTCCLLAILLKTTNRASDVRSRSKVVDRIYSLYKLTAHKHKMNTERILYKQKKNSSISIPFIPETPVRTRIVSRLKPDWVLRRDNMEEITNPLQAIQMVMDTLGIPY

SEQ ID NO: 3765 - DNA, 1664 bp, Homo sapien
gagttcggggccagcagccgtctacccggtgtcgcgttctgtgttgtggcggccctggatccggcgtcagggcgaccgggcggacgaggtggagccagagtctgtcaggcgggttggtgaagggcgcggggccgggcacggcgttgggagtgcgcggcagggaccggccaggcgggctgcaggcacctcagagcccgggacaccccctcaacgtccgcaggcgcgatgaaggcactgatcttagtggggggctatgggacgcggctacggccgctgacgctgagcaccccgaagccactggtggacttctgcaataagcccatcttgctgcaccaagtggaggcgctagccgcggcaggcgtggaccacgtgatcctggccgtgagctacatgtcgcaggtgctggagaaggaaatgaaggcacaggagcagaggctgggaatccgaatctccatgtcccatgaagaggagcctttggggacagctgggcccctggcgctggcccgtgacctactctctgagactgcagaccctttcttcgtcctcaacagtgacgtgatctgcgatttccccttccaagccatggtgcagttccaccggcaccatggccaggagggctccatcctggtgaccaaggtggaggaaccctccaagtacggtgtggtggtgtgtgaggctgacacaggccgcattcaccggttcgtggagaagccacaggtgtttgtgtccaataagatcaacgcaggcatgtacatcctgagccctgcagtgctgcggcgcatccagctgcagcctacgtccattgagaaggaggtcttccccattatggccaaggaggggcagctatatgccatggagttacagggcttctggatggacattgggcagcccaaggacttcctcactggcatgtgcctcttcctgcagtcactgaggcagaagcagcctgagcggctgtgctcaggccctggcattgtgggcaacgtgctggtggacccaagtgcccgcatcggccagaactgcagcattggccccaatgtgagcctgggacctggcgtggtggtcgaagatggtgtgtgtatccggcggtgcacggtgctgcgggatgcccggatccgttcccattcctggcttgagtcctgcattgtgggctggcgctgccgcgtgggtcagtgggtaagcctgtgggctgggctgggtggggagaggggcggggagtgtgcctgcctccctgacaaggcctatcctctcctggaggtacgcatggagaacgtgacagtgctgggtgaggacgtcatagttaatgatgagctctacctcaacggagccagcgtgctgccccacaagtctattggcgagtcagtgccagagcctcgtatcatcatgtgaggggatgcagtggggctggccgagccccggttttcccatcagcaaggggagtgctggcctgacacatcagaagaccctggacttgtcattatttgtctggggggcactgggtgaagctgaagctgttggacacctgccttctcatgtggacatcatctggcaggatccctgctgggcacaccccacaaaccccactccctcaagaagggccagggccagggctgtatggaataataatttaatgctcactgtgaaaaaaaaaaaaaaaaaaaaaa

SEQ ID NO: 3766 - protein, 387 aa, Homo sapien
MKALILVGGYGTRLRPLTLSTPKPLVDFCNKPILLHQVEALAAAGVDHVILAVSYMSQVLEKEMKAQEQRLGIRISMSHEEEPLGTAGPLALARDLLSETADPFFVLNSDVICDFPFQAMVQFHRHHGQEGSILVTKVEEPSKYGVVVCEADTGRIHRFVEKPQVFVSNKINAGMYILSPAVLRRIQLQPTSIEKEVFPIMAKEGQLYAMELQGFWMDIGQPKDFLTGMCLFLQSLRQKQPERLCSGPGIVGNVLVDPSARIGQNCSIGPNVSLGPGVVVEDGVCIRRCTVLRDARIRSHSWLESCIVGWRCRVGQWVSLWAGLGGERGGECACLPDKAYPLLEVRMENVTVLGEDVIVNDELYLNGASVLPHKSIGESVPEPRIIM

SEQ ID NO: 3767 - DNA, 4064 bp, Homo sapien
atgcccgggccccgaggggctgctggcggcctggcccctgagatgcgcggggcgggggcggcggggctgctggcgctgctgctgctgctgctgctgctgctgctgggcctgggcggcagggtcgagggggggccggccggcgagcggggcgcaggcgggggcggggcgctggcccgcgagcgcttcaaggtggtctttgcgccggtgatctgcaagcggacctgtctcaagggccagtgtcgggacagttgtcagcagggctccaacatgacgctcatcggagagaacggccacagcacagacacgctcacgggctccggcttccgcgtggtggtgtgccctctcccctgcatgaatggcggccagtgctcctcgcgaaaccagtgcctgtgtcccccggacttcactgggcgcttctgccaggtgcccgcaggaggagccggtgggggtaccggcggctcaggccccggcctgagcaggacaggggccctgtccacaggggcgctgccgcccctggctccggagggcgactctgtggccagcaagcacgccatctacgccgtccaggtgatcgctgaccctcctgggcccggggaggggcctcctgcccagcacgcagccttcctggtgcccctaggcccgggacagatctcagcagaagtgcaggccccgccccccgtggtgaatgtgcgcgtccatcacccgcccgaggcctcagtccaggtgcaccgcattgagagctcgaacgccgagagcgcagccccctcccagcacctgctgccgcaccccaagccctcgcacccccggccgcccacccagaagcccctgggccgctgctttcaggacactctgcccaagcagccgtgtggcagcaaccccctccccggcctcaccaagcaggaagactgctgcggtagcatcggcactgcctggggccagagcaagtgccacaagtgtccccagctgcagtacacaggagtgcagaagccagggcctgtacgtggggaagtgggcgctgactgtccccagggctacaagaggcttaacagcacccactgccaggacatcaacgagtgcgcaatgccgggcgtgtgtcgccatggtgactgcctcaacaaccctggctcctatcgctgtgtctgcccacctggccatagtttaggcccctcccgtacacagtgcattgcagacaaaccggaggagaagagcctgtgtttccgcctggtgagccctgagcaccagtgccagcacccactgaccacccgcctgacccgccagctctgctgctgcagtgtcggcaaggcctggggcgcgcggtgtcagcgctgcccaacagatggcaccgctgcgttcaaggagatctgcccagctgggaagggataccacattctcacctcccaccagacgctcaccattcagggcgagagtgacttttcccttttcctgcaccctgacgggccacccaagccccagcagcttccggagagccctagccaggctccaccacctgaggacacagaggaagagagaggggtgaccacggactcaccggtgagtgaggagaggtcagtgcagcagagccacccaactgccaccacgactcctgcccggccctaccccgagctgatctcccgtccctcgcccccgaccatgcgctggttcctgccggacttgcctccttcccgcagcgccgtagagatcgctcccactcaggtcacagagactgatgagtgccgactgaaccagaacatctgtggccacggagagtgcgtgccgggcccccctgactactcctgccactgcaaccccggctaccggtcacatccccagcaccgctactgcgtggatgtgaacgagtgcgaggcagagccctgtggcccggggaggggcatctgcatgaacaccggcggctcctacaattgccactgcaaccgcggctaccgcctgcacgtgggcgccggggggcgctcgtgcgtggacctgaacgaatgcgccaagccccacctgtgcggcgacggcggcttctgcatcaactttcccggtcactacaagtgcaactgctaccccggctaccggctcaaagcctcccggcctcctgtgtgcgaagacatcgacgagtgccgggacccaagctcttgcccggatggcaaatgcgagaacaagcccgggagcttcaagtgcatcgcctgtcagcctggctaccgcagccaggggggcggggcctgtcgcgacgtgaacgagtgcgccgagggcagcccctgctcgcctggctggtgcgagaacctcccgggctccttccgctgcacctgtgcccagggctacgcgcccgcgcccgacggccgcagttgcttggatgtggacgagtgtgaggctggggacgtgtgtgacaatggcatctgcagcaacacgccaggatctttccagtgtcagtgcctctctggctaccatctgtccagggaccggagccactgcgaggacattgatgagtgtgacttccctgcagcctgcattgggggtgactgcatcaataccaatggctcctacagatgtctttgcccccaggggcatcggctggtgggtggcaggaaatgccaagacatagatgagtgcagccaggacccgagcctgtgccttccccatggggcctgcaagaaccttcagggctcctatgtgtgtgtctgcgatgagggcttcactcccacccaggaccagcacggttgtgaggaggtggagcagccccaccacaagaaggagtgctacctgaacttcgatgacacagtgttctgcgacagcgtattggccaccaacgtgacccagcaggagtgctgctgctctctgggggccggctggggcgaccactgcgaaatctacccctgcccagtctacagctcagccgagttccacagcctctgcccagacggaaagggctacacccaggacaacaacatcgtcaactacggcatcccagcccaccgtgacatcgacgagtgcatgttgttcgggtcggagatttgcaaggagggcaagtgcgtgaacacgcagcctggctacgagtgctactgcaagcagggcttctactacgacgggaacctgctggaatgcgtggacgtggacgagtgcctggacgagtccaactgccggaacggagtgtgtgagaacacgcgcggcggctaccgctgtgcctgcacgccccctgccgagtacagtcccgcgcagcgccagtgcctgagcccggaagagatggagcgtgccccggagcggcgcgacgtgtgctggagccagcgcggagaggacggcatgtgcgctggccccctggccgggcctgccctcaccttcgacgactgctgctgccgccagggccgcggctggggcgcccaatgccgaccgtgcccgccgcgcggcgcggggtcccattgcccgacatcgcagagcgagagcaattccttctgggacacaagccccctgctgttggggaagcccccaagagatgaggacagttcagaggaggattcagacgagtgtcgctgcgtgagtggccgctgcgtgccgcggccgggcggcgccgtgtgcgagtgtcccggcggcttccagctcgacgcctcccgcgcccgctgcgtggatatcgacgagtgccgagagctgaaccagcgcgggctgctgtgcaagagcgagcgctgcgtgaacaccagcggctccttccgctgcgtctgcaaagccggcttcgcgcgcagccgcccgcacggggcctgcgttccccagcgccgccgctgacgccgccgacgccgccctcggcccagacctcggtgatcactgagggatttccgcgagctcggcctcacttctgccccgacttgtggctcggacccagggaccttcagggcccgcagaccctcccggcgccttgagacccgaggcgcccctaccggcccccctccccggttagcgggcggttgtaaggtctccggcgggcgctgcctgccttcctcccagagggtgtttcctagaaactgataaatcagatcgtgcctctttacccttggctttcgaaaaaaaaaaaaaaaaaa

SEQ ID NO: 3768 - protein, 1256 aa, Homo sapien
MPGPRGAAGGLAPEMRGAGAAGLLALLLLLLLLLLGLGGRVEGGPAGERGAGGGGALARERFKVVFAPVICKRTCLKGQCRDSCQQGSNMTLIGENGHSTDTLTGSGFRVVVCPLPCMNGGQCSSRNQCLCPPDFTGRFCQVPAGGAGGGTGGSGPGLSRTGALSTGALPPLAPEGDSVASKHAIYAVQVIADPPGPGEGPPAQHAAFLVPLGPGQISAEVQAPPPVVNVRVHHPPEASVQVHRIESSNAESAAPSQHLLPHPKPSHPRPPTQKPLGRCFQDTLPKQPCGSNPLPGLTKQEDCCGSIGTAWGQSKCHKCPQLQYTGVQKPGPVRGEVGADCPQGYKRLNSTHCQDINECAMPGVCRHGDCLNNPGSYRCVCPPGHSLGPSRTQCIADKPEEKSLCFRLVSPEHQCQHPLTTRLTRQLCCCSVGKAWGARCQRCPTDGTAAFKEICPAGKGYHILTSHQTLTIQGESDFSLFLHPDGPPKPQQLPESPSQAPPPEDTEEERGVTTDSPVSEERSVQQSHPTATTTPARPYPELISRPSPPTMRWFLPDLPPSRSAVEIAPTQVTETDECRLNQNICGHGECVPGPPDYSCHCNPGYRSHPQHRYCVDVNECEAEPCGPGRGICMNTGGSYNCHCNRGYRLHVGAGGRSCVDLNECAKPHLCGDGGFCINFPGHYKCNCYPGYRLKASRPPVCEDIDECRDPSSCPDGKCENKPGSFKCIACQPGYRSQGGGACRDVNECAEGSPCSPGWCENLPGSFRCTCAQGYAPAPDGRSCLDVDECEAGDVCDNGICSNTPGSFQCQCLSGYHLSRDRSHCEDIDECDFPAACIGGDCINTNGSYRCLCPQGHRLVGGRKCQDIDECSQDPSLCLPHGACKNLQGSYVCVCDEGFTPTQDQHGCEEVEQPHHKKECYLNFDDTVFCDSVLATNVTQQECCCSLGAGWGDHCEIYPCPVYSSAEFHSLCPDGKGYTQDNNIVNYGIPAHRDIDECMLFGSEICKEGKCVNTQPGYECYCKQGFYYDGNLLECVDVDECLDESNCRNGVCENTRGGYRCACTPPAEYSPAQRQCLSPEEMERAPERRDVCWSQRGEDGMCAGPLAGPALTFDDCCCRQGRGWGAQCRPCPPRGAGSHCPTSQSESNSFWDTSPLLLGKPPRDEDSSEEDSDECRCVSGRCVPRPGGAVCECPGGFQLDASRARCVDIDECRELNQRGLLCKSERCVNTSGSFRCVCKAGFARSRPHGACVPQRRR

SEQ ID NO: 3769 - DNA, 1152 bp, Homo sapien
aaggctattattaccaccactgagtggcttaaataatcctgtcaacagcaatcgcccatttccaaagccatggtgaaacatctctgtgctaatttcttttgttttgtttcctaattttttttttttggcaggtggtgggaaataatctttgtcttctttggagtaaaccttcaacaccggattttttcttttaattatggatgtaaaccccaatatccccataatttacattgggtctcgaccaattgcctaattataagaggatatatttaggctcttatttcatccacacaaaaacttgtgtaacaggtagttggaaacatctgaggcaccactttgattctgttttggatggtcatgttttttctcctccgtttccccagcatgtctgccaccatcctcatgcactgcttccaagtgcctgggagcctttatgagcgtccctaaacctaaaagaatccagaggcggggctcggatgaaccctcgagataagcaagtgagccgcttctcccctctaaaggatgtttacacgtgggtggcactcgctggaatccagcgctcgggcagccctgggaggacgcgctcagctgcgaggaggatggagagcaatacatcatcatctttggagaatttagcgacggcgcctgtgaaccagatccaagaaacaatttctgataattgtgtggtgattttctcaaaaacatcctgttcttactgtacaatggcaaaaaagcttttccatgacatgaatgttaactataaagtggtggaactggacctgcttgaatatggaaaccagttccaagatgctctttacaaaatgactggtgaaagaactgttccaagaatatttgtcaatggtacttttattggaggtgcaactgacactcataggcttcacaaagaaggaaaattgctcccactagttcatcagtgttatttaaaaaaaagtaagaggaaagaatttcagtgatgtttatactaataagtttgctagtacagtgtcagttatttaaagtggtaatgcccgataatgtcttttaaatgtttgaggatgttttaaatacatgcattgtcttcacgaagaagatgtaaaaataatgaacaataaattgcggtggaaacctaaaaaaaaaaaaaaaaaaaaaaaa

SEQ ID NO: 3770 - protein, 165 aa, Homo sapien
MNPRDKQVSRFSPLKDVYTWVALAGIQRSGSPGRTRSAARRMESNTSSSLENLATAPVNQIQETISDNCVVIFSKTSCSYCTMAKKLFHDMNVNYKVVELDLLEYGNQFQDALYKMTGERTVPRIFVNGTFIGGATDTHRLHKEGKLLPLVHQCYLKKSKRKEFQ

SEQ ID NO: 3771 - DNA, 2887 bp, Homo sapien
gaagcagcaggtaccccctccacatccctagggctctgtgatgtaggcagaggcccgtgggagtcagcatgccgcgtggctgggccgcccccttgctcctgctgctgctccagggaggctggggctgccccgacctcgtctgctacaccgattacctccagacggtcatctgcatcctggaaatgtggaacctccaccccagcacgctcacccttacctggcaagaccagtatgaagagctgaaggacgaggccacctcctgcagcctccacaggtcggcccacaatgccacgcatgccacctacacctgccacatggatgtattccacttcatggccgacgacattttcagtgtcaacatcacagaccagtctggcaactactcccaggagtgtggcagctttctcctggctgagagcatcaagccggctccccctttcaacgtgactgtgaccttctcaggacagtataatatctcctggcgctcagattacgaagaccctgccttctacatgctgaagggcaagcttcagtatgagctgcagtacaggaaccggggagacccctgggctgtgagtccgaggagaaagctgatctcagtggactcaagaagtgtctccctcctccccctggagttccgcaaagactcgagctatgagctgcaggtgcgggcagggcccatgcctggctcctcctaccaggggacctggagtgaatggagtgacccggtcatctttcagacccagtcagaggagttaaaggaaggctggaaccctcacctgctgcttctcctcctgcttgtcatagtcttcattcctgccttctggagcctgaagacccatccattgtggaggctatggaagaagatatgggccgtccccagccctgagcggttcttcatgcccctgtacaagggctgcagcggagacttcaagaaatgggtgggtgcacccttcactggctccagcctggagctgggaccctggagcccagaggtgccctccaccctggaggtgtacagctgccacccaccacggagcccggccaagaggctgcagctcacggagctacaagaaccagcagagctggtggagtctgacggtgtgcccaagcccagcttctggccgacagcccagaactcggggggctcagcttacagtgaggagagggatcggccatacggcctggtgtccattgacacagtgactgtgctagatgcagaggggccatgcacctggccctgcagctgtgaggatgacggctacccagccctggacctggatgctggcctggagcccagcccaggcctagaggacccactcttggatgcagggaccacagtcctgtcctgtggctgtgtctcagctggcagccctgggctaggagggcccctgggaagcctcctggacagactaaagccaccccttgcagatggggaggactgggctgggggactgccctggggtggccggtcacctggaggggtctcagagagtgaggcgggctcacccctggccggcctggatatggacacgtttgacagtggctttgtgggctctgactgcagcagccctgtggagtgtgacttcaccagccccggggacgaaggacccccccggagctacctccgccagtgggtggtcattcctccgccactttcgagccctggaccccaggccagctaatgaggctgactggatgtccagagctggccaggccactgggccctgagccagagacaaggtcacctgggctgtgatgtgaagacacctgcagcctttggtctcctggatgggcctttgagcctgatgtttacagtgtctgtgtgtgtgtgtgcatatgtgtgtgtgtgcatatgcatgtgtgtgtgtgtgtgtgtcttaggtgcgcagtggcatgtccacgtgtgtgtgtgattgcacgtgcctgtgggcctgggataatgcccatggtactccatgcattcacctgccctgtgcatgtctggactcacggagctcacccatgtgcacaagtgtgcacagtaaacgtgtttgtggtcaacagatgacaacagccgtcctccctcctagggtcttgtgttgcaagttggtccacagcatctccggggctttgtgggatcagggcattgcctgtgactgaggcggagcccagccctccagcgtctgcctccaggagctgcaagaagtccatattgttccttatcacctgccaacaggaagcgaaaggggatggagtgagcccatggtgacctcgggaatggcaattttttgggcggcccctggacgaaggtctgaatcccgactctgataccttctggctgtgctacctgagccaagtcgcctcccctctctgggctagagtttccttatccagacagtggggaaggcatgacacacctgggggaaattggcgatgtcacccgtgtacggtacgcagcccagagcagaccctcaataaacgtcagcttccttccttctgcggccagagccgaggcgggcgggggtgagaacatcaatcgtcagcgacagcctgggcacccgcggggccgtcccgcctgcagagggccactcgggggggtttccaggcttaaaatcagtccgtttcgtctcttggaaacagctccccaccaaccaagatttctttttctaacttctgctactaagtttttaaaaattccctttatgcacccaagagatatttattaaacaccaattacgtagcaggccatggctcatgggacccaccccccgtggcactcatggagggggctgcaggttggaactatgcagtgtgctccggccacacatcctgctgggccccctaccctgccccaattcaatcctgccaataaatcctgtcttatttgttcatcctggagaattga

SEQ ID NO: 3772 - protein, 538 aa, Homo sapien
MPRGWAAPLLLLLLQGGWGCPDLVCYTDYLQTVICILEMWNLHPSTLTLTWQDQYEELKDEATSCSLHRSAHNATHATYTCHMDVFHFMADDIFSVNITDQSGNYSQECGSFLLAESIKPAPPFNVTVTFSGQYNISWRSDYEDPAFYMLKGKLQYELQYRNRGDPWAVSPRRKLISVDSRSVSLLPLEFRKDSSYELQVRAGPMPGSSYQGTWSEWSDPVIFQTQSEELKEGWNPHLLLLLLLVIVFIPAFWSLKTHPLWRLWKKIWAVPSPERFFMPLYKGCSGDFKKWVGAPFTGSSLELGPWSPEVPSTLEVYSCHPPRSPAKRLQLTELQEPAELVESDGVPKPSFWPTAQNSGGSAYSEERDRPYGLVSIDTVTVLDAEGPCTWPCSCEDDGYPALDLDAGLEPSPGLEDPLLDAGTTVLSCGCVSAGSPGLGGPLGSLLDRLKPPLADGEDWAGGLPWGGRSPGGVSESEAGSPLAGLDMDTFDSGFVGSDCSSPVECDFTSPGDEGPPRSYLRQWVVIPPPLSSPGPQAS

SEQ ID NO: 3773 - DNA, 1323 bp, Homo sapien
atgatcatcccctctctagaggagctggactccctcaagtacagtgacctgcagaacttagccaagagtctgggtctccgggccaacctgagggcaaccaagttgttaaaagccttgaaaggctacattaaacatgaggcaagaaaaggaaatgagaatcaggatgaaagtcaaacttctgcatcctcttgtgatgagactgagatacagatcagcaaccaggaagaagctgagagacagccacttggccatgtcaccaaaacaaggagaaggtgcaagactgtccgtgtggaccctgactcacagcagaatcattcagagataaaaataagtaatcccactgaattccagaatcatgaaaagcaggaaagccaggatctcagagctactgcaaaagttccttctccaccagacgagcaccaagaagctgagaatgctgtttcctcaggtaacagagattcaaaggtaccttcagaaggaaagaaatctctctacacagatgagtcatccaaacctggaaaaaataaaagaactgcaatcactactccaaactttaagaagcttcatgaagctcattttaaggaaatggagtccattgatcaatatattgagagaaaaaagaaacattttgaagaacacaattccatgaatgaactgaagcagcccatcaataagggaggggtcaggactccagtacctccaagaggaagactctctgtggcttctactcccatcagccaacgacgctcgcaaggccggtcttgtggccctgcaagtcagagtaccttgggtctgaaggggtcactcaagcgctctgctatctctgcagctaaaacgggtgtcaggttttcagctgctactaaagataatgagcataagcgttcactgaccaagactccagccagaaagtctgcacatgtgaccgtgtctgggggcaccccaaaaggcgaggctgtgcttgggacacacaaattaaagaccatcacggggaattctgctgctgttattaccccattcaagttgacaactgaggcaacgcagactccagtctccaataagaaaccagtgtttgatcttaaagcaagtttgtctcgtcccctcaactatgaaccacacaaaggaaagctaaaaccatgggggcaatctaaagaaaataattatctaaatcaacatgtcaacagaattaacttctacaagaaaacttacaaacaaccccatctccagacaaaggaagagcaacggaagaaacgcgagcaagaacgaaaggagaagaaagcaaaggttttgggaatgcgaaggggcctcattttggctgaagattaa

SEQ ID NO: 3774 - protein, 440 aa, Homo sapien; identical to SEQ ID NO: 3378

SEQ ID NO: 3775 - DNA, 2316 bp, Homo sapien
ggataaaagcaagtttaaaacaaaaattaggaggttgtatgatatagctaatgttctgagtagcctggatcttatcaagaaagttcatgttacagaggaaagaggccgaaaaccagctttcaaatggaccggcccagaaatcagtccaaataccagtggctccagcccagtcattcattttactccctctgatttggaggtgagacggtcttcaaaagagaactgtgccaaaaacctcttttccacacgtgggaaaccaaactttactcgacacccatctcttatcaaattggtaaagagtatagaaagtgatcggagaaagataaattctgcgcccagtagccctatcaagaccaacaaagctgagagttctcagaattctgcacccttcccaagtaaaatggctcagctcgcagctatttgtaaaatgcagttagaagagcaatcaagtgaatccagacagaaagtgagagtacagctggcaagatctggaccctgcaaaccagtagcccctctggaccccccagtgaatgctgagatggagctgacagcaccgtccctcatccagcccctgggaatggttcccctgatccccagccccttgtcatcagcagtgcccctgatcctacctcaggccccttcaggcccatcctatgccatctacctgcagcccactcaagcccaccaaagtgtgacgccaccccaaggcctgagcccaacggtgtgcaccacccactcttctaaagctactggctcaaaagactccacagatgccaccactgagaaggcagccaatgatacctcaaaggccagtgcctctaccaggcctggaagcttgctgccagcaccagagaggcaaggggcaaagagccgaaccagggagccagctggagaaagaggctcaaagagggcaagcatgctcgaggacagtggttccaaaaagaaatttaaagaggacctaaaaggacttgaaaatgtctccgcaaccttgttcccatcaggatacctaatccctctcacgcagtgctcatccctgggggcagagtccattttgtctggtaaagaaaactcaagtgctctttccccaaaccacaggatttacagctccccaattgcaggtgttattccagtgacatcatctgaactcactgctgttaattttccctcttttcatgtaacaccgttgaagctaatggtctcaccaacttccgtggcagccgtacctgtcgggaacagcccggctctcgcttcaagccaccctgttcccatccagaacccaagctcagccattgtaaacttcaccctgcagcacctgggactcatctcacccaatgtgcagttgtctgccagccctgggtctggaatcgttcctgtgtctccaagaatagagtctgttaatgtcgcaccagaaaatgcaggcactcagcaaggaagggccaccaactatgactcaccagtcccaggccagagccagccaaatggacaatcagttgctgtgacaggggcacaacagcctgttcctgtgacacccaaagggtcacaattagtggccgaaagtttcttccgtaccccaggtggacccaccaagccaaccagctcatcctgcatggattttgagggtgctaataaaacctccttaggaactctctttgtcccacagcgaaaactggaagtctcaacagaggatgtccattaatcaacagatgttggcttagtttaattttctaaagagttgtttaatagagaaaatgtacacagactgatttggagaacacattctctgaaaatactgtaaatacgttggggatttgttcaatgtgaaatcagatagttgttttcatacatatatatatatacacacacacacacacacacacacacacacatatatttgtataaagctaagtttagctttcaatcctacaaaataaaagtaaaatgttgaactctaagatatattaacttctagggggaaaaatccattattttagctatgcctatactattatgcaaagtaactgtattaaagtttacttccctctaagcaaatatgcttgacatgcctaacacagcattcccttaaacattttgcacaaagaaaatgctgtgtgatgtataatgttgtatttttaaataggggtatagctatattttttgtaatttctttaatctgttgttgcagtgtatctttttgtaaagtttgcaacaatcctcaatcaagtctatggaaaaattatttataaaatgtatttttaatcataagttgttcaaattaaaacttttctaaaaaataaaaaaaaaaaaaaaaaaaaaaaa

SEQ ID NO: 3776 - protein, 431 aa, Homo sapien
MAQLAAICKMQLEEQSSESRQKVRVQLARSGPCKPVAPLDPPVNAEMELTAPSLIQPLGMVPLIPSPLSSAVPLILPQAPSGPSYAIYLQPTQAHQSVTPPQGLSPTVCTTHSSKATGSKDSTDATTEKAANDTSKASASTRPGSLLPAPERQGAKSRTREPAGERGSKRASMLEDSGSKKKFKEDLKGLENVSATLFPSGYLIPLTQCSSLGAESILSGKENSSALSPNHRIYSSPIAGVIPVTSSELTAVNFPSFHVTPLKLMVSPTSVAAVPVGNSPALASSHPVPIQNPSSAIVNFTLQHLGLISPNVQLSASPGSGIVPVSPRIESVNVAPENAGTQQGRATNYDSPVPGQSQPNGQSVAVTGAQQPVPVTPKGSQLVAESFFRTPGGPTKPTSSSCMDFEGANKTSLGTLFVPQRKLEVSTEDVH

SEQ ID NO: 3777 - DNA, 3984 bp, Homo sapien
ctgctgactgtttcttcggatgcattttttggtgtgctcttgagggattaaatgcaaagagatcacaccatggactacaaggaaagctgcccaagtgtaagcattcccagctccgatgaacacagagagaaaaagaagaggtttactgtttataaagttctggtttcagtgggaagaagtgaatggtttgtcttcaggagatatgcagaggttgataaactttataacactttaaaaaaacagtttcctgctatggccctgaagattcctgccaagagaatatttggtgataattttgatccagattttattaaacaaagacgagcaggactaaacgaattcattcagaacctagttaggtatccagaactttataaccatccagatgtcagagcattccttcaaatggacagtccaaaacaccagtcaggtccatctgaagatgaggatgaaagaagttctcagaagctacactctacctcacagaacatcaacctgggaccgtctggaaatcctcatgccaaaccaactgactttgatttcttaaaagttattggaaaaggcagctttggcaaggttcttcttgcaaaacggaaactggatggaaaagtttatgctgtcaaagtgttacagaaaaaaatagttctcaacagaaaagagcaaaaacatattatggctgaacgtaatgtgctcttgaaaaatgtgaaacatccgtttttggttggattgcattattccttccaaacaactgaaaagctttattttgttctggattttgttaatggaggggagctttttttccacttacaaagagaacggtcctttcctgagcacagagctaggttttacgctgctgaaattgctagtgcattgggttacttacattccatcaaaatagtatacagagacttgaaaccagaaaatattcttgtggattcagtaggacatgttgtcttaacagattttgggctttgtaaagaaggaattgctatttctgacaccactaccacattttgtgggacaccagagtatcttgcacctgaagtaattagaaaacagccctatgacaataccgtagattggtggtgccttggggctgttctgtatgaaatgctgtatggattgcctcctttttattgccgagatgttgctgaaatgtatgacaatatccttcacaaacccctaagtttgaggccaggagtgagtcttagagcctggtccattctggaagaactcctagaaaaagacaggcaaaatcgacttggtgccaaggaagactttcttgaaattcagaatcatcctttttttgaatcactcagctgggctgaccttgtacaaaagaagattccaccaccatttaatcctaatgtggctggaccagatgatatcagaaactttgacacagcatttacagaagaaacagttccatattctgtgtgtgtatcttctgactattctatagtgaatgccagtgtattggaggcagatgatgcattcgttggtttctcttatgcacctccttcagaagacttatttttgtgagcagttgccatacagaaaccattgagcaaaataagtctatagatgggactgaaacttctatttgtgtgaatatattcaaatatgtataactagtgcctcatttttatatgtaatgatgaaaactatgaaaaaatgtattttcttctatgtgcaagaaaaatagggcatttcaaagagctgttttgattaaaatttatattcttgtttaataagcttatttttaaacaatttaaaagctattattcttagcattaacctatttttaaagaaacctttttgctattgactgttttttccctctaagtttacactaacatctacccaagatagactgttttttaacagtcaatttcagttcagctaacatatattaatacctttgtaactctttgctatggcttttgttatcacaccaaaactatgcaattggtacatggttgtttaagaagaaaccgtatttttccatgataaatcactgtttgaaatatttggtcatggtatgatcgaaatgtaaaagcataattaacacattggctgctagttaacaattggaataactttattctgcagatcatttaagaagtaacaggccgggcgcgggttgtcacgcctgtaatcccagcactttgggaggctgaggcgggcagatcacctgaggtcaggagttggagaccagcctgaccaacatggacaaaccccgtctctactaaaaatacaaaattggcagggtgtggtgcacatgcctataatcccagctacttgggaggctaaggcaggagaatcgcttgaacccgggaggcggaggttgcagtgagccgagatcgcaccattgcactcctgcctgggcaacaagagtgaaactccatctccaaaaaaaaaaaggaaaaagtaacaaaaggaaattatttgtttttgaaataccagttcaactttgtggattatttttcctctgaaggaaaagaaaaggcttaatggttaggatttttaagtattcccaaagatctgaagggtaataaaatgtactggattttttaaggtggtaccaaaaatgaatgtctgtcatatatttatattacaaatacattatatttatgttctattcatcttttgaatgtttagtatgctattaagtcattctgaatctttgtatttgcttttgcaaataggtatttcaaagctcttttcctaactggttaagtaaaataaaaaattgagctttctagaatatttgcctaattgggaattaaaaagtaaaataataggccaggcatggtggctcatgcctataagcaccctgggaggccgaggcaggcagattatttgagctcaggagtttgagaccatcctgggcaacatggcgaaaccctatctctacaaaaaatacaaaaattagccagacatggtggcacatgcctttagtcccagctactcaggaggctgaagttggaggatggcttgagcccacgagatggaagttgcagtgaactgaaattgtgccactgcacttttcagcctgggtgccacagcgagaccctagttaagagaaaaaaaaagtaaaaacaaattgtgggtcaaagtaaatgtatacagttttattacaatgtaacaaaagttgaaaatcgggcccggaatttatccaatttcagatatatcttagaaaaagcacaggaaacagaccttaaaattgtaacctaccaactaacttacatgcttataaaagtaaaggagaataactggccgggcacggtggctcatgcctataaaattccagcactttgggaggccaaggcaggaggatcacttgagcctatgagttcaagaccagcctaggcaatgtagtgacacctcatttctatttattttaaaaaaaagagagagtaactacagaagaactttaaaaaataaaaaataagcttaccttggattcttggcttagagtagaggttttttttaagttatggaggaaacatttttgtaaaagtttaatgacccactttagatgctccaagaacaagcatcccttccatgtatgtcttgagaaagaaatcacagaagcatttctcaccaatactctttggcttaaaatgttcagcagaattgggcagtgggggtgacttttcttatattaataatatttacatccaatacactgaatcttcctttagaggtaagactttaatatctatactgtaaatatttggtttatttggcactactgtaagttttgtttttcacaaagctcttattatgaagcaaaataaaaattctagtttcttgtatgattttttgtactcattcattcctgttaagctgccaaaaattaaagtgcaatattgtatatttttaagaacaaatttaaaatagaattttgatgtttctcagatcacaagaaatacaaatctatatagtataataaaatcagcaaaagatcaaaaaaaaaaa

SEQ ID NO: 3778 - protein, 496 aa, Homo sapien
MQRDHTMDYKESCPSVSIPSSDEHREKKKRFTVYKVLVSVGRSEWFVFRRYAEVDKLYNTLKKQFPAMALKIPAKRIFGDNFDPDFIKQRRAGLNEFIQNLVRYPELYNHPDVRAFLQMDSPKHQSGPSEDEDERSSQKLHSTSQNINLGPSGNPHAKPTDFDFLKVIGKGSFGKVLLAKRKLDGKVYAVKVLQKKIVLNRKEQKHIMAERNVLLKNVKHPFLVGLHYSFQTTEKLYFVLDFVNGGELFFHLQRERSFPEHRARFYAAEIASALGYLHSIKIVYRDLKPENILVDSVGHVVLTDFGLCKEGIAISDTTTTFCGTPEYLAPEVIRKQPYDNTVDWWCLGAVLYEMLYGLPPFYCRDVAEMYDNILHKPLSLRPGVSLRAWSILEELLEKDRQNRLGAKEDFLEIQNHPFFESLSWADLVQKKIPPPFNPNVAGPDDIRNFDTAFTEETVPYSVCVSSDYSIVNASVLEADDAFVGFSYAPPSEDLFL

SEQ ID NO: 3779 - DNA, 2076 bp, Homo sapien
cagtcttgtttcgggttccggctgcgttgggcttgcgtgcggctcgctaagactatggcgtccgggcctcattcgacagctactgctgccgcagccgcctcatcggccgccccaagcgcgggcggctccagctccgggacgacgaccacgacgacgaccacgacgggagggatcctgatcggcgatcgcctgtactcggaagtttcacttaccatcgaccactctctgattccggaggagaggctctcgcccaccccatccatgcaggatgggctcgacctgcccagtgagacggacttacgcatcctgggctgcgagctcatccaggccgccggcattctcctccggctgccgcaggtggcgatggcaacggggcaggtgttgtttcatcgttttttctactccaaatctttcgtcaaacacagtttcgagattgttgctatggcttgtattaatcttgcatcaaaaatcgaagaagcacctagaagaataagagatgtgattaatgtattccaccacctccgccagttaagaggaaaaaggactccaagccccctgatccttgatcagaactacattaacaccaaaaatcaagttatcaaagcagagaggagggtgctaaaggagttgggattttgtgttcatgtcaagcatcctcataagatcattgttatgtatttacaagtcttagaatgtgaacgtaatcaaaccctggttcaaactgcctggaattacatgaatgacagtcttcgaaccaatgtgtttgttcgatttcaaccagagactatagcatgtgcttgcatctaccttgcagctagagcacttcagattccgttgccaactcgtccccattggtttcttctttttggtactacagaagaggaaatccaggaaatctgcatagaaacacttaggctttataccagaaaaaagccaaactatgaattactggaaaaagaagtagaaaaaagaaaagtagccttacaagaagccaaattaaaagcaaagggattgaatccggatggaactccagccctttcaaccctgggtggattttctccagcctccaagccatcatcaccaagagaagtaaaagctgaagagaaatcaccaatctccattaatgtgaagacagtcaaaaaagaacctgaggatagacaacaggcttccaaaagcccttacaatggtgtaagaaaagacagcaagagaagtagaaatagcagaagtgcaagtcgatcgaggtcaagaacacgatcacgttctagatcacatactccaagaagacactataataataggcggagtcgatctggaacatacagctcgagatcaagaagcaggtcccgcagtcacagtgaaagccctcgaagacatcataatcatggttctcctcaccttaaggccaagcataccagagatgatttaaaaagttcaaacagacatggtcataaaaggaaaaaatctcgttctcgatctcagagcaagtctcgggatcactcagatgcagccaagaaacacaggcatgaaaggggacatcatagggacaggcgtgaacgatctcgctcctttgagaggtcccataaaagcaagcaccatggtggcagtcgctcaggacatggcaggcacaggcgctgactttgtcttcctttgagcctgcatcagttcttggttttgcctatctaccagtgtgatgtatggactcaatcaaaaacattaaacgcaaaactgattaggatttgatttcttgaaaccctctaggtctctagaacactgaggacagtttcttttgaaaagaactatgttaatttttttgcacattaaaatgccctagcagtatctaattaaaaaccatggtcaggttcaattgtactttattatagttgtgtattgtttattgctataagaactggagcgtgaattctgtaaaaatgtatcttatttttatacagataaaattgcagacactgttctatttaagtggttatttgtttaaatgatggtgaatactttcttaacactggtttgtctgcatgtgtaaagatttttacaaggaaataaaatacaaatcttgttttt

SEQ ID NO: 3780 - protein, 526 aa, Homo sapien
MASGPHSTATAAAAASSAAPSAGGSSSGTTTTTTTTTGGILIGDRLYSEVSLTIDHSLIPEERLSPTPSMQDGLDLPSETDLRILGCELIQAAGILLRLPQVAMATGQVLFHRFFYSKSFVKHSFEIVAMACINLASKIEEAPRRIRDVINVFHHLRQLRGKRTPSPLILDQNYINTKNQVIKAERRVLKELGFCVHVKHPHKIIVMYLQVLECERNQTLVQTAWNYMNDSLRTNVFVRFQPETIACACIYLAARALQIPLPTRPHWFLLFGTTEEEIQEICIETLRLYTRKKPNYELLEKEVEKRKVALQEAKLKAKGLNPDGTPALSTLGGFSPASKPSSPREVKAEEKSPISINVKTVKKEPEDRQQASKSPYNGVRKDSKRSRNSRSASRSRSRTRSRSRSHTPRRHYNNRRSRSGTYSSRSRSRSRSHSESPRRHHNHGSPHLKAKHTRDDLKSSNRHGHKRKKSRSRSQSKSRDHSDAAKKHRHERGHHRDRRERSRSFERSHKSKHHGGSRSGHGRHRR

SEQ ID NO: 3781 - DNA, 4235 bp, Homo sapien
gggggcagacggccgaagagccaggtgtgccagggacctatggcagcagggctgaacgtgcccgctccagcctctccagtgctgggagagacctctagatggtgcaggtgagtttgcaatgagggaaagcccctcggcaaggactgagtttccaaacttgcagacagggcagggagcggtcaaggaagagttcccgggaagccctttaaacggaaaggaagcggggctagtgtcagagaggtgtgccaggtcccaggcagccctgctgacccctaaggacatagagtacctgcttctgagagggctgccacggtggccacctgtgaagcctgtcacccagaactggatggtacctgactttcttcatagacccatcttctgctgggactgaagctgacctccaacagaagccaggtgagcccttgggagaggatggcccatgtgggggactgcacgcagacgccctggctccccgtcctggtggtgtctctgatgtgctcagcccgagcggaatactcaaactgcggtgagaacgagtactacaaccagactacggggctgtgccaggagtgccccccgtgtgggccgggagaggagccctacctgtcctgtggctacggcaccaaagacgaggactacggctgcgtcccctgcccggcggagaagttttccaaaggaggctaccagatatgcaggcgtcacaaagactgtgagggcttcttccgggccaccgtgctgacaccaggggacatggagaatgacgctgagtgtggcccttgcctccctggctactacatgctggagaacagaccgaggaacatctatggcatggtctgctactcctgcctcctggcaccccccaacaccaaggaatgtgtgggagccacttcaggagcttctgccaacttccctggcacctcgggcagcagcaccctgtctcccttccagcacgcccacaaagaactctcaggccaaggacacctggccactgccctgatcattgcaatgtccaccatcttcatcatggccatcgccatcgtcctcatcatcatgttctacatcctgaagacaaagccctctgccccagcctgttgcaccagccacccggggaagagcgtggaggcccaagtgagcaaggacgaggagaagaaagaggccccagacaacgtggtgatgttctccgagaaggatgaatttgagaagctgacagcaactccagcaaagcccaccaagagcgagaacgatgcctcatccgagaatgagcagctgctgagccggagcgtcgacagtgatgaggagcccgcccctgacaagcagggctccccggagctgtgcctgctgtcgctggttcacctggccagggagaagtctgccaccagcaacaagtcagccgggattcaaagccggaggaaaaagatcctcgatgtgtatgccaacgtgtgtggagtcgtggaaggtcttagccccacggagctgccatttgattgcctcgagaagactagccgaatgctcagctccacgtacaactctgagaaggctgttgtgaaaacgtggcgccacctcgccgagagcttcggcctgaagagggatgagattgggggcatgacagacggcatgcaactctttgaccgcatcagcacggcaggctacagcatccctgagctactcacaaaactggtgcagattgagcggctggatgctgtggagtccttgtgtgcagacatactggagtgggcgggggttgtgccacctgcctcccagccacatgctgcatcctgaaaagcatgcctgtgggctgtcctcccaggacaagccaaggatccaacgagggctctggagctgtgagtggtgccaaaagactgccaagaatcaaggcttttgtgatatgtcaccgtatgccttaggatgttcaaggagccagacgaaataaggcctgtcttccaatttaaccaaagataaaggactagagccgggatactttcagatgctcgcctgtacctcaccaggcagagtaaatatctactcactcatacagccagcccaccagcccaccattaactcactgaacaatgagacaatgttgaggactcaaatgaatcaaaccccgtgggaatgacagaagtgaagaatctggtccctgtctttaaggagtttgcactccagtagaagacagaaggaacgtatgtttacaaaccacttcactggaagacgtcaaacaagctgaatgaaggggcgcttagaaaacgttaatagaagttctaagcgggagatgactccctactgggatgatgaaggatggcatcctagtgaagaagcagctcaaacattttgataaaatggcaacaaaatgcagacaccctgctccaggtattatttcaggtttagtacaagtctgttaataccctatgtggtttcattaggataactttttacctatccttgaggtcatccatattcttacaggccttccagtcaataatggaagagctcactctatacaaaaccaatatgcaaggcatgtgtttgtccaagcaattggatgtgtgcagtagccaatttcatttactgcattactctttggcctgggaaccctgtggtctgcactacatgtgaatggccttccacttcagtcttaggcagatttgaccttttaggggcagcaatgctgaaggacacagcaatttaaattataatgtgtcaggctgtgttttcacttcaaacatgtatgagtagtcagctgtaattagagaaatgatgacttcctaagagttcagccacgcataattctagatttcaagagcatctaagacttgtggattagcctcatggcatgagagtttcagactcagccttctgagccagtcagggaaagtggagttctgcagcgcaaatgagagcctgggcttggtgtcgagggagctggcttctagttgtgccaccttgggccttgtcttttcctctctctgcctcagtttctcgtctgccaatgagatgttagttagtgattctataattggggcaggtagggttcaggtgagcaaaaagaaagtggagctataggaaatgccaggcctttgaggtgctctatggaagtcaacacagtgtggtttgtccatttaaatgggaataaaaacagaaaaactcagacttggcattttcacaataactgcaatggtttgacataacatttataggcagaaagttaataaactggcattgttcttggcatattattgtactatccctgtaactgccaagagctcaggagccaggctagtgatcacaccaggggttagagttcactgctgaactccctgatggcaggtctgtgtttattactacattaaaacaaagtctctgacttataaagcgaggtcgtaaaaattacaagttgcatgactgaaaaaatgctttagggggaaaatcagtcatatctttaacaccaacaagcaatttcccaccaacgaatgtagtacatactgtgagaggatcataatgaggtcctgaatatttaatatcatcatttactgtgtctgtttgctgctgtttttcgaacctatttggtttaccctgcaagctaaatactccacggcagagcttaattatccttttaattcctctttgaaatcctgtggtgcccccttccccctgccttgtgatgatgatgagtgagtctccccttaattagactgcaaatgtcacttgtgatgagtgtgccattccaggataacagcttgcaccctcctcagaatgttttcagcgaaagagtggggtggctgttctctgctcctggtgctttggcctcatttcacactattagaattctggggctgtaaggccagccagtgtcagctcatgttccattggctctccacctgccatttttagggagctattccttatatagttacaaattcccttgtcatttacttatttggaaacatgggatttactctgacaagctttagcctatgttatgggattcagaacaatgagatcataataattctcactgaccaaagctgggactccatcctgccatttttgtgtggagatattcataattctgcaatactttaaaacatttagaaaacaccccagggtaggtctgtggcccttagacagtgaagtcttaattgtcaatattatttttgtctaattctgtatatatataacttattatattttataatctcaataaacacattaataaaaaaaaaaaaaaaaaaaaaaaa

SEQ ID NO: 3782 - protein, 448 aa, Homo sapien
MAHVGDCTQTPWLPVLVVSLMCSARAEYSNCGENEYYNQTTGLCQECPPCGPGEEPYLSCGYGTKDEDYGCVPCPAEKFSKGGYQICRRHKDCEGFFRATVLTPGDMENDAECGPCLPGYYMLENRPRNIYGMVCYSCLLAPPNTKECVGATSGASANFPGTSGSSTLSPFQHAHKELSGQGHLATALIIAMSTIFIMAIAIVLIIMFYILKTKPSAPACCTSHPGKSVEAQVSKDEEKKEAPDNVVMFSEKDEFEKLTATPAKPTKSENDASSENEQLLSRSVDSDEEPAPDKQGSPELCLLSLVHLAREKSATSNKSAGIQSRRKKILDVYANVCGVVEGLSPTELPFDCLEKTSRMLSSTYNSEKAVVKTWRHLAESFGLKRDEIGGMTDGMQLFDRISTAGYSIPELLTKLVQIERLDAVESLCADILEWAGVVPPASQPHAAS

SEQ ID NO: 3783 - DNA, 2095 bp, Homo sapien
acgtttaaagctgagcgacccagtgccactggagacggtcagcttctccactcaggctcctccagcccgagccagaagaccccctcccccataattctgggggccgatggaagggagccgagtcagatcgcgaggtacccatagccgacagaccggagcgacagggagttgccataagccccgcccctaggagtgatcggaaagcctcacccatccgggtgaggaacccggagggaccgcctccgggcggagcccgccgaccatggctacgcccctggtggcgggtcccgcagctctacgcttcgccgccgcggctagctggcaggttgtgcgcggacgctgcgtggaacattttccgcgagtactggagtttctgcgatctctgcgcgctgttgcccctggcttggttcgctaccggcaccacgaacgcctttgtatgggcctaaaggccaaggtggtggtggagctgatcctgcagggccggccttgggcccaagtcctgaaagccctgaatcaccactttccagaatctggacctatagtgcgggatcccaaggctacaaagcaggatctgaggaagattttggaggcacaggaaactttttaccagcaggtgaagcagctgtcagaggctcctgtggatttggcctcgaagctgcaggaacttgaacaagagtatggggaaccctttctggctgccatggaaaagctgctttttgagtacttgtgtcagctggagaaagcactgcctacaccgcaggcacagcagcttcaggatgtgctgagttggatgcagcctggagtctctatcacctcttctcttgcctggagacaatatggtgtggacatggggtggctgcttccagagtgctctgttactgactcagtgaacctggctgagcccatggaacagaatcctcctcagcaacaaagactagcactccacaatcccctgccaaaagccaagcctggcacacatcttcctcagggaccatcttcaaggacgcacccagaacctctagctggccgacacttcaatctggcccctctaggccgacgaagagttcagtcccaatgggcctccactaggggaggccataaggagcgccccacagtcatgctgtttccctttaggaatctcggctcaccaacccaggtcatatctaatcctgagagcaaggaagaacatgcgatatacacagcagacctagccatgggcacaagagcaccctccaatgggaagtataagggtccataccagaccctggggggaagggctctgaaggagaacccagttgacttgcctgccacagagcaaaaggagtgagtggaacagagttgcttcttaataggagcacattctttgcctgccttcccttcatcctatcctctttgcttgctctcacctcaggaattgcttggattgatacatggaccccctgagactatcattattacctcctagggccaggaagccaggtaggtagtctgagtcaggattggatcaacagcctcctctcttggggactctcaagagcctgtgttcatctagaagtagtagtttgattctggtttccctcatacagtgtgtcctccgtctctgtgcagctccgtcattaccataggggacttggttttagactctgatgaggaagaaaatggccagggggaaggaaaggtgagtgggaaggagcagaaagctgggaaaggggatgggtagaacaagactgagaaatccacatgcttcagaattcagagggttcagggaatggtttcggatagtaggctctccctgctcccttctatacaggaatctctggaaaactatcagaagacaaagtttgacaccttgatacccactttttgtgaatacctacccccttctggccacggtgccatacctgtttcttcctgtgactgtagaaacagttctagacctttgtgatagaactaaaatgctctctgtactctagtctcctgcctcctcagttctgcaagtagtttagtaggaatgaagtggaagtccaggcttggattgcctaactacactgctaaaaatatttgtaatccttaataattaaactttggatttgtt

SEQ ID NO: 3784 - protein, 354 aa, Homo sapien
MATPLVAGPAALRFAAAASWQVVRGRCVEHFPRVLEFLRSLRAVAPGLVRYRHHERLCMGLKAKVVVELILQGRPWAQVLKALNHHFPESGPIVRDPKATKQDLRKILEAQETFYQQVKQLSEAPVDLASKLQELEQEYGEPFLAAMEKLLFEYLCQLEKALPTPQAQQLQDVLSWMQPGVSITSSLAWRQYGVDMGWLLPECSVTDSVNLAEPMEQNPPQQQRLALHNPLPKAKPGTHLPQGPSSRTHPEPLAGRHFNLAPLGRRRVQSQWASTRGGHKERPTVMLFPFRNLGSPTQVISNPESKEEHAIYTADLAMGTRAPSNGKYKGPYQTLGGRALKENPVDLPATEQKE

SEQ ID NO: 3785 - DNA, 2175 bp, Homo sapien
gcacactgaagagtacgtcttcgggtctacccctaatcacataatggctgtgtttaatcagaagtctgtctcggacatgattaaagagtttcgaaaaaattggcgtgctctttgtaactctgagagaactactctatgtggtgcagactccatgctcttggcattgcagctttctatggcagagaacaacaaacagtggagaatttacagtctctctcagtgatgttttattgacatggaaatacttgctccatgagaaattgaacttaccagttgaaaacatggacgtgactgaccattatgaggacgttaggaagatttatgatgatttcttgaagaacagtaatatgttagatctgattgatgtttatcaaaaatgtagggctttgacttctaattgtgaaaattataacacagtatctcctagtcaactactggattttctgtctggcaaacagtatgcagtaggtgatgaaactgatctttctataccaacatcaccaacaagtaaatacaaccgtgataatgaaaaggtgcagctgctagcaaggaaaattatcttttcatatttaaatctgctagtgaattcaaagaatgacctggctgtggcttatattctcaatattcctgatagaggactaggaagagaagccttcactgatttgaaacatgctgctcgagagaaacaaatgtctatctttttggtggccacgtcttttattagaacaatagagcttggagggaaaggatatgcaccaccaccatcagatcctttaaggacacatgtaaagggattgtctaattttattaatttcattgacaaattagatgagattcttggagaaataccaaacccaagcattgcagggggtcaaatactgtcagtgataaagatgcaactgattaaaggccaaaacagcagggatcctttttgcaaagcaatagaggaagttgctcaggatttggatttgaggattaaaaatattatcaattctcaagaaggtgttgtagctcttagcaccactgacatcagtcctgctcggccaaaatctcatgccataaaccatggtactgcatactgtggcagagatactgtgaaagccttattagttcttttggacgaagaagcagctaatgctcctaccaaaaacaaagcagagcttttatatgatgaggaagacacaatccatcatcatggaacgtctattcttacactttttaggtctcccacacaggtgaataatttgataaaacccctaagagaacgcatctgtgtgtcaatgcaagagaaaaaaattaagatgaagcaaactttaattagatcccaatttgcttgtacttataaagatgactacatgataagcaaggataattggaataatgttaatttagcatcaaagcctttgtgtgttctttacatggaaaatgacctttctgagggtgtaaatccatctgttggaagatcaacaattggaacgagttttggaaatgttcatctggacagaagtaaaaatgaaaaagtatcaagaaaatcaaccagtcagacaggaaataaaagctcaaaaaggaaacaggtggatttggatggtgaaaatattctctgtgataatagaaatgaaccacctcaacataaaaatgctaaaatacctaagaaatcaaatgattcacagaatagattgtacggcaaactagctaaagtagcaaaaagtaataaatgtactgccaaggacaagttgatttctggccaggcaaagttaactcagttttttagactataaatttgtgtcttatatgctttaggtttatgcatctataaaccattcaccaaagacatgcttaatttttaagagatcaaggtgtaaattatgatgatttattattttggtctacagtgtatgtaaggttagtatgttaagcactgtttttgactttttaaaaataccttagatgcaaatttataggagaaaaaacactttcagataagaggtgtttgctgggatggaagaactacctggcatgtaagaaatatcgtcagtcgtcctaatgcatattgtgactgtttgcatatacttctgtttataaaagtatcagttttacttttcagaggatttgtaagaatcatttaaattttcattgaaataaacgacaagtcacattgaaaaaaaaaaaaaaaaa

SEQ ID NO: 3786 - protein, 498 aa, Homo sapien
MDVTDHYEDVRKIYDDFLKNSNMLDLIDVYQKCRALTSNCENYNTVSPSQLLDFLSGKQYAVGDETDLSIPTSPTSKYNRDNEKVQLLARKIIFSYLNLLVNSKNDLAVAYILNIPDRGLGREAFTDLKHAAREKQMSIFLVATSFIRTIELGGKGYAPPPSDPLRTHVKGLSNFINFIDKLDEILGEIPNPSIAGGQILSVIKMQLIKGQNSRDPFCKAIEEVAQDLDLRIKNIINSQEGVVALSTTDISPARPKSHAINHGTAYCGRDTVKALLVLLDEEAANAPTKNKAELLYDEEDTIHHHGTSILTLFRSPTQVNNLIKPLRERICVSMQEKKIKMKQTLIRSQFACTYKDDYMISKDNWNNVNLASKPLCVLYMENDLSEGVNPSVGRSTIGTSFGNVHLDRSKNEKVSRKSTSQTGNKSSKRKQVDLDGENILCDNRNEPPQHKNAKIPKKSNDSQNRLYGKLAKVAKSNKCTAKDKLISGQAKLTQFFRL

SEQ ID NO: 3787 - DNA, 3165 bp, Homo sapien
ggggatttggctagaaggctgggccggcagcggttgtgaggagttagctcgcggcattgcaggctctgagaggaggggacccggttcccgggtgagtgtccaggcatgccagcggaacggcccgcgggcagcggcggctcggaggctccagcaatggttgaacaactggacactgctgtgattaccccggccatgctagaagaggaagaacagcttgaagctgctggactagagagagagcggaagatgctggaaaaggctcgcatgtcttgggatagagagtcgacagaaattcggtaccgtagacttcaacatttgcttgaaaaaagcaatatctactccaaatttttattgacgaaaatggaacagcaacaattagaggaacagaagaagaaagaaaaattggagagaaaaaaggagtctttaaaagttaaaaagggtaaaaattcaattgatgcaagtgaagagaagccagttatgaggaaaaaaagaggaagagaagatgaatcatacaatatttcagaggtcatgtcaaaagaggaaattttgtctgtggctaaaaaaaataaaaaggagaatgaggatgaaaactcctcctctactaatctctgtgtggaagatcttcagaaaaataaagattcgaatagtataattaaagatagattgtctgaaacggttaggcagaatactaaattcttttttgacccagtccggaagtgtaatggtcagccagtaccttttcaacaaccaaagcacttcactggaggagtgatgcgatggtaccaagtagaaggcatggaatggcttaggatgctttgggaaaatggaattaatggcattttagcagatgaaatgggattgggtaagacagttcagtgcattgctactattgcattgatgattcagagaggagtaccaggaccttttcttgtctgtggccctttgtctacacttcctaactggatggctgaattcaaaagatttacaccagatatccctacaatgttatatcatggaacccaggaggaacgtcaaaaattggtaagaaatatttacaaacggaaagggactttgcagattcatcctgtggtaatcacgtcatttgaaatagccatgagagaccgaaatgcgttacagcattgctattggaaatacttaatagtagatgaaggacacaggattaagaatatgaagtgccgtctaatcagggagttaaaacgattcaatgctgataacaaacttcttttgactggtactcccttgcaaaacaatttatcagaactttggtcattgctaaactttttgttgccagatgtatttgatgacttgaaaagctttgagtcttggtttgacatcactagtctttctgaaactgctgaagatattattgctaaagaaagagaacagaatgtattgcatatgctgcaccagattttaacacctttcttattgagaagactgaagtctgatgttgctcttgaagttcctcctaaacgagaagtagtcgtttatgctccactttcaaagaagcaggagatcttttatacagccattgtgaaccgtacaattgcaaacatgtttggatccagtgagaaagaaacaattgagttaagtcctactggtcgaccaaaacgacgaactagaaaatcaataaattacagcaaaatagatgatttccctaatgaattggaaaaactgatcagtcaaatacagccagaggtggaccgagaaagagctgttgtggaagtgaatatccctgtagaatctgaagttaatctgaagctgcagaatataatgatgctacttcgtaaatgttgtaatcatccatatttgattgaatatcctatagaccctgttacacaagaatttaagatcgatgaagaattggtaacaaattctgggaagttcttgattttggatcgaatgctgccagaactaaaaaaaagaggtcacaaggtgctgcttttttcacaaatgacaagcatgttggacattttgatggattactgccatctcagagatttcaacttcagcaggcttgatgggtccatgtcttactcagagagagaaaaaaacatgcacagcttcaacacggatccagaggtgtttatcttcttagtgagtacacgagctggtggcctgggcattaatctgactgcagcagatacagttatcatttatgatagtgattggaacccccagtcggatcttcaggcccaggatagatgtcatagaattggtcagacaaagccagttgttgtttatcgccttgttacagcaaatactatcgatcagaaaattgtggaaagagcagctgctaaaaggaaactggaaaagttgatcatccataaaaatcatttcaaaggtggtcagtctggattaaatctgtctaagaatttcttagatcctaaggaattaatggaattattaaaatctagagattatgaaagggaaataaaaggatcaagagagaaggtcattagtgataaagatctagagttgttgttagatcgaagtgatcttattgatcaaatgaatgcttcaggaccaattaaagagaagatggggatattcaagatattagaaaattctgaagattccagtcctgaatgtttgttttaaagtggagctcaagaatagcttttaaaagttcttatttacatctagtgatttccctgtattgggtttgaaatactgattgtccacttcaccttttttattatatcagttgacatgtaactagtaccatgcgtacttaaatagatggtaattttctgagccttaccaagaacaaagaagtatccatattaagtttagattttcagttaatttttgagactgagtagtattcttggatacaggctgatgtgtacttaaccacttccagatttatacagtcttcctgtggaagtttagtaaatgtctttttccctcctttcttctagtaatgcagttcatgggctttaggtacttcagttatgaagtaggcttttcatggggagagattgggattatgctttctgttgtttaagaaactgtttgattttagagtctatttctatgagatagtttaccaaataaatgttccttataagatgaaaaaaaaaaaaaaaaaaaaaaaaaaaaaaaaaaaaaaaaaaaaaaaaaaaaaaaaaaaaaaaaaaa

SEQ ID NO: 3788 - protein, 838 aa, Homo sapien
MPAERPAGSGGSEAPAMVEQLDTAVITPAMLEEEEQLEAAGLERERKMLEKARMSWDRESTEIRYRRLQHLLEKSNIYSKFLLTKMEQQQLEEQKKKEKLERKKESLKVKKGKNSIDASEEKPVMRKKRGREDESYNISEVMSKEEILSVAKKNKKENEDENSSSTNLCVEDLQKNKDSNSIIKDRLSETVRQNTKFFFDPVRKCNGQPVPFQQPKHFTGGVMRWYQVEGMEWLRMLWENGINGILADEMGLGKTVQCIATIALMIQRGVPGPFLVCGPLSTLPNWMAEFKRFTPDIPTMLYHGTQEERQKLVRNIYKRKGTLQIHPVVITSFEIAMRDRNALQHCYWKYLIVDEGHRIKNMKCRLIRELKRFNADNKLLLTGTPLQNNLSELWSLLNFLLPDVFDDLKSFESWFDITSLSETAEDIIAKEREQNVLHMLHQILTPFLLRRLKSDVALEVPPKREVVVYAPLSKKQEIFYTAIVNRTIANMFGSSEKETIELSPTGRPKRRTRKSINYSKIDDFPNELEKLISQIQPEVDRERAVVEVNIPVESEVNLKLQNIMMLLRKCCNHPYLIEYPIDPVTQEFKIDEELVTNSGKFLILDRMLPELKKRGHKVLLFSQMTSMLDILMDYCHLRDFNFSRLDGSMSYSEREKNMHSFNTDPEVFIFLVSTRAGGLGINLTAADTVIIYDSDWNPQSDLQAQDRCHRIGQTKPVVVYRLVTANTIDQKIVERAAAKRKLEKLIIHKNHFKGGQSGLNLSKNFLDPKELMELLKSRDYEREIKGSREKVISDKDLELLLDRSDLIDQMNASGPIKEKMGIFKILENSEDSSPECLF

SEQ ID NO: 3789 - DNA, 1842 bp, Homo sapien
gcgcgccacggcaggaaagggcggtcctgcgctgtggcccacgctcgctcccgctgtcggactctgggcctggaccgcgcgtggccggcgccaaaagcgagaggcatgagcgcgcgcccgggccagtgaactgctcggggatggactgcggctcggtcggcggccagaggacccagcgcctgcccggccgccagcggcttctcttcttgcccgtgggcctcagcggaagaccgggcggcagcgaaacctcagcacgccgctgcccctctgcgctctccgacggtctgggggcgctgcgccctcgcgccccggcggcccgcggcggcgtgtcacgtgcctcaccgctgctcctcctcctgctagtgccctccccgcgcttggccgccgcagccccgcgccggcagctcggggactgggagcgctcgcgcctcgggtatgccgcacccccggccgggcgcagcggcgcgtggaggtgctcaccgggcgtcgccgctgccgccggcgcccttccccagtaccacggcccggcgcctgcactcgtttcctgcaggagagagctaagcttgtctgctggatccctgcagctggagcgcaaaaggagagatttcacctcttctgggagcaggaaactctacttcgacactcatgccttagtgtgcttactggaagacaatgaatctcactctttcatccaggctggagtgcagtggcacagtcttggcctactgcaacccccacctcccggtttcaagcgatcctcccacctcatcctcctgagtagctgggattacaggcatgcaccaccacacctggataatttttctgtatttttactagagacggggtttcaccatgttggccaggctggtctcaaactgctgacctcaagtgatccacccaccttggcctcctaaagtgctgggattacaggcgtgaaccactgtgtccagttgccaaacctaattatgtttaaacatgaactctttttttaattaaaattttttaaaattttatttacattaaaatggagatgggatcactatgttgcccatgctggttctgaactcctgggctcaaagatcctcccgccttggtctcccagagtgttaggattacaggcgtgagccaccacacccagccagtgaactcttcttaataaaactttaaaatttggcaaaagtttagtttgagtttttaaaaactaggaagacagacgagaaaaaagaaaacagagtcagagctaaacaatgttaacattttgggtttgctactcaacaagcagaaatcattgtgtctgcattggtcaagatcctggaggccaacatggacatcgtctacaaagatatggtcaccaagatgcagcaggaaatcacttttcagcaagtaatgtctcagattgcgaatgtgaaaaaggatatgattattttggagaagagtgaattttcagccctcagagcagaaaatgagaaaataaaactcgaactacatcagttaaaacaacaagtaatggatgaagtgatcaaagtccgaacagataccaaattagacttcaacctagaaaagagcagagtaaaagaattgtattcattgaacgaaaagaagctgctggaattgagaacagaaatagtggcattgcatgcccagcaagatcgggcccttacccagacagacaggaagatcgaaactgaggttgctggcctcaaaaccatgcttgagtcacacaagcttgataatattaaatatttagcagggtctatatttacgtgcctaacagtagctctgggattttatcgcctgtggatctaataaagtgtctatttaaagtgaaaaaaaaaaaaaaaa

SEQ ID NO: 3790 - protein, 257 aa, Homo sapien
MDCGSVGGQRTQRLPGRQRLLFLPVGLSGRPGGSETSARRCPSALSDGLGALRPRAPAARGGVSRASPLLLLLLVPSPRLAAAAPRRQLGDWERSRLGYAAPPAGRSGAWRCSPGVAAAAGALPQYHGPAPALVSCRRELSLSAGSLQLERKRRDFTSSGSRKLYFDTHALVCLLEDNESHSFIQAGVQWHSLGLLQPPPPGFKRSSHLILLSSWDYRHAPPHLDNFSVFLLETGFHHVGQAGLKLLTSSDPPTLAS

SEQ ID NO: 3791 - DNA, 1552 bp, Homo sapien
atacttagagctagaggagaggcccctacacatgtccaccatcatccttcgggctcatttaacacttactatttctatactgtaaatggcaacaagattttccctacctcaacctgactttgagcaggagctgttgctggctaagcagcctgaacaattcacatgctcagaacagagcctactcgaccccctccctcccagagcagtcggccccagaagaaggagagacggttcaacgtgctcaaccaaatattctgcaaaaacaagaaagaagagcagagagcccatcagaaggatcccagcagggaccgatacagagaggaggacacctcagaagtcaatgacatcatcaccacctttgatagcatcgtgggtaccaactgccaagaacagcctggtgatcaggtggctatggttgaatttaagaagaaaacctcagacaattcaaaatatctcttaccagaaaagaaaccgctggcccgtaaggggcttccaccaatcagaacgcagagtctcccacccatcaccctgggcaataacttcctaacagcctcccatagggccacttcccatgcaggcctgagctctgctcctcatcatatggcccagcgatctcagaaaagtcgaagtgagcaggatttattaaataacagaactggctgccagatgttactagataacccctggaagagtgattctaatcaggtattttcctacaaagtttggactgtgtcttcttctgataagctgctggacagattgctcagtgtccggcctggtcaccaagaggtctccgtgccaccacaccttcgccatctacataatccatcatcaggacaaaattttcagcatctttccccaaacagacacaaaatcagggatcttcctttcactcggaacaacctagctcccctaccagatcaaaaatttctatctggagaacctctgcggacaaaccgagtgcttcctgcaattccaagtcaacgaagacacagcacagcagcagaagagagtgaacattctgccaaccccaccagtgatgaaaattaactgtgggccactcgctgcagaaatgtagatgaatatgtattttcaactctcaaaggacaagattactccagtttgtaagaacgaagaccaatttagtaagctgcattctataagccatcagttttataactcgaaattctttattccaaataaagatactccctaaataagcacttagaatatttgggtgtgcatattaagtctgtgaatttctgtgacttccacatgccaaaattaaaagacaaaatatgttatcagtaggaaaactgagctatgtttggtttgctttgtggcatgtgcactgtttttttgttattgttctttggttgtttttttgctgaatgattttatgttttgggaaaaaaagtacgctttgctgaataaaagcaaaaaacaaaacaaaaaaaaaaccacatcccagacaaacatgtcttcacatttattgtcattctaacttgaactaatgaaacctatttaaaaataaattcctatgatcagtcac

SEQ ID NO: 3792 - protein, 295 aa, Homo sapien
MLRTEPTRPPPSQSSRPQKKERRFNVLNQIFCKNKKEEQRAHQKDPSRDRYREEDTSEVNDIITTFDSIVGTNCQEQPGDQVAMVEFKKKTSDNSKYLLPEKKPLARKGLPPIRTQSLPPITLGNNFLTASHRATSHAGLSSAPHHMAQRSQKSRSEQDLLNNRTGCQMLLDNPWKSDSNQVFSYKVWTVSSSDKLLDRLLSVRPGHQEVSVPPHLRHLHNPSSGQNFQHLSPNRHKIRDLPFTRNNLAPLPDQKFLSGEPLRTNRVLPAIPSQRRHSTAAEESEHSANPTSDEN

SEQ ID NO: 3793 - DNA, 1960 bp, Homo sapien
gccgtcatctctaagaaacaaccataccactgaatgctactgtgtacttacaaaccacactcatattcgtcacgtcatttcatcttcacccccacctccaaatgaggcttgaaatgagatgagatgttcctccctcccctttcaaccatggacctcacactgtggacttcctcttagagcctctgagttaggtacccaagccaaggcacaatgtccctgccccccataagactgcccagcccctatggctctgatcggctggtacagctagcagccaggctccggccagcactctgtgatactctgatcaccgtagggagccaggagttccccgcccacagcctggtgctagcaggtgtcagccagcagctgggccgcaggggccagtgggctctgggagaaggcatcagcccttctacctttgcccagctcctgaactttgtgtatggggagagtgtagagctgcagcctggagagctaaggccccttcaggaggcggccagggccttgggagtgcagtccctggaagaggcatgctggagggctcgaggggacagggctaaaaagccagatccaggcctgaagaaacatcaggaggagccagagaaaccctcaaggaatcctgagagagaactgggggaccctggagagaagcagaaaccagaacaggtttctagaactggtgggagagaacaggagatgttgcacaagcactcgccaccaagaggcagacccgagatggcaggagcaacgcaggaggctcagcaggaacagaccaggtcaaaggagaaacgcctccaagcccctgttggccaaaggggagcagatgggaagcatggagtgctcacgtggttgagggaaaatccagggggctctgaggaaagtctgcgcaagctccctggcccccttcccccagcaggctccctgcaaaccagcgtcacccctaggccctcgtgggctgaggccccttggttggtggggggccagcctgccctgtggagcatcctgctgatgccgcccagatatggcattcccttctaccatagcacccccaccactggagcctggcaggaggtctggcgggaacagaggatcccactgtccctaaatgcccccaaagggctctggagccagaaccagttggcctcctccagccctaccccaggttccctcccccagggccccgcacagctcagccctggggagatggaagagtctgatcaggggcacacaggcgcacttgcaacctgtgcgggtcatgaggacaaggcaggctgcccacctcgcccgcaccctcccccggcccctcctgctcggtctcggccctatgcgtgctctgtctgtggaaagaggttttcactcaagcatcagatggagacgcactaccgagtccacacaggagagaagcccttctcctgtagcctttgtcctcagcgctcccgggacttctcggccatgaccaagcacctgcggacacacggggccgctccgtaccgctgctccctgtgcggggccggctgtcccagcctggcctccatgcaggcgcacatgcgcggtcactcgcccagccaactcccgcccggatggaccatccgctccaccttcctctactcctcctcgaggccgtctcggccctcgacctctccctgttgtccttcttcctccaccacctgacggggtgtcggtagcgtcttagccaagagtccaattaaagaacgaaaagcgggccggctcggcttctgacctggcaccgctgctacggcggcctagcaaattccgccccagaagcgccccaggaagggcgccgagtgccctctcctggacgatcgcgggtcgcagaagcccaggccagcgagccctacagagtgaggacactgaagtgtgcaggagcgaaggttaacagtaggggagattgtcgatctcatcaccataataaagagtttcctgtgccctcccttca

SEQ ID NO: 3794 - protein, 487 aa, Homo sapien
MSLPPIRLPSPYGSDRLVQLAARLRPALCDTLITVGSQEFPAHSLVLAGVSQQLGRRGQWALGEGISPSTFAQLLNFVYGESVELQPGELRPLQEAARALGVQSLEEACWRARGDRAKKPDPGLKKHQEEPEKPSRNPERELGDPGEKQKPEQVSRTGGREQEMLHKHSPPRGRPEMAGATQEAQQEQTRSKEKRLQAPVGQRGADGKHGVLTWLRENPGGSEESLRKLPGPLPPAGSLQTSVTPRPSWAEAPWLVGGQPALWSILLMPPRYGIPFYHSTPTTGAWQEVWREQRIPLSLNAPKGLWSQNQLASSSPTPGSLPQGPAQLSPGEMEESDQGHTGALATCAGHEDKAGCPPRPHPPPAPPARSRPYACSVCGKRFSLKHQMETHYRVHTGEKPFSCSLCPQRSRDFSAMTKHLRTHGAAPYRCSLCGAGCPSLASMQAHMRGHSPSQLPPGWTIRSTFLYSSSRPSRPSTSPCCPSSSTT

SEQ ID NO: 3795 - DNA, 850 bp, Homo sapien
gaattccggcaaaatgcatgacagtaacaatgtggagaaagacattacaccatctgaattgcctgcaaacccaggttgtctgcattcaaaagagcattctattaaagctaccttaatttggcgcttatttttcttaatcatgtttctgacaatcatagtgtgtggaatggttgctgctttaagcgcaataagagctaactgccatcaagagccatcagtatgtcttcaagctgcatgcccagaaagctggattggttttcaaagaaagtgtttctatttttctgatgacaccaagaactggacatcaagtcagaggttttgtgactcacaagatgctgatcttgctcaggttgaaagcttccaggaactgaatttcctgttgagatataaaggcccatctgatcactggattgggctgagcagagaacaaggccaaccatggaaatggataaatggtactgaatggacaagacagtttcctatcctgggagcaggagagtgtgcctatttgaatgacaaaggtgccagtagtgccaggcactacacagagaggaagtggatttgttccaaatcagatatacatgtctagatgttacagcaaagccccaactaatctttagaagcatattggaactgataactccattttaaaatgagcaaagaatttatttcttataccaacaggtatatgaaaatatgctcaatatcactaataactgggaaaatacaaatcaaaatcatagtaaaatattacctgttttcatggtgctaatattacctgttctcccactgctaatgacatacccgagaatgagtaatttataaataaaagagatttaattgaaaaaaa

SEQ ID NO: 3796 - protein, 191 aa, Homo sapien
MHDSNNVEKDITPSELPANPGCLHSKEHSIKATLIWRLFFLIMFLTIIVCGMVAALSAIRANCHQEPSVCLQAACPESWIGFQRKCFYFSDDTKNWTSSQRFCDSQDADLAQVESFQELNFLLRYKGPSDHWIGLSREQGQPWKWINGTEWTRQFPILGAGECAYLNDKGASSARHYTERKWICSKSDIHV

SEQ ID NO: 3797 - DNA, 1880 bp, Homo sapien
atgaggtgaactgcattaacctaaagtgctgcagagataaacttaaagcaggaagcaacataccatgaatgtactgcaagggaacacatttgtgtcatgtgaagagacatgacaaaaacagccctccttaaattatttgtggcaatagtgatcacattcattttaattttgccggaatatttcaagacaccgaaagaaagaacattggagctatcatgtctggaagtgtgtttgcaatctaattttacctattcactctcctccttaaatttttcttttgtgacttttctgcaaccagtaagggaaactcagattatcatgagaatctttctaaatccctccaattttcgtaacttcaccaggacttgccaagacatcacaggtgaatttaaaatgtgctcctcgtgtttggtttgtgagtctaaaggaaacatggattttatttctcaggaacaaacatcaaaagttcttatcaggagaggatcaatggaagtgaaagcaaatgattttcattcaccttgtcagcactttaacttcagtgtagctcctctggttgaccacttggaggaatataacactacctgtcatctaaaaaaccacactggaagatcaacaatcatggaggatgagccaagcaaggagaaatcgataaactacacttgtagaatcatggaatacccgaatgattgtatacacatttctttgcacctggagatggatataaaaaatatcacttgttccatgaagatcacttggtatattttagttctattagtttttatatttttgatcatcctcactatccgcaaaatacttgaaggccagagaagagtgcaaaagtggcagagtcatagagacaaacctacatctgttctcttaagaggaagtgattcggagaaactgagagcattgaatgtgcaggttctttcagcagagaccacgcagaggctgcctttggatcaagtccaggaagtgcttcccccaattccagaactataagttacttccacagtgcatcagtgagatcaatatacacgaatatccccgggcaagttggaccgagccctttgaagaatactcagaagtttattttgtgaatgagtagactggaaaatgtttgtgtccagctgaggatgcacagttggaaagcaggaggaatgctgactggttgatgaaaactagcttaagagcattcattcgctccatgagatcaagggaacaagagtgtttgcaagaagccattatgagtcatggaaaaaaagatgatgaaacccatggaaacagcaagagaattcccactctctctcttcttaaaaaaaatctatcattatacagcacagagtggagccaagtttttaattttgaggaaccaaaaacaggatcaaatatgaaaaccctttcttttattgggccacattgtagatgctgatttgataattgtttcctatgcagatagattatttttatttcacagattatttaaaagggaagagggcctggttgtttatttatatgtttgtttgcatttatgaatcttgctgccttttagcaccaggatgtttttaaaaaaattcaaagaggccaggcgcagtggctcatgcctgtaatcccagcactttgggattctgaggtgggaggatcatgaggtcaagggatcgagaccatcctggccaacatggtgaaaccctgtctctactaaaaacacaaaaattagctgggtgtggtggtgcgcgcctgtagtcccagctcctcaggaggctgaggcaggagaatcacttgaacctggcaggcagagtttgcagtgaaccaagatcacgccactgcattacagcctggtgcagagcaagactctgtctcaaaaaaaaaaaaaaaaaaaaaaa

SEQ ID NO: 3798 - protein, 296 aa, Homo sapien
MTKTALLKLFVAIVITFILILPEYFKTPKERTLELSCLEVCLQSNFTYSLSSLNFSFVTFLQPVRETQIIMRIFLNPSNFRNFTRTCQDITGEFKMCSSCLVCESKGNMDFISQEQTSKVLIRRGSMEVKANDFHSPCQHFNFSVAPLVDHLEEYNTTCHLKNHTGRSTIMEDEPSKEKSINYTCRIMEYPNDCIHISLHLEMDIKNITCSMKITWYILVLLVFIFLIILTIRKILEGQRRVQKWQSHRDKPTSVLLRGSDSEKLRALNVQVLSAETTQRLPLDQVQEVLPPIPEL

SEQ ID NO: 3799 - DNA, 2135 bp, Homo sapien
gcagggggacagttgttagtgttgcactctgaaagagctgttggttaattcctgccttcctcccttttcccagtccacttcgactgctcagggaagtacagatgtcgctcatcctttaagtgtatcgagctgatagctcgatgtgacggagtctcggattgcaaagacggggaggacgagtaccgctgtgtccgggtgggtggtcagaatgccgtgctccaggtgttcacagctgcttcgtggaagaccatgtgctccgatgactggaagggtcactacgcaaatgttgcctgtgcccaactgggtttcccaagctatgtgagttcagataacctcagagtgagctcgctggaggggcagttccgggaggagtttgtgtccatcgatcacctcttgccagatgacaaggtgactgcattacaccactcagtatatgtgagggagggatgtgcctctggccacgtggttaccttgcagtgcacagcctgtggtcatagaaggggctacagctcacgcatcgtgggtggaaacatgtccttgctctcgcagtggccctggcaggccagccttcagttccagggctaccacctgtgcgggggctctgtcatcacgcccctgtggatcatcactgctgcacactgtgtttatgacttgtacctccccaagtcatggaccatccaggtgggtctagtttccctgttggacaatccagccccatcccacttggtggagaagattgtctaccacagcaagtacaagccaaagaggctgggcaatgacatcgcccttatgaagctggccgggccactcacgttcaatgaaatgatccagcctgtgtgcctgcccaactctgaagagaacttccccgatggaaaagtgtgctggacgtcaggatggggggccacagaggatggagcaggtgacgcctcccctgtcctgaaccacgcggccgtccctttgatttccaacaagatctgcaaccacagggacgtgtacggtggcatcatctccccctccatgctctgcgcgggctacctgacgggtggcgtggacagctgccagggggacagcggggggcccctggtgtgtcaagagaggaggctgtggaagttagtgggagcgaccagctttggcatcggctgcgcagaggtgaacaagcctggggtgtacacccgtgtcacctccttcctggactggatccacgagcagatggagagagacctaaaaacctgaagaggaaggggacaagtagccacctgagttcctgaggtgatgaagacagcccgatcctcccctggactcccgtgtaggaacctgcacacgagcagacacccttggagctctgagttccggcaccagtagcaggcccgaaagaggcacccttccatctgattccagcacaaccttcaagctgctttttgttttttgtttttttgaggtggagtctcgctctgttgcccaggctggagtgcagtggcgaaatccctgctcactgcagcctccgcttccctggttcaagcgattctcttgcctcagcttccccagtagctgggaccacaggtgcccgccaccacacccaactaatttttgtatttttagtagagacagggtttcaccatgttggccaggctgctctcaaacccctgacctcaaatgatgtgcctgcttcagcctcccacagtgctgggattacaggcatgggccaccacgcctagcctcacgctcctttctgatcttcactaagaacaaaagaagcagcaacttgcaagggcggcctttcccactggtccatctggttttctctccaggggtcttgcaaaattcctgacgagataagcagttatgtgacctcacgtgcaaagccaccaacagccactcagaaaagacgcaccagcccagaagtgcagaactgcagtcactgcacgttttcatctctagggaccagaaccaaacccaccctttctacttccaagacttattttcacatgtggggaggttaatctaggaatgactcgtttaaggcctattttcatgatttctttgtagcatttggtgcttgacgtattattgtcctttgattccaaataatatgtttccttccctcaaaaaaaaaaaaaaaaaaaaaaaaaaaaaaa

SEQ ID NO: 3800 - protein, 344 aa, Homo sapien
MGENDPPAVEAPFSFRSLFGLDDLKISPVAPDADAVAAQILSLLPLKFFPIIVIGIIALILALAIGLGIHFDCSGKYRCRSSFKCIELIARCDGVSDCKDGEDEYRCVRVGGQNAVLQVFTAASWKTMCSDDWKGHYANVACAQLGFPSYVSSDNLRVSSLEGQFREEFVSIDHLLPDDKVTALHHSVYVREGCASGHVVTLQCTACGHRRGYSSRIVGGNMSLLSQWPWQASLQFQGYHLCGGSVITPLWIITAAHCVYDLYLPKSWTIQVGLVSLLDNPAPSHLVEKIVYHSKYKPKRLGNDIALMKLAGPLTFNGTSGSLCGSAALPLFQEDLQLLIEAFL

SEQ ID NO: 3801 - DNA, 2021 bp, Homo sapien
agccatatgggggatacgccagcaacagacgccggccgccaagatctgcatccctaggccacgctaagaccctggggaagagcgcaggagcccgggagaagggctggaaggaggggactggacgtgcggagaattcccccctaaaaggcagaagcccccgcccccaccctcgagctccgctcgggcagagcgcctgcctgcctgccgctgctgcgggcgcccacctcgcccagccatgccaggcccggccaccgacgcggggaagatccctttctgcgacgccaaggaagaaatccgtgccgggctcgaaagctctgagggcggcggcggcccggagaggccaggcgcgcgcgggcagcggcagaacatcgtctggaggaatgtcgtcctgatgagcttgctccacttgggggccgtgtactccctggtgctcatccccaaagccaagccactcactctgctctgggcctacttctgcctcctcctggccgctctgggtgtgacagctggtgcccatcgcttgtggagccacaggtcctaccgggccaagctgcctctgaggatatttctggctgtcgccaactccatggctttccagaatgacatcttcgagcggtccagggaccaccgagcccaccacaagtactcagagacggatgctgacccccacaatgcccgccggggcttcttcttctcccatattgggtggctgtttgttcgcaagcatcgagatgttattgagaaggggagaaagcttgacgtcactgacctgcttgctgatcctgtggtccggatccagagaaatacacagcacatccagaaagaaggaagagctctcaatcaagaggcagcgtgtgagatgcttcgtgagtggcatcaagggcatatattgaaagtcacccttcccggattacacattttagctttgttacatactcattgtaaccactccgaaaagtgctgcttgatgctgcgtgctctttctgtgtccctggaggtattctgaaggtcagaagagagatatacaacagcgaggcttggtgataacgtatagaataacagacggggactccacacccaggccttttttaacggtgtgaagcatagacagagctgcagtctgtgctaacattaggttatttattgattcaatcagttgacacaaggaggcagctacggggaggtaaaatatggtcctaaaatcaaaaagatttcagttttgtcattctgtctctgagattctatttccacatctagagcagggtaataatgatacctaccttacaaaattattgggagaatacattagttaatatatgtgaaagtatggaggagatgtgcaataaatatttgtgttattaactacacatacagcactctataggagatattccatttataaaaactttaggttctaaaaacctgtacacgttgattatttttgtaagtcaaaagtgattaagaggagtttaagctatcatttccagatgtatttctataaataaaaacataagtatattcagttgatttggggtggagagttccatagatgtctgttaggtccgcttggtccagagctgagttcaagtcctgaatatccttgttaattttctgtcttgttgatctgtctaatattgacagtggggtattaaagtctcccactattattatatgggagtctaagtctccttgtaggtctctaagaacttgctttatgaatctgggtgctcctgtattaggtgcatacatatttaggatagttagctcttcttgctgcattgatcccattaccattatataatgcccttctttgtcttttttgatctttgttggtttaaagtctgttttattagagactaggattgcaacccctgctatttttttttttttttttgcttgataaatattcctgtatccctttattttgagcctatatgtgtctttgcacgtgaggtgggtctcctgaatacagcacaccgatgggttttgactctaaaaaaaaaaaaaaaaaaaaaaaaaaa

SEQ ID NO: 3802 - protein, 256 aa, Homo sapien
MPGPATDAGKIPFCDAKEEIRAGLESSEGGGGPERPGARGQRQNIVWRNVVLMSLLHLGAVYSLVLIPKAKPLTLLWAYFCLLLAALGVTAGAHRLWSHRSYRAKLPLRIFLAVANSMAFQNDIFERSRDHRAHHKYSETDADPHNARRGFFFSHIGWLFVRKHRDVIEKGRKLDVTDLLADPVVRIQRNTQHIQKEGRALNQEAACEMLREWHQGHILKVTLPGLHILALLHTHCNHSEKCCLMLRALSVSLEVF

SEQ ID NO: 3803 - DNA, 2115 bp, Homo sapien
tccaaagaatgttgctacagagacacaattgaaaggtggtcagcattctcaagctgctccagtgaaatggattttccaagataatctacagccttttacgccatctcttgttcctgttaagtcttcaaataatgtggcttcaaagattttaaaaacttttgtagataggaaaaatttgggagataatactataaatatgccaccattgagtaccatcgatcctagtgggacgcgatccaaaaatatgcctattaaagataatgctttggttatgtttaatgggaaagtctatctgttggctaaaaaggggacagatgttctgccatcacaaattgaccaacagaattctgtttctcctgatactccagtaagaaaagacacgttacagacagtgagttcaagtccagtcacagaaatatccagagaggttgtaaatattgttttggctaaaagtaaatcttcccagatggagacaaaatcactttccaatacccagcttgcttccatggccaatctaagggcagagaagaataaagtggagaaaccatctccttctaccacaaatccacatatgaaccaatccagtaactacttaaaacagagtaagactttattcacaaatccaatctttccagttggatttagtacaggacacaatgcccccagaaaagtaacagccgtcatttatgctagaaaaggaagtgtcctccagagcatagagaaaataagttcctctgttgatgcaacaactgttacttcacaacagtgtgttttcagagaccaagaaccaaagatccataatgagatggcatcaacatcagataaaggtgcccaaggaagaaatgacaagaaagattctcaaggaagaagtaataaggcattacatctgaagagtgatgctgaatttaaaaagatatttggccttactaaggatttgagagtgtgccttactcgaattcctgaccatttgacctctggagaaggtttcgattcctttagcagtttggtaaagagtggtacttacaaagagacagagtttatggtgaaggaaggagagagaaaacagcagaattttgataagaaaagaaaagcaaaaactaataagaagatggatcacataaagaagagaaaaacagagaatgcttataacgcaatcataaatggggaagctaatgtcaccggttcccaactccagtattttaccaacttcagatgtgtcacaacataacattctcacgagtcacagcaaaaccagacaagaaaagagaactgagatggaatactatacccatgagaagcaagagaaaggcactttgaattcaaatgcagcttatgaacaaagtcatttcttcaataaaaattataccgaagatattttcccagtgacaccaccggagttagaagaaaccattcgagatgaaaaaataagaagacttaagcaggtgctgagagagaaagaagcagctcttgaagaaatgcgtaagaagatgcaccaaaaataaaatctcctgtaaagacttcagtgaaatagctgttttttaaaatatacttcagcattaataagttaattgtaggtgtgttctgaaagtgtctttgaatatgaagcttgttttttcatcagtcgattgtacaactttaaggaatacagaaaaggttgattcacatatgacttgtgaataatttacatggggtatctatacctttgtcttagatacctttttttggaaggataaattttatatttttctattattttaactagaattctccaagtttgaatatttgggcagggtttttgttattgtttgtatctttacctaaattgctcaggcattattccagcagtagatagtgactgtgtattactgaaattttacaattcaagagaggaaatcagctccaaacttagcttttccagtggatttgtatatgtacttgctttatctctttacccttaaaatgatgataccttgtattcaccattgttttttttaatgtcgtgaaataatatgtattatggcaacattatttaaacattcaaacatttctcaagaatgagcaacatttgtaactttacaatgtaattttatataatccaaaggtattttagaattc

SEQ ID NO: 3804 - protein, 343 aa, Homo sapien
MPPLSTIDPSGTRSKNMPIKDNALVMFNGKVYLLAKKGTDVLPSQIDQQNSVSPDTPVRKDTLQTVSSSPVTEISREVVNIVLAKSKSSQMETKSLSNTQLASMANLRAEKNKVEKPSPSTTNPHMNQSSNYLKQSKTLFTNPIFPVGFSTGHNAPRKVTAVIYARKGSVLQSIEKISSSVDATTVTSQQCVFRDQEPKIHNEMASTSDKGAQGRNDKKDSQGRSNKALHLKSDAEFKKIFGLTKDLRVCLTRIPDHLTSGEGFDSFSSLVKSGTYKETEFMVKEGERKQQNFDKKRKAKTNKKMDHIKKRKTENAYNAIINGEANVTGSQLQYFTNFRCVTT

SEQ ID NO: 3805 - DNA, 2076 bp, Homo sapien
tctctcactcggtgccgctgcctaggggctgtagaggtcgcgccgctcctgctggggcctgcccacgccaaggacctgcctctgtcgcctcctcttctattgcccagtttccccagccagaacatcccctgaagatggcagaggagagcagctgtaccagggattgcatgtccttcagcgtgctcaactgggatcaggttagccggctgcatgaggtcctcactgaagttgtacctatccacggacgaggcaactttccaaccttggagataactctgaaggacatcgtccagaccgtccgcagtcggctggaggaggcaggcatcaaagtgcacgacgtccggctgaatggctccgcagctggccacgttttggtcaaagataatggcttgggctgcaaagacctggacctaatcttccatgtggctcttccaacagaggcagaatttcagctggttagagatgtggttctgtgttcccttctgaacttcctgccagagggtgtgaacaagctcaaaatcagtccagtcactctgaaggaggcatatgtgcagaagctagtgaaggtttgcacggacactgtccgctggagcctgatctccctctccaacaagaacgggaagaacgtggagctgaagtttgtcgactccattcggcgtcagtttgagttcagtgtggactctttccaaatcatcctggattctttgcttttcttctatgactgttccaataatcccatctctgagcacttccaccccaccgtgattggggagagcatgtacggggactttgaggaagcttttgaccatctgcagaacagactgatcgccaccaagaacccagaagaaatcagaggcgggggacttctcaagtacagcaaccttcttgtgcgggacttcaggcccacagaccaggaagaaatcaaaactctagagcgctacatgtgctccaggttcttcatcgacttcccggacatccttgaacagcagaggaagttggagacttaccttcaaaaccacttcgctgaagaagagagaagcaagtacgactacctcatgatccttcgcagggtggtgaacgagagcaccgtgtgtctcatggggcatgaacgcaggcagactctgaacctcatctccctcctggccttgcgtgtgctggcggaacaaaacatcatccccagtgccaccaacgtcacctgttactaccagccggccccttacgtcagtgatggcaacttcagcaactactacgttgcccatcctccagtcacctacagccagccttaccctacctggctgccctgtaactaaccttgagacctgagggtttccacagtgggaaccccaatagggctagggctctcaggtaggggagcctccttctagatgtaggcatttggcttttaaaggggaactcagctctgattctgcttttttttttttttttcctttgtgtacccattggaatgggtctacagtgtatcatgagccaaccctcaaaggacccgtattacagtgccacgttggaaaacgctacaggaagcatgacctatccacatctttccaagatagacactaacatgtcatgtcccaaacattagcacgtgggggttgagctctgtgcagtaatcgagattgggagaatttgggcagcgcgtgagaagtgctaagctacttgttttctcacttgagcccgggtaggctgtgttggccctcacttgggattctcagcagttacatgaaagttgtgctgataatctcttctcttgtaccaattttagtcaggcagaaaatggtaaacatgagggtgctcttgtgacttaatttttgttcaagggactaaattgcttatgtttattccctgtcagcggagtggagaatgtcattcatcaataaaccaaagccaatagctggagaattgagatctggttgaaagtggtttatggtttacatgctgtactatcctgaggaattgcgagatattgctgaggggaaaaaaaaatgaccttttcttgaaatgtaacttgaaaacaaaataaaatgtggaacataaaaaaaaaaaaaaaaaaaaaaaaaa

SEQ ID NO: 3806 - protein, 391 aa, Homo sapien
MAEESSCTRDCMSFSVLNWDQVSRLHEVLTEVVPIHGRGNFPTLEITLKDIVQTVRSRLEEAGIKVHDVRLNGSAAGHVLVKDNGLGCKDLDLIFHVALPTEAEFQLVRDVVLCSLLNFLPEGVNKLKISPVTLKEAYVQKLVKVCTDTVRWSLISLSNKNGKNVELKFVDSIRRQFEFSVDSFQIILDSLLFFYDCSNNPISEHFHPTVIGESMYGDFEEAFDHLQNRLIATKNPEEIRGGGLLKYSNLLVRDFRPTDQEEIKTLERYMCSRFFIDFPDILEQQRKLETYLQNHFAEEERSKYDYLMILRRVVNESTVCLMGHERRQTLNLISLLALRVLAEQNIIPSATNVTCYYQPAPYVSDGNFSNYYVAHPPVTYSQPYPTWLPCN

SEQ ID NO: 3807 - DNA, 1635 bp, Homo sapien
gggggtggcggggacgcgagtggcggccgcggggccccggacaagggtccgcagagctgcagccttcgagggccagccctctccgagtccggggctgggtcccaccagtgacaaggcggcagccccgcgcacaccaaagagaaagcggctgtggcggcagcggcagccccagccatgctgtgttatgtgacgaggccggacgcggtgctgatggaggtggaggtggaggcgaaagccaacggcgaggactgcctcaaccaggtgtgcaggcgactgggaatcatagaagttgactattttggactgcaatttacgggtagcaaaggtgaaagtttatggctaaacctgagaaaccggatctcccagcagatggatgggctagccccttacaggcttaaacttagagtcaagttcttcgtggagcctcatctcatcttacaggagcagactaggcatatctttttcttgcacatcaaggaggccctcttggcaggccacctcttgtgttccccagagcaggcagtggaactcagtgccctcctggcccagaccaagtttggagactacaaccagaacactgccaagtataactatgaggagctctgtgccaaggagctctcctctgccaccttgaacagcattgttgcaaaacataaggagttggaggggaccagccaggcttcagctgaataccaagttttgcagattgtgtcggcaatggaaaactatggcatagaatggcattctgtgcgggatagcgaagggcagagactgctcattggggttggacctgaaggaatctcaatttgtaaagatgactttagcccaattaataggatagcttatcctgtggtgcagatggccacccagtcaggaaagaatgtatatttgacggtcaccaaggaatctgggaacagcatcgtgctcttgtttaaaatgatcagcaccagggcggccagcgggctctaccgagcgataacagagacgcacgcattctacaggtgtgacacagtgaccagcgccgtgatgatgcagtatagccgtgacttgaagggccacttggcatctctgtttctgaatgaaaacattaaccttggcaagaaatatgtctttgatattaaaagaacatcaaaggaggtgtatgaccatgccaggagggctctgtacaatgctggcgttgtggacctcgtttcaagaagcaaccagagcccttcacactcgcctctgaagtcctcagaaagcagcatgaactgcagcagctgcgagggcctcagctgccagcagacccgggtgctgcaggagaagctacgcaagctgaaggaagccatgctgtgcatggtgtgctgcgaggaggagatcaactccaccttctgtccctgtggccacactgtgtgctgtgagagctgcgccgcccagctacagtcatgtcccgtctgcaggtcgcgtgtggagcatgtccagcacgtctatctgccaacgcacaccagtcttctcaatctgactgtaatctaatctgttgtgcttttgttggacttggcatgtttccatgaactgcactattataaactattaaaatgatagatgttggagaaagtaattattccaacacccatctgcccatgcgatgttaaaaaa

SEQ ID NO: 3808 - protein, 445 aa, Homo sapien
MLCYVTRPDAVLMEVEVEAKANGEDCLNQVCRRLGIIEVDYFGLQFTGSKGESLWLNLRNRISQQMDGLAPYRLKLRVKFFVEPHLILQEQTRHIFFLHIKEALLAGHLLCSPEQAVELSALLAQTKFGDYNQNTAKYNYEELCAKELSSATLNSIVAKHKELEGTSQASAEYQVLQIVSAMENYGIEWHSVRDSEGQRLLIGVGPEGISICKDDFSPINRIAYPVVQMATQSGKNVYLTVTKESGNSIVLLFKMISTRAASGLYRAITETHAFYRCDTVTSAVMMQYSRDLKGHLASLFLNENINLGKKYVFDIKRTSKEVYDHARRALYNAGVVDLVSRSNQSPSHSPLKSSESSMNCSSCEGLSCQQTRVLQEKLRKLKEAMLCMVCCEEEINSTFCPCGHTVCCESCAAQLQSCPVCRSRVEHVQHVYLPTHTSLLNLTVI

SEQ ID NO: 3809 - DNA, 2216 bp, Homo sapien
ggaagctcagcagtgtccactgtcgccattccttggccatagaaaacaatgtatttgaattttgatgtaagcatagcaaattgaagatgaagatgacacgttgatttcttgtttgaaattaaccaagtcccgagaaaagaaagtgaatagtgttagcacgaggaggaaggaagaaatggagattagattggatactctttctgcatcactgggtagatccagcactttaaatgactgcaacttggaagataaattagcttggtatgaaggtgaagcttacatgtggcatcactggaagccttttcctgaaaaccctctctggacatgtcttgatttccaaatagcacaagttggaccctgggactactgctcctcttgtattcgccacacacgtctcaagtcttcctgctcagatatggatctcctacattcatggcgaagcagcagttttgggaatttcgatcgttttcggaataattctttatcaaaaccagatgattcaactgaggcacatgaaggagatcccacaaatggaagtggagaacaaagtaaaacttcaaataatggaggcggtttgggtaaaaaaatgagagctatttcatggacaatgaagaaaaaagtgggtaaaaagtacatcaaagccctttctgaggaaaaggatgaggaagatggagagaatgcccacccatatagaaacagtgaccctgtgattgggacccacacagagaaggtgtccctcaaagccagtgactccatggatagtctctacagtggacagagctcatcaagtggcataacaagctgttcagatggtacaagtaaccgggacagctttcgactggatgacgatggcccctattcaggaccattctgtggccgtgccagagtgcatacggatttcacgccaagtccctatgacactgactccctcaaaatcaagaaaggagacatcatagacattatttgcaaaacaccaatggggatgtggacaggaatgttgaacaataaagtgggaaacttcaaattcatttatgtggatgtcatctcagaagaggaagcagcccccaagaaaataaaggcaaaccgaaggagtaacagcaaaaaatccaagactctgcaggagttcctagagaggattcatctgcaggaatacacctcaacacttttgctcaatggttatgagactctagaagatttaaaagatataaaagagagtcacctcattgaattaaatattgaaaacccagatgacagaagaaggttactatcagctgctgaaaacttccttgaagaagaaattattcaagagcaagaaaatgaacctgagcccctatccttgagctcagacatctccttaaataagtcacagttagatgactgcccaagggactctggttgctatatctcatcaggaaattcagataatggcaaagaggatctggagtctgaaaatctgtctgacatggtacataagattattatcacagagccaagtgactgaacacgcattcccaactatatatctacagatgcattccattttaactcttcttgagctaaaacgtcaaataggagaggaagataagataaatatttgtaaataaaacctaaagtttaaatgttttaatctgaataattgtacataaaattttgtatctctaacattccaaattactgtcaataaaatatatatttattattttaaatgctatgtgttaatatttcacttgcttgtattagaaaggcaaaatgtaagactttggtatgtgtgacatatgctttatttggctttattttacaagtacagtatctgcaaaaaacaaagtaaccttttttcatacctgccagttttgaatttatatatgttattgaacaaatagtaatagaggattcgctgttgaaacaagttgtccaagcaatgttatattcatttttatacttattgggaaagtgtgagttaatattggacacattttatcctgatccacagtggagttttagtaattatattttgttgatttcttcattttgttttctggtataaaagtagagataatgtgtagtcacttctgatttagtgaaaccaattgtaataattgtggaaatgttttgtctttaagtgtaaatattttaaaatttgacataccctaatgttaataataaaaagaactatttgcataaaaaaaaaaaaaaaaaaaaaaaaaaaaaaaaaaaaa

SEQ ID NO: 3810 - protein, 441 aa, Homo sapien
MEIRLDTLSASLGRSSTLNDCNLEDKLAWYEGEAYMWHHWKPFPENPLWTCLDFQIAQVGPWDYCSSCIRHTRLKSSCSDMDLLHSWRSSSFGNFDRFRNNSLSKPDDSTEAHEGDPTNGSGEQSKTSNNGGGLGKKMRAISWTMKKKVGKKYIKALSEEKDEEDGENAHPYRNSDPVIGTHTEKVSLKASDSMDSLYSGQSSSSGITSCSDGTSNRDSFRLDDDGPYSGPFCGRARVHTDFTPSPYDTDSLKIKKGDIIDIICKTPMGMWTGMLNNKVGNFKFIYVDVISEEEAAPKKIKANRRSNSKKSKTLQEFLERIHLQEYTSTLLLNGYETLEDLKDIKESHLIELNIENPDDRRRLLSAAENFLEEEIIQEQENEPEPLSLSSDISLNKSQLDDCPRDSGCYISSGNSDNGKEDLESENLSDMVHKIIITEPSD

SEQ ID NO: 3811 - DNA, 980 bp, Homo sapien
ggggcagacgtgggacgggaaggacggctgccgggactggcgcgcggggacactgggccgacgcgtggagtagcggggagagcgggaagcctgagggggcggggccggcgcgaggccgtgggtgcggcacgaggatgccggcggcgggacagcgcccgtaggcagccccacgggcagggcgcgcgggcggggcggggcgggccgggccagaggagctcccggcatgtcgcaagggctcccggccgccggcagcgtcctgcagaggagcgtcgcggcgcccgggaaccagccgcagccgcagccgcagcagcagagccctgaggatgatgacaggaaggtccgaaggagagaaaaaaaccgagttgctgctcagagaagtcggaagaagcagacccagaaggctgacaagctccatgaggaatatgagagcctggagcaagaaaacaccatgctgcggagagagatcgggaagctgacagaggagctgaagcacctgacagaggcactgaaggagcacgagaagatgtgcccgctgctgctctgccctatgaactttgtgccagtgcctccccggccggaccctgtggccggctgcttgccccgatgaagccggggacactcctctgcccagcaaggagccttggtcattttcatacctgggaggaaggcttttccttcacaattgtatacagggggcacctgtggccaggcctcctcctgggagctccaggaccagccagctgtgttccctgcagactgggctcagcccgacatccaacaggcgccaaactcacagagcccttgtgcagatccagcatggaggccaccctcaggagtgacttctcatccaccctggcagctagtaggttctgctgttatgcagagccatttcctctagaatttggataataaagatgcttattgtctctcccttctccagttctgggaatttacaggcacaatacacttccttttcctgg

SEQ ID NO: 3812 - protein, 127 aa, Homo sapien
MSQGLPAAGSVLQRSVAAPGNQPQPQPQQQSPEDDDRKVRRREKNRVAAQRSRKKQTQKADKLHEEYESLEQENTMLRREIGKLTEELKHLTEALKEHEKMCPLLLCPMNFVPVPPRPDPVAGCLPR

SEQ ID NO: 3813 - DNA, 3760 bp, Homo sapien
gtgctgggccgcgggccgaaggagtcgccagggctgcgtaggcttgtggcgcgcccgcggagaggccggggctctgacgcccgctctgcggcttcggtgtttgaacaggccacagtccaggagcgcttacattcaggagctccgcgtagcacctgcccaaccaaactcagccctccgttaagatcctggttccatgccgcagtaggacagcaggcccaagtctgcacatcccagtgatgcaccatgccaatagtggataagttgaaggaggccctgaaacccggccgcaaggactcggctgatgatggagaactggggaagcttcttgcctcctctgccaagaaggtccttttacagaaaatcgagttcgagccagccagcaagagcttctcctaccagctggaggccttaaagagcaaatatgtgttgctcaaccccaaaacagagggagctagtcgccacaagagtggagatgacccaccggccaggagacggggcagtgagcacacgtatgagagctgtggtgacggagtcccagccccgcagaaagtgcttttccccacggagcgactgtctctgaggtgggagcgggtcttccgcgtgggcgcaggactccacaaccttggcaacacctgctttctcaatgccaccatccagtgcttgacctacacaccacctctagccaactacctgctctccaaggagcatgctcgcagctgccaccagggaagcttctgcatgctgtgtgtcatgcagaaccacattgtccaggccttcgccaacagcggcaacgccatcaagcccgtctccttcatccgagacctgaaaaagatagcccgacacttccgctttgggaaccaggaggacgcgcatgagttcctgcggtacaccatcgacgccatgcagaaagcctgcctgaatggctgtgccaagttggatcgtcaaacgcaggctactaccttggtccatcaaatttttggagggtatctcagatcacgcgtgaagtgctccgtgtgcaagagcgtctcggacacctacgacccctacttggacgtcgcgctggagatccggcaagctgcgaatattgtgcgtgctctggaactttttgtgaaagcagatgtcctgagtggagagaatgcctacatgtgtgctaaatgcaagaagaaggttccagccagcaagcgcttcaccatccacagaacatccaacgtcttaaccctttccctcaagcgttttgccaacttcagcggggggaagatcaccaaggatgtaggctatccggaattcctcaacatacgtccgtatatgtcccagaataatggtgatcctgtcatgtatggactctatgctgtcctggtgcactcgggctacagctgccatgccgggcactattactgctacgtgaaggcaagcaatggacagtggtaccagatgaatgattccttggtccattccagcaacgtcaaggtggttctgaaccagcaggcctacgtgctgttctatctgcgaattccaggctctaagaaaagtcccgagggcctcatctccaggacaggctcctcctcccttcccggccgcccgagtgtgattccagatcactccaagaagaacatcggcaatgggattatttcctccccactgactggaaagcgacaagactctgggacgatgaagaagccgcacaccactgaagagattggtgtgcccatatccaggaatggctccaccctgggcctgaagtcccagaacggctgcattcctccaaagctgccctcggggtccccttcccccaaactctcccagacacccacacacatgccaaccatcctagacgaccctggaaagaaggtgaagaagccagctcctccactgccaacgggcatgggctgaaggggaacgacgagagcgctggcctcgacaggaggggctccagcagctccagcccagagcactcggccagcagcgactccaccaaggccccccagacccccaggagtggagcggcccatctctgcgattctcaggaaacgaactgttccaccgctggccactccaaaacgccgccaagtggagcagattctaagacggtgaagctgaagtcccctgtcctgagcaacaccaccactgagcctgcaagcaccatgtctcctccaccagccaaaaaactggccctttctgccaagaaggccagcaccctgtggagggcgaccggcaatgacctccgtccacctcccccctcaccatcctccgacctcacccaccccatgaaaacctctcaccccgtcgttgcctccacttggcccgtccatagagccagggctgtgtcacctgctccccaatcatccagccgcctgcaaccccccttcagcccccaccccacattgctgtccagtacccccaagcccccagggacgtcagaaccacggagctgctcctccatctcgacggcgctgcctcaggtcaacgaggaccttgtgtcccttccacaccagttgccagaggccagtgagcccccccggagcccctctgagaagaggaaaaagacctttgtgggagagccgcagaggctgggctcagagacgtgccccccacagcacatcagggaggccactgcggctccccacgggaagaggaagaggaagaagaagaagcgcccggaggacacagctgccagcgccctgcaggaggggcagacacagagacagcctgggagccccatgtacaggagggagggccaggcacagctgcccgctgtcagacggcaggaagatggcacacagccacaggtgaatggccagcaggtgggatgtgttacggacggccaccacgcgagcagcaggaagcggaggaggaaaggagcagaaggtcttggtgaagaaggcggcctgcaccaggacccacttcggcacagctgctctcccatgggtgatggtgatccagaggccatggaagagtctccaaggaaaaagaaaaaaagaaagcaggagacacagcgggcagtagaagaggatgggcatctcaaatgcccaaggagtgccaagccccaagatgctgttgtccccgagtccagcagctgcgcaccatccgcgaatggctggtgtcctggggaccgcatggggctgagccaggcccctcctgtgtcttggaatggagagcgggagtctgatgtggtccaggaactgctcaaatactcatctgataaagcttacgggagaaaagttctgacctgggatggcaagatgtcggcggtcagtcaggatgctattgaagacagcagacaggcccggactgagaccgtggttgatgactgggacgaagagtttgaccgagggaaggaaaagaaaattaaaaaatttaagagagagaagaggagaaacttcaacgccttccagaaacttcagactcgacggaacttctggtctgtgactcacccagcaaaggctgccagcctcagctatcgccgctgactgtgcccctgtggaaggagatgatcaagcggtgctgattcacgagagtggaagcctccagagcttggggctttctggctgctcttcattgacctgtgtgttcccagcacacgaacagcgcccctaacggagatttgttcagcgactgaatatacacctgtaaacgagtagcatgtatacattgattttgattacaaatggttctgtattatataccaccgttctgactgcttttttcacttatagcttggaaattgtcttctgttggtaatacagaaatctgtttcagtcac

SEQ ID NO: 3814 - protein, 548 aa, Homo sapien
MPIVDKLKEALKPGRKDSADDGELGKLLASSAKKVLLQKIEFEPASKSFSYQLEALKSKYVLLNPKTEGASRHKSGDDPPARRRGSEHTYESCGDGVPAPQKVLFPTERLSLRWERVFRVGAGLHNLGNTCFLNATIQCLTYTPPLANYLLSKEHARSCHQGSFCMLCVMQNHIVQAFANSGNAIKPVSFIRDLKKIARHFRFGNQEDAHEFLRYTIDAMQKACLNGCAKLDRQTQATTLVHQIFGGYLRSRVKCSVCKSVSDTYDPYLDVALEIRQAANIVRALELFVKADVLSGENAYMCAKCKKKVPASKRFTIHRTSNVLTLSLKRFANFSGGKITKDVGYPEFLNIRPYMSQNNGDPVMYGLYAVLVHSGYSCHAGHYYCYVKASNGQWYQMNDSLVHSSNVKVVLNQQAYVLFYLRIPGSKKSPEGLISRTGSSSLPGRPSVIPDHSKKNIGNGIISSPLTGKRQDSGTMKKPHTTEEIGVPISRNGSTLGLKSQNGCIPPKLPSGSPSPKLSQTPTHMPTILDDPGKKVKKPAPPLPTGMG

SEQ ID NO: 3815 - DNA, 1696 bp, Homo sapien
agaacagacgtttgaacagagcaggcttctgaggtctccaaaatgcctgtcccagcctcctggccccatcctcctggtcctttcctgcttctgactctactgctgggacttacagaagtggcaggtgaggaggagctacagatgattcagcctgagaagctcctgttggtcacagttggaaagacagccactctgcactgcactgtgacctccctgcttcccgtgggacccgtcctgtggttcagaggagttggaccaggccgagaattaatctacaatcaaaaagaaggccacttccccagggtaacaacagtttcagacctcacaaagagaaacaacatggacttttccatccgcatcagtagcatcaccccagcagatgtcggcacatactactgtgtgaagtttcgaaaagggagccctgagaacgtggagtttaagtctggaccaggcactgagatggctttgggtgccaaaccctctgcccccgtggtattgggccctgcggcgaggaccacacctgagcatacagtgagtttcacctgtgagtcccatggcttctctcccagagacatcaccctgaaatggttcaaaaatgggaatgagctctcagacttccagaccaacgtggaccccacaggacagagtgtggcctacagcatccgcagcacagccagggtggtactggacccctgggacgttcgctctcaggtcatctgcgaggtggcccatgtcaccttgcagggggaccctcttcgtgggactgccaacttgtctgaggccatccgagttccacccaccttggaggttactcaacagcccatgagggcggggaaccaggtaaacgtcacctgccaggtgaggaagttctacccccagagcctacagctgacctggttggagaatggaaacgtgtgccagagagaaacagcctcgacccttacagagaacaaggatggtacctacaactggacaagctggttcctggtgaacatatctgaccaaagggatgatgtggtcctcacctgccaggtgaagcatgatgggcagctggcggtcagcaaacgccttgccctggaggtcacagtccaccagaaggaccagagctcagatgctacccctggcccggcatcatctcttactgcgctgctcctcatagctgtcctcctgggccccatctatgtcccctggaagcagaagacctgactctccttccttcctcccctgccacgtgggaccctcatctctgctgcctccttcctttcctgagaggctcagcttgagagaatgagccagtgagaagcttctctagacttggctccaaacatctcccctcccaagacatctgcctgcccacaggctcctgttgctccttcacacagacctggatgccccagagcaaggtcttcattcatggtcctgagcaggggccatgggattgggctctgggcactgacttaacggcacctccctagaaggcgagaaacatgccaaatctaaacacaccaggactcccatccatcgccttgagactgaccgtaaaccacagacgctctccaggttctcaagagttatcctgccttccagattcctgcctatcccaactccccagccttgttgaggttctctattgcctcttgaatacaaatgcactcccaaagtggttttaagaaaataaaaagattatccttccaaa

SEQ ID NO: 3816 - protein, 354 aa, Homo sapien
MIQPEKLLLVTVGKTATLHCTVTSLLPVGPVLWFRGVGPGRELIYNQKEGHFPRVTTVSDLTKRNNMDFSIRISSITPADVGTYYCVKFRKGSPENVEFKSGPGTEMALGAKPSAPVVLGPAARTTPEHTVSFTCESHGFSPRDITLKWFKNGNELSDFQTNVDPTGQSVAYSIRSTARVVLDPWDVRSQVICEVAHVTLQGDPLRGTANLSEAIRVPPTLEVTQQPMRAGNQVNVTCQVRKFYPQSLQLTWLENGNVCQRETASTLTENKDGTYNWTSWFLVNISDQRDDVVLTCQVKHDGQLAVSKRLALEVTVHQKDQSSDATPGPASSLTALLLIAVLLGPIYVPWKQKT

SEQ ID NO: 3817 - DNA, 2747 bp, Homo sapien
attgattaaaaagagattgccctgcaaggtaaatcagttaaaaccaacctctcctgccctgagtggataggtagggttagggttgccagatgtcacgaagttacaggatgctcagttttaaggtatatcccttatactataagggttatagtaaaaaatattcattatgtgaaattcaaatataactgggtatcaggtattctatgtggcaaccctaggtaggggagcacaggttaggcaagcgattagaagatttgcagcctccaaagtttctgcacctcgatgggacactagaacaggaaggctcctgggcctttctggctctgggaatgaagcgtggaaaaccctccttaggcgggcgcagtgcttcaagtagccaagctctgacttccgagggaagaaaggaggccatgggcctctgccagagccatgctctgcactctggggtcagcagagttcaaaacgacctgcaacgtctggcgcttagctcctaaagaggtctccagtccagcgccgacggccagcggctagaggccgtccgcccgactccaagatggcgcccgccacagctgccaggtgttaagatggcggcgcggggccgcgcccgcgctcccaggctctcctcccccagccttcctccggctggcagcacgactcgcgtagccgtgcgccgattgcctctcggcctgggcaatggtcccggctgccggtcgacgaccgccccgcgtcatgcggctcctcggctggtggcaagtattgctgtgggtgctgggacttcccgtccgcggcgtggaggttgcagaggaaagtggtcgcttatggtcggaggagcagcctgctcaccctctccaggtgggggctgtgtacctgggtgaggaggagctcctgcatgacccgatgggccaggacagggcagcagaagaggccaatgcggtgctggggctgggcacccaaggcgatcacatggtgatgctgtctgtgattcctggggaagctgaggacaaagtgagttcagagcctagcggcgtcacctgtggtgctggaggagcggaggactcaaggtgcaacgtccgagagagccttttctctctggatggcgctggagcacacttccctgacagagaagaggagtattacacagagccagaagtggcggaatctgacgcagccccgacagaggactccaataacactgaaagtctgaaatccccaaaggtgaactgtgaggagagaaacattacaggattagaaaatttcactctgaaaattttaaatatgtcacaggaccttatggattttctgaacccaaacggtagtgactgtactctagtcctgttttacaccccgtggtgccgcttttctgccagtttggcccctcactttaactctctgccccgggcatttccagctcttcactttttggcactggatgcatctcagcacagcagcctttctaccaggtttggcaccgtagctgttcctaatattttattatttcaaggagctaaaccaatggccagatttaatcatacagatcgaacactggaaacactgaaaatcttcatttttaatcagacaggtatagaagccaagaagaatgtggtggtaactcaagccgaccaaataggccctcttcccagcactttgataaaaagtgtggactggttgcttgtattttccttattctttttaattagttttattatgtatgctaccattcgaactgagagtattcggtggctaattccaggacaagagcaggaacatgtggagtagtgatggtctgaaagaagttggaaagaggaacttcaatccttcgtttcagaaattagtgctacagtttcatacattttctccagtgacgtgttgacttgaaacttcaggcagattaaaagaatcatttgttgaacaactgaatgtataaaaaaaattataaactggtgttttaactagtattgcaataagcaaatgcaaaaatattcaatagatgcactattcttgtttttactgcatgaacgtaatccagtatttggaaagtaatccagtttgaaatgtgaagatgtattccggcagaatagtgagtagaatgacatgcttactatacagaaggcaaaaataggactctcaggtaatagtttaaggaaacccttgattccttatatatgtttaagaaggttagctttctgtttctttgcagtttttcttctagagtccatagcaggaaagtatgtaaccagaattggttagtgtgaccccctcaagtagcaagtgatggaaaataagagtcaaataccttgatgtttgtgatctctaactcaaaaaatttgaagtgttttaagttgtttctgggtaagggagatgttaggagaaaggaaatgctgtaactaaagctcaattattatcagttctatgctaacgtatacattttaatcatagttacctaagcagcatgcattaattgaaccttaaaatgttcccagcaggctggtctcaaactgctgacttcaggtgatccacccgcctcggcctcccaaggtgttgggattgcaggtgtgagccactgcgcctggcctaaacaaactttttgaaaagctgtttctaaaagattccttaaattcagatatgacagctaattacctcatcataaattacttttatactaattgtttccagggttttagagtagttgaatgtttatttcacaaggcaccctaaattctatagaaataaaacctcagatgagtctc

SEQ ID NO: 3818 - protein, 360 aa, Homo sapien
MVPAAGRRPPRVMRLLGWWQVLLWVLGLPVRGVEVAEESGRLWSEEQPAHPLQVGAVYLGEEELLHDPMGQDRAAEEANAVLGLGTQGDHMVMLSVIPGEAEDKVSSEPSGVTCGAGGAEDSRCNVRESLFSLDGAGAHFPDREEEYYTEPEVAESDAAPTEDSNNTESLKSPKVNCEERNITGLENFTLKILNMSQDLMDFLNPNGSDCTLVLFYTPWCRFSASLAPHFNSLPRAFPALHFLALDASQHSSLSTRFGTVAVPNILLFQGAKPMARFNHTDRTLETLKIFIFNQTGIEAKKNVVVTQADQIGPLPSTLIKSVDWLLVFSLFFLISFIMYATIRTESIRWLIPGQEQEHVE

SEQ ID NO: 3819 - DNA, 1775 bp, Homo sapien
aagaccgtcccggatggcctcggggactgccagtgtgtggaggtgagctccgggattgccggcattcccgcttctgctggttgcttcatgctgcaggctgcggccgtcagccctcgctcgcattggtggcgctgaggtgccggggcagcaagtgacatgtcgtcgggcctccgcgccgctgacttcccccgctggaagcgccacatctcggagcaactgaggcgccgggaccggctgcagagacaggcgttcgaggagatcatcctgcagtataacaaattgctggaaaagtcagatcttcattcagtgttggcccagaaactacaggctgaaaagcatgacgtaccaaacaggcacgagataagtcccggacatgatggcacatggaatgacaatcagctacaagaaatggcccaactgaggattaagcaccaagaggaactgactgaattacacaagaaacgtggggagttagctcaactggtgattgacctgaataaccaaatgcagcggaaggacagggagatgcagaaagagcttgcagaagcagcaaaggaacctctaccagtcgaacaggatgatgacattgaggtcattgtggatgaaacttctgatcacacagaagagacctctcctgtgcgagccatcagcagagcagccactaagcgactctcgcagcctgctggaggccttctggattctgtcactaatatctttgggagacgctctgtctcttccttcccagtcccccaggacaatgtggatactcatcctggttctggtaaagaagtgagggtaccagctactgccttgtgtgtcttcgatgcacatgatggggaagtcaacgctgtgcagttcagtccaggttcccggttactggccactggaggcatggaccgcagggttaagctttgggaagtatttggagaaaaatgtgagttcaagggttccctatctggcagtaatgcaggaattacaagcattgaatttgatagtgctggatcttacctcttagcagcttcaaatgattttgcaagccgaatctggactgtggatgattatcgattacgggtaagacccagttaagaaagttagtgcaatctccaaacttcatgtggtgttatcaaggcacaaactggcaggtgcttaattaggggactttgttttcccaaaaatcatgcttgattcaccctgcccttcctttcctccttggggaaatctgtgtttccactttatactctttgtccaaaactcagtttcaaaatatttgcaatgggaccctcacatttgcatgaaaaccttggaatactcttcataaggactaaatactttggtagatagcaattttggcttaatggcacagaacttagcaacagcatgtgaattgtgattcctgtgggctctaaaacctaattacctaaagtgggatatagaagtacaaatggatgtatcatagggataagacaattctgaaacaaaaactccaagctgagaaagaggggacaggtgtcagagcagggagaaatgattggatgttgaggaaagctgcatttgaaccaaaacttgccaagaattctcttggcatctgacagagagaccaaaacttggttgtatcatttttgattggggcagggggcggagggcgaagcatgtaacttaatttgcagacattttttttccccataagcctgaaggaatcatcacataagcttattaaatacaagctattgaaagatataatggaggatgaatttggcattagtaggcattttact

SEQ ID NO: 3820 - protein, 309 aa, Homo sapien
MSSGLRAADFPRWKRHISEQLRRRDRLQRQAFEEIILQYNKLLEKSDLHSVLAQKLQAEKHDVPNRHEISPGHDGTWNDNQLQEMAQLRIKHQEELTELHKKRGELAQLVIDLNNQMQRKDREMQKELAEAAKEPLPVEQDDDIEVIVDETSDHTEETSPVRAISRAATKRLSQPAGGLLDSVTNIFGRRSVSSFPVPQDNVDTHPGSGKEVRVPATALCVFDAHDGEVNAVQFSPGSRLLATGGMDRRVKLWEVFGEKCEFKGSLSGSNAGITSIEFDSAGSYLLAASNDFASRIWTVDDYRLRVRPS

SEQ ID NO: 3821 - DNA, 1256 bp, Homo sapien
cgggaatccctgcagctgagcctgtctctcacgggaccgggaagctggagagagccccaaccctgcccgctggggccgagctccctgctcctgcagcagtcccatgccccacactctgagtctgccctatccacagctgctgggcctctctgtggccaccatggtgactcttacctacttcggggcccactttgctgtcatccgccgagcgtccctggagaagaacccgtaccaggctgtgcaccaatgggccttctctgcggggttgagcctggtgggcctcctgactctgggagccgtgctgagcgctgcagccaccgtgagggaggcccagggcctcatggcagggggcttcctgtgcttctccctggcgttctgcgcacaggtgcaggtggtgttctggagactccacagccccacccaggtggaggacgccatgctggacacctacgacctggtatatgagcaggcgatgaaaggtacgtcccacgtccggcggcaggagctggcggccatccaggacgtgtttctgtgctgtgggaagaagtctcctttcagccgtctggggagcacagaggctgacctgtgtcagggagaggaggcggcgagagaggactgccttcagggcatccggagcttcctgaggacacaccagcaggtcgcctccagcctgaccagcatcggcctggccctcacggtgtccgccttgctcttcagctccttcctgtggtttgccatccgctgtggctgcagcttggaccgcaagggcaaatacaccctgaccccacgagcatgtggccgccagccccaggagcccagcctcttgagatgctcccagggtggacccacacattgtctccactccgaagcagttgctattggtccaagaggatgctcgggtagtcttcggtggctgcaggagagcgatgctgcgcctctgcccctctcctgccacctggctgcccacagagctctccagggcagaagtcgcggtgggctcagtgggtgccctgagcggggtctctcagactgacgtcaggccttggtgggctgcactctcacctggaggctccggggaagcatctgcctccaggaccattcaggctgttgacaagtcaactcctcatggctgtaggactgaggttcccaagtccttgtccctggtcctgtggtccctccaccttcaaaccagcaatggtgcattgagcaaattgtggtcaaatatacatcacatcaaatttaccatcttaaaaaaa

SEQ ID NO: 3822 - protein, 124 aa, Homo sapien
MVTLTYFGAHFAVIRRASLEKNPYQAVHQWAFSAGLSLVGLLTLGAVLSAAATVREAQGLMAGGFLCFSLAFCAQVQVVFWRLHSPTQVEDAMLDTYDLVYEQAMKVSVLWEEVSFQPSGEHRG

SEQ ID NO: 3823 - DNA, 1244 bp, Homo sapien
agagatggggacggaggccacagagcaggtttcctggggccattactctggggatgaagaggacgcatactcggctgagccactgccggagctttgctacaaggccgatgtccaggccttcagccgggccttccaacccagtgtctccctgaccgtggctgcgctgggtctggccggcaatggcctggtcctggccacccacctggcagcccgacgcgcagcgcgctcgcccacctctgcccacctgctccagctggccctggccgacctcttgctggccctgactctgcccttcgcggcagcaggggctcttcagggctggagtctgggaagtgccacctgccgcaccatctctggcctctactcggcctccttccacgccggcttcctcttcctggcctgtatcagcgccgaccgctacgtggccatcgcgcgagcgctcccagccgggccgcggccctccactcccggccgcgcacacttggtctccgtcatcgtgtggctgctgtcactgctcctggcgctgcctgcgctgctcttcagccaggatgggcagcgggaaggccaacgacgctgtcgcctcatcttccccgagggcctcacgcagacggtgaagggggcgagcgccgtggcgcaggtggccctgggcttcgcgctgccgctgggcgtcatggtagcctgctacgcgcttctgggccgcacgctgctggccgccagggggcccgagcgccggcgtgcgctgcgcgtcgtggtggctctggtggcggccttcgtggtgctgcagctgccctacagcctcgccctgctgctggatactgccgatctactggctgcgcgcgagcggagctgccctgccagcaaacgcaaggatgtcgcactgctggtgaccagcggcttggccctcgcccgctgtggcctcaatcccgttctctacgccttcctgggcctgcgcttccgccaggacctgcggaggctgctacggggtgggagctcgccctcagggcctcaaccccgccgcggctgcccccgccggccccgcctttcttcctgctcagctcccacggagacccacagtctctcctgggacaactagggctgcgaatctagaggagggggcaggctgagggtcgtgggaaaggggagtaggtgggggaacactgagaaagaggcagggacctaaagggactacctctgtgccttgccacattaaattgataacatggaaatgaaaaaaaaaaaaaaaa

SEQ ID NO: 3824 - protein, 362 aa, Homo sapien
MGTEATEQVSWGHYSGDEEDAYSAEPLPELCYKADVQAFSRAFQPSVSLTVAALGLAGNGLVLATHLAARRAARSPTSAHLLQLALADLLLALTLPFAAAGALQGWSLGSATCRTISGLYSASFHAGFLFLACISADRYVAIARALPAGPRPSTPGRAHLVSVIVWLLSLLLALPALLFSQDGQREGQRRCRLIFPEGLTQTVKGASAVAQVALGFALPLGVMVACYALLGRTLLAARGPERRRALRVVVALVAAFVVLQLPYSLALLLDTADLLAARERSCPASKRKDVALLVTSGLALARCGLNPVLYAFLGLRFRQDLRRLLRGGSSPSGPQPRRGCPRRPRLSSCSAPTETHSLSWDN

SEQ ID NO: 3825 - DNA, 2444 bp, Homo sapien
ggctccgggggtggcggtcggacagtgtctagcacgctcagtccgggcttggggccccgcggcggagaaggaggtagagggggcggcggcggcggcggcggtggtggcggcaccatgtttcttcactcagttaatctctggaacctggcgttttatgtcttcatggtctttctggcaaccctggggctgtgggatgtcttcttcggcttcgaggagaataagtgcagtatgagctacatgtttgagtacccggagtatcagaaaatagaacttccaaagaaactggcaaaacgctatcccgcatatgagttgtatctttatggagagggatcctatgctgaagaacacaaaattctccctttgacgggtattccagttctctttcttcctggtaatgctggaagttataagcaagttcgttctattggctccattgcacttagaaaagcagaggacattgacttcaagtaccactttgacttctttagtgtgaacttcaatgaagaactggtggctttgtatggtggaagtcttcagaagcagaccaagtttgtacatgaatgtattaaaacaattctcaaactctataagggtcaagaatttgctccaaaaagtgtggcaataattggtcattctatgggtggccttgttgcaagagcattgcttacactgaaaaattttaagcatgatctgataaatcttcttattacacaagccacacctcatgttgctcctgtgatgccattagatcgtttcattacagatttttatacgactgtaaacaactattggattctaaatgctcgacacataaatttaaccacactttctgtagctggaggattccgggattaccaagttcgttcaggattgacttttctaccaaaattaagccatcataccagtgccttatctgttgtgagttcagcagtgcctaagacctgggtctcaacagaccacctctccattgtgtggtgtaaacaattgcagttgactacagttcgagcattctttgatcttattggtgctgatactaaacaaataactcaaaattccaagaagaaactgtcagttttgtatcaccactttataagacacccatcaaaacattttgaggaaaatccagctataatttctgacttaacagggacatctatgtgggttctagtaaaagtgtccaaatggacctatgtagcttacaacgaatctgagaagatatattttacatttcctcttgaaaatcatagaaaaatctacactcatgtctattgtcagagcactatgctggatacaaatagttggatttttgcttgcataaacagcacttctatgtgcctgcaaggggttgatttatcatggaaagctgaactgctgccaacaattaagtatctgacattaagacttcaagactatccatctttgtctcatcttgttgtttatgtaccatctgttcgtggaagtaagtttgttgtagattgtgaattctttaaaaaagagaaaagatacatacagcttcctgtaactcatcttttttcctttggattgtcttcaaggaaagtggtgttaaatacaaatggcctatactacaatctagagcttctgaactttggacagatataccaagcttttaaaatcaacgtggtaagcaagtgctcagcagtcaaagaagaaataaccagtatctatagacttcatattccttggtcttatgaagattcactaaccattgcacaggctccatcttccacagaaatttctctgaaactccatattgctcaaccagaaaacaatacccatgtggcattatttaaaatgtacacgtcatcagactgtcggtacgaggtgacagttaagacttccttttcacaaatacttggacaggttgttgcttagaatatgctaccatgttggataaagaagccaaaccatacaaagttgatccttttgtaattatcattaagtttctgttggggtaagttttattatctgtgataatgattttaattgtgttttacatgtaacattatatttggttccataatgcaatataaattttcatacagatttggcagttgacttgtttcattaaatgaggtttttttttttctcttaggcaaaggtctaataagtatatcaatgtctacttcaatagtatcatttcaaaagtaattattcactttatgtatatcagtctaaacttagactgcctttaatgtttgtaaataggtgtatatggtccatgatctgtgagtatcctagattcaaacgcaaatcattacagggtattgatgaaacagtgcctctctgatcacttttaaaagtatattttagacctctctaccctagttaacattccattcttaatttagtcacattttcagatttttggttaagcatcaatatgtagatctttttttccatcattacaactaacttggctttct

SEQ ID NO: 3826 - protein, 592 aa, Homo sapien
MFLHSVNLWNLAFYVFMVFLATLGLWDVFFGFEENKCSMSYMFEYPEYQKIELPKKLAKRYPAYELYLYGEGSYAEEHKILPLTGIPVLFLPGNAGSYKQVRSIGSIALRKAEDIDFKYHFDFFSVNFNEELVALYGGSLQKQTKFVHECIKTILKLYKGQEFAPKSVAIIGHSMGGLVARALLTLKNFKHDLINLLITQATPHVAPVMPLDRFITDFYTTVNNYWILNARHINLTTLSVAGGFRDYQVRSGLTFLPKLSHHTSALSVVSSAVPKTWVSTDHLSIVWCKQLQLTTVRAFFDLIGADTKQITQNSKKKLSVLYHHFIRHPSKHFEENPAIISDLTGTSMWVLVKVSKWTYVAYNESEKIYFTFPLENHRKIYTHVYCQSTMLDTNSWIFACINSTSMCLQGVDLSWKAELLPTIKYLTLRLQDYPSLSHLVVYVPSVRGSKFVVDCEFFKKEKRYIQLPVTHLFSFGLSSRKVVLNTNGLYYNLELLNFGQIYQAFKINVVSKCSAVKEEITSIYRLHIPWSYEDSLTIAQAPSSTEISLKLHIAQPENNTHVALFKMYTSSDCRYEVTVKTSFSQILGQVVA

SEQ ID NO: 3827 - DNA, 1543 bp, Homo sapien
ggaaaaaaaaaaaaaaaaaaaaaaaaaaaaaaaaaaaaaaaaaatctcactcatttgttcatatattggtctctgaggtcccttctaggctctgacaactggaaactctgaaaatagacatattgatgtctttgactgttggaaaccttgcagagcaagaatttgtaaccattgcacgtcactaccgtgtgcctgagggcacatgttcagatatggatttcttaatcgcactggcccacgaaaagttcaagaaaaatatgtttgagaatttcgacactttcatttattcctgtgtgtatgaagatcgagaaaaaaaaaatgtattacccaccaaagacattaaaaggctgtgcaaatcctccagattacctttgagtgatgatcttctagaatccttattgtcaaggtttgaagacagtgaaaaacaaatagattataagtcatttttctctgccctgaactggagaaagaatccagcgcctgaattgcaaccagcatcataccttaaagagagatgtgaagatgtttggcttggtatgccatcacctattcctgcgaaatacattgactactggacctttttgaaggacgcgtttggcttagaggaggaataaccatgccagttttggtcaattctctatgatttacttctctcattttgccacatttactttagtagatataatttcattaaaaacaaaaaagaaacaaggtttatattaaatggaaatccataaaccacaattaatcctattttgtcatgttagttttacagaacatcatgttacattgccgacgtactgttactatttaaaatgccatcttaaaacatgttgaatatttttattatatgtatggtttattaataccaaaaaatcttctgataatttttgatccaacataatttgattcattactatatgaacagaaaatgacttttgaaggttatacatgacaatacaaaatcaaattatatcacagcaataagttgtgattctattaaacatttttgaaacctttttgacacgtttattacttacataattaagttttgtagcaacccacctcatcaaaataattcttaaacctctctagagtaaatatatttatcttttgaacttagtaaagctatgggaagaaaaagaacctccaacacacacacacacacacacacacacgcacgtgcacacacactggaaacatatgcagtatttatatttgtaatgcccttttttctatctaaagtcagcttgttagcctaggaatatatgcatgtgtgtataattatagtttgaccaaaactttattatgtctaaaatatttacaaatgtgaaagctgaagattttgagatttttgttttttttttggtttgttttacacacacatcccacgcgccccaccctagaggtttaaatattcagaaactacaacatttttcccctgcatttttctagttctatttttatttttcttcagcagaactcttgtcatgtagtgtacatttgattaaaacccatagccatgtaaaaaaaaaaaaaaaaa

SEQ ID NO: 3828 - protein, 162 aa, Homo sapien
MSLTVGNLAEQEFVTIARHYRVPEGTCSDMDFLIALAHEKFKKNMFENFDTFIYSCVYEDREKKNVLPTKDIKRLCKSSRLPLSDDLLESLLSRFEDSEKQIDYKSFFSALNWRKNPAPELQPASYLKERCEDVWLGMPSPIPAKYIDYWTFLKDAFGLEEE

SEQ ID NO: 3829 - DNA, 1242 bp, Homo sapien
atttcatgttatacttaataaaacaaaacatacctgtatacacacacattcactcacattgaagatgcaagatgaagaaagatacatgacattgaatgtacagtcaaagaaaaggagttctgcccaaacatctcaacttacatttaaagattattcagtgacgttgcactggtataaaatcttactgggaatatctggaaccgtgaatggtattctcactttgactttgatctccttgatcctgttggtttctcagggagtattgctaaaatgccaaaaaggaagttgttcaaatgccactcagtatgaggacactggagatctaaaagtgaataatggcacaagaagaaatataagtaataaggacctttgtgcttcgagatctgcagaccagacagtactatgccaatcagaatggctcaaataccaagggaagtgttattggttctctaatgagatgaaaagctggagtgacagttatgtgtattgtttggaaagaaaatctcatctactaatcatacatgaccaacttgaaatggcttttatacagaaaaacctaagacaattaaactacgtatggattgggcttaactttacctccttgaaaatgacatggacttgggtggatggttctccaatagattcaaagatattcttcataaagggaccagctaaagaaaacagctgtgctgccattaaggaaagcaaaattttctctgaaacctgcagcagtgttttcaaatggatttgtcagtattagagtttgacaaaattcacagtgaaataatcaatgatcactatttttggcctattagtttctaatattaatctccaggtgtaagattttaaagtgcaattaaatgccaaaatctcttctcccttctccctccatcatcgacactggtctagcctcagagtaacccctgttaacaaactaaaatgtacacttcaaaatttttacgtgatagtataaaccaatgtgacttcatgtgatcatatccaggatttttattcgtcgcttattttatgccaaatgtgatcaaattatgcctgtttttctgtatcttgcgttttaaattcttaataaggtcctaaacaaaatttcttatatttctaatggttgaattataatgtgggtttatacattttttacccttttgtcaaagagaattaactttgtttccaggcttttgctactcttcactcagctacaataaacatcctgaatgttttcttaaaaaa

SEQ ID NO: 3830 - protein, 231 aa, Homo sapien
MQDEERYMTLNVQSKKRSSAQTSQLTFKDYSVTLHWYKILLGISGTVNGILTLTLISLILLVSQGVLLKCQKGSCSNATQYEDTGDLKVNNGTRRNISNKDLCASRSADQTVLCQSEWLKYQGKCYWFSNEMKSWSDSYVYCLERKSHLLIIHDQLEMAFIQKNLRQLNYVWIGLNFTSLKMTWTWVDGSPIDSKIFFIKGPAKENSCAAIKESKIFSETCSSVFKWICQY

SEQ ID NO: 3831 - DNA, 4619 bp, Homo sapien
gaaggcgtcccggcatcggccaagattctacattgctcatctgggcatctgagcctccttcgaagtttcctgtcacaactgtcctcttgacagcatggatgaggaggaagacaatctgtctctgctgaccgcactgctggaagaaaatgagtcagccttggattgtaattcagaagaaaataacttcttgacgcgggaaaatggcgagcccgacgcatttgatgagctctttgatgccgacggcgacggtgaatcttatacagaagaggctgatgatggagaaacaggagagacaagagacgaaaaggaaaatctggccactctctttggagatatggaggacttaacagatgaagaagaagttcccgcatcacagtcaactgaaaatagggtcctccctgctcctgcccccaggcgagagaaaacgaatgaagagttgcaagaggaattaaggaatttgcaagagcaaatgaaggccttacaagagcagctaaaagtaacaacaattaaacagacagcaagcccagcccgtctgcaaaaatcccctgagaagtctccccggccacctcttaaggagaggagagttcagagaattcaggagtcaacatgcttttctgcggagcttgatgtccctgcgctaccaagaaccaagagggtggctcgaacaccaaagccttcacctccagatcccaaaagctcatcttcaaggatgacaagtgcaccctcccaacccctacagacgatttctcggaacaaacctagtgggataactagaggtcaaattgtggggaccccaggaagttctggggaaacgactcaacccatctgtgtggaagccttctctggtctgcggctcaggcggcctcgagtatcctccacagaaatgaacaagaaaatgaccggccgaaaactgatcagactgtctcagatcaaggaaaagatggccagagagaagctggaagaaatagattgggtgacatttggggttatattgaagaaggttacgccacagagtgtgaatagtggaaaaaccttcagcatatggaaactgaatgatcttcgtgacctgacacaatgtgtgtccttgttcttatttggagaagttcacaaagcgctctggaagacggagcaggggactgtcgtagggatcctcaatgccaaccccatgaagcccaaggatggttcagaggaggtgtgtttatctatcgatcatcctcagaaggtcttaattatgggtgaagctcttgacctgggaacctgtaaagccaagaagaagaatggagagccgtgcacgcagactgtgaatttgcgtgactgtgagtactgtcagtaccatgtccaggctcagtacaagaagctcagtgcaaagcgtgcggatctgcagtccaccttctctggaggacgaattccaaagaagtttgcccgcagaggcaccagcctcaaagaacggctgtgccaagatggcttttactacggaggggtttcttctgcctcgtatgcagcttcaattgcagcagctgtggctcctaagaagaagattcaaaccactctgagtaatctggttgttaagggcacaaacttgatcatccaggaaacacggcaaaaactcggaataccccagaagagcctgtcttgctctgaggagttcaaggaactgatggacctgccgacgtgtggagccaggaacttaaaacaacatttagccaaagcctcagcttcagggattatggggagcccaaaaccagccatcaagtccatctcggcctcagcactcttgaagcaacagaagcagcggatgttggagatgaggagaaggaaatcagaagaaatacagaagcgatttctgcagagctcaagtgaagttgagagcccagctgtgccatcttcatcaagacagccccctgctcagcctccacggacaggatccgagttccccaggctggagggagccccggccacaatgacgcccaagctggggcgaggtgtcttggaaggagatgatgttctcttttatgatgagtcaccaccaccaagaccaaaactgagtgctttagcagaagccaaaaagttagctgctatcaccaaattaagggcaaaaggccaggttcttacaaaaacaaacccaaacagcattaagaagaaacaaaaggaccctcaggacatcctggaggtgaaggaacgtgtagaaaaaaacaccatgttttcttctcaagctgaggatgaattggagcctgccaggaaaaaaaggagagaacaacttgcctatctggaatctgaggaatttcagaaaatcctaaaagcaaaatcaaaacacacaggcatcctgaaagaggccgaggctgagatgcaggagcgctactttgagccactggtgaaaaaagaacaaatggaagaaaagatgagaaacatcagagaagtgaagtgccgtgtcgtgacatgcaagacgtgcgcctatacccacttcaagctgctggagacctgcgtcagtgagcagcatgaataccactggcatgatggtgtgaagaggtttttcaaatgtccctgtggaaacagaagcatctccttggacagactcccgaacaagcactgcagtaactgtggcctctacaaatgggaacgggacggaatgctaaaggtatgccatttgcgtactaatttttgactccttttagtgacccatgctaataatgtggaaccatctcctattaaaatattttcatttttctaggaaaagactggtccaaagataggaggagaaactctgttaccaagaggagaagaacatgctaaatttctgaacagccttaaataacccgaacttcagacattttcccacagacttcctggcctcctgtgactctggaaagcaaaggattggctgtgtattgtccattgattcctgattgacgccgtcaaaaacaaatgcttgttaagcccataagctttgcctgcttactttctgccattgggttggtttgataccacatttaacattgacatttaagtggaaaaccaagttatcattgtcttttctaagctcagtgtggatgattgcattacttcattcactgaagtttttgcccaaaaattggaaggtaaacagagagctatgtttctgtatcttttggttatagagtgttcacttctttatcataacaaaattctagtgtttatacgaacacccagaggcaaaagaatttggcttaattctcactccaggtaagtagcttaacttctgggcttcagttttctcatctgtaaaatcaggaagattggactaagtgatcctgaaatgtattttttagcactggatttctacaaataataaaactttcccatctagataatgatgatcacatagtcttgatgtacggacattaaaagccagatttcttcattcaattctgttatctctgttttactctttgaaattgatcaagccactgaatcactttgcatttcagtttatatatagagagagaaagaaggctgtctgctcttacattattgtggagccctgtgatagaaatatgtaaaatctcatattattttttttttaatttttttattttttatgacagggtctcactatgtcaccctggctggagtgcagtagtgcgatcgcggcacactgcagccttggcttccctgggctcaagcagtcctcccacctcagtctcccaaatagctaggactacaggcgtgcgtgaccaagcccagctaatttttgcattttttgtagagatggggttttgccatgttgctcaggctggtctcaaactcctgagcactagcaatccacccacctctgtttccaaaaaaaaaaaaaaaatgaaaggtcaacccctatgcaaattaccacagcaaaggtttcattcaggagattcttccatctgggcaacctggttttccaaatatcatttgacctaagtgaatgttgatactagctaaagattgggtaaattggttgaattattgtattgaagcttgagctgtagctaaaagtaatttaggtttcccctaagatgttattatgttagggacataacacttttgggaggttgttgtgggagatggttgatttaggttttcaaaagctagaaataaaatttacatgccttagatttcataaaattctgctctaattgggtggaaggtgctgtatctaacttgtgttcctcctaaggttatgtcctaataactattcttttaggagtatacttctactttatagaaggttgcttttctttttaattttttctaacaaagaaaagaataaagtatttattaataagaaccagaaagcacttgaaactgatgtttttaatggctcatttagggtagatttatttatctcattaacttaaaacagctatgtgtatgaaataggtcacaacagaacttgaacaccaggttggtgtctgagcaatccctttcttatgggaaaaacaatgttcttgtttgaacagagggtatcattgcagtcagtattcacgtgtatattgttatataagttgtataatatgcttgtaaaggctgagggtgagctgtatctggatgcctttttacaatttgattttaacttttaaaataaatttaaaacataaaaaaaaaaaaaa

SEQ ID NO: 3832 - protein, 855 aa, Homo sapien
MDEEEDNLSLLTALLEENESALDCNSEENNFLTRENGEPDAFDELFDADGDGESYTEEADDGETGETRDEKENLATLFGDMEDLTDEEEVPASQSTENRVLPAPAPRREKTNEELQEELRNLQEQMKALQEQLKVTTIKQTASPARLQKSPEKSPRPPLKERRVQRIQESTCFSAELDVPALPRTKRVARTPKPSPPDPKSSSSRMTSAPSQPLQTISRNKPSGITRGQIVGTPGSSGETTQPICVEAFSGLRLRRPRVSSTEMNKKMTGRKLIRLSQIKEKMAREKLEEIDWVTFGVILKKVTPQSVNSGKTFSIWKLNDLRDLTQCVSLFLFGEVHKALWKTEQGTVVGILNANPMKPKDGSEEVCLSIDHPQKVLIMGEALDLGTCKAKKKNGEPCTQTVNLRDCEYCQYHVQAQYKKLSAKRADLQSTFSGGRIPKKFARRGTSLKERLCQDGFYYGGVSSASYAASIAAAVAPKKKIQTTLSNLVVKGTNLIIQETRQKLGIPQKSLSCSEEFKELMDLPTCGARNLKQHLAKASASGIMGSPKPAIKSISASALLKQQKQRMLEMRRRKSEEIQKRFLQSSSEVESPAVPSSSRQPPAQPPRTGSEFPRLEGAPATMTPKLGRGVLEGDDVLFYDESPPPRPKLSALAEAKKLAAITKLRAKGQVLTKTNPNSIKKKQKDPQDILEVKERVEKNTMFSSQAEDELEPARKKRREQLAYLESEEFQKILKAKSKHTGILKEAEAEMQERYFEPLVKKEQMEEKMRNIREVKCRVVTCKTCAYTHFKLLETCVSEQHEYHWHDGVKRFFKCPCGNRSISLDRLPNKHCSNCGLYKWERDGMLKVCHLRTNF

SEQ ID NO: 3833 - DNA, 2426 bp, Homo sapien
acgcggggattctgtgtaattcctatccacagtcacttctgttcatttttaatgaaaacctattgctgttattttctattatgagttaacggtgatgtgtgttttttaaattttgtatacttgctctcaccctaaaatataccttaagagacttttcccctgtttttctttctgctttccaagactccaggaaaaacagcttccatggcacattttgtacagggcacatctagaatgattgccgcagaaagttctacggagcataaagagtgtgctgaaccatcaacaagaaagaacttgatgaattctcttgaacaaaagataaggtgtttggaaaaacaaagaaaagagctcctggaagttaaccagcaatgggatcagcaatttagaagtatgaaagagttatatgaaagaaaggtagcagagctgaagacgaaactggacgccgcggaaagattcctcagcacgcgggagaaggatccgcatcagaggcagagaaaggacgacaggcagagagaggacgacaggcagcgcgacctgacccgggaccggctgcagcgggaggagaaggaaaaggaacgcctaaatgaagaattacatgaattgaaagaagagaataaacttttaaagggaaaaaatactcttgcgaacaaggaaaaggaacattacgaatgtgaaataaaacgcctcaataaggctcttcaggatgccttgaatatcaagtgttcattttccgaggactgtttgaggaagtctcgagtggaattctgccatgaggagatgagaacagaaatggaagttctgaagcagcaggtgcaaatatacgaagaagacttcaaaaaggaacgatcggatcgagagagacttaatcaagagaaagaggagctacagcaaattaatgaaacttcccaatcccagttgaacaggctgaattcccagataaaagcttgtcagatggagaaagaaaaactagaaaagcaattaaaacagatgtattgcccaccctgtaactgcggcttggttttccacctgcaagatccatgggtaccaacaggccctggagctgtgcagaagcaacgggagcacccaccagactgtcagtggtatgctcttgaccagcttccgccagatgtacaacacaaggcaaatggtttatcctcagtaaagaaagtccatccgtagaagtacacactaacagagagagacaacaggcaacgagggagcgtggctgaggaccctcttctttgtttatactgaggcttgtttctgccacaaaggcacatcatctaccctgttatttgtgcctggtcatgttttcctttggtatgaatacaggaaaaggcttctgacagctaagatcctgatcaaattggaggagccagttattatacaaccaaatacaacttccagtttccttgaaatgagacttggcagatggatgatgcacgactccctgaaaatctcttcagcatattgctgttggatgcacaaaaatgattctatgatttaggcaactcagtgtttgctgcagggatattgtatgttgatttaaagtgcatatgtgtgtgtgtgtgtgtgtgtgtgtgtgtgtttcctggggtaaaaatttctgcagttgtaaacgtttaacattgctcccattcttcttccacagggccttagttctttagctatttgactacatattgttgacctcagtgatcctaaacgtagaattgaagaggtgtatatacctcgttaaattaaataagtggttcaatctgaataagatggttaattggaagctattccttagacagatcatttctttaagatggtgagaaattgtgcgcctgcatcacaagacttgattatgaaagataaagtcttgggctgggtgcagtggctcatgcctataatcccagcactttgggaggctgaggcaggtggattgctttgaggccaggagttctagaccagcctggccagcatggtgaaaccccatctctactataaatacaaaaattagccaggctcgtggcacacacctataaacccagctactcaggaggcttgaggcgggaggatcacttgagcccagggaggcagaggttgctgtaagttgagatcgccactgcactccagcctgggaaatagagtgagcaagactcagtgccccctacccacccactccacaccaccaaaaaaaaaaaaaaaaaaaaaaggaagacaaagtcctgatgggatgatgatggctatatggctatgctgtgtccatatatacttacagaaatatttcagacatatggatttatagttaaatctgtgtttttccttcctatggatttgattaattttaatgaaaaacttaattctgactcctcaagccaattaaaatgaaaatggaatttatttaaaaaaaaaaaaaaaaaaaaaaaaaaaaaaaa

SEQ ID NO: 3834 - protein, 325 aa, Homo sapien
MAHFVQGTSRMIAAESSTEHKECAEPSTRKNLMNSLEQKIRCLEKQRKELLEVNQQWDQQFRSMKELYERKVAELKTKLDAAERFLSTREKDPHQRQRKDDRQREDDRQRDLTRDRLQREEKEKERLNEELHELKEENKLLKGKNTLANKEKEHYECEIKRLNKALQDALNIKCSFSEDCLRKSRVEFCHEEMRTEMEVLKQQVQIYEEDFKKERSDRERLNQEKEELQQINETSQSQLNRLNSQIKACQMEKEKLEKQLKQMYCPPCNCGLVFHLQDPWVPTGPGAVQKQREHPPDCQWYALDQLPPDVQHKANGLSSVKKVHP

SEQ ID NO: 3835 - DNA, 6792 bp, Homo sapien
ctccagtccgcatgctcagtagctgctgccggccgggctgcggggcggcgtccgctgcgcgcctacgggctgcggtggcggccgccgcggcacccggcagggcccgccagtccccgcttccctgctccagagccgccgcctgggccggggcagggcgggcccggggctcctccatgctgccagccgccgggctgcggagccgaccaagtggctcctgcgatggcggcggaagaggaggctgcggcgggaggtaaagtgttgagagaggagaaccagtgcattgctcctgtggtttccagccgcgtgagtccagggacaagaccaacagctatggggtctttcagctcacacatgacagagtttccacgaaaacgcaaaggaagtgattcagacccatcccaagtggaagatggtgaacaccaagttaaaatgaaggccttcagagaagctcatagccaaactgaaaagcggaggagagataaaatgaataacctgattgaagaactgtctgcaatgatccctcagtgcaaccccatggcgcgtaaactggacaaacttacagttttaagaatggctgttcaacacttgagatctttaaaaggcttgacaaattcttatgtgggaagtaattatagaccatcatttcttcaggataatgagctcagacatttaatccttaagactgcagaaggcttcttatttgtggttggatgtgaaagaggaaaaattctcttcgtttctaagtcagtctccaaaatacttaattatgatcaggctagtttgactggacaaagcttatttgacttcttacatccaaaagatgttgccaaagtaaaggaacaactttcttcttttgatatttcaccaagagaaaagctaatagatgccaaaactggtttgcaagttcacagtaatctccacgctggaaggacacgtgtgtattctggctcaagacgatcttttttctgtcggataaagagttgtaaaatctctgtcaaagaagagcatggatgcttacccaactcaaagaagaaagagcacagaaaattctatactatccattgcactggttacttgagaagctggcctccaaatattgttggaatggaagaagaaaggaacagtaagaaagacaacagtaattttacctgccttgtggccattggaagattacagccatatattgttccacagaacagtggagagattaatgtgaaaccaactgaatttataacccggtttgcagtgaatggaaaatttgtctatgtagatcaaagggcaacagcgattttaggatatctgcctcaggaacttttgggaacttcttgttatgaatattttcatcaagatgaccacaataatttgactgacaagcacaaagcagttctacagagtaaggagaaaatacttacagattcctacaaattcagagcaaaagatggctcttttgtaactttaaaaagccaatggtttagtttcacaaatccttggacaaaagaactggaatatattgtatctgtcaacactttagttttgggacatagtgagcctggagaagcatcatttttaccttgtagctctcaatcatcagaagaatcctctagacagtcctgtatgagtgtacctggaatgtctactggaacagtacttggtgctggtagtattggaacagatattgcaaatgaaattctggatttacagaggttacagtcttcttcataccttgatgattcgagtccaacaggtttaatgaaagatactcatactgtaaactgcaggagtatgtcaaataaggagttgtttccaccaagtccttctgaaatgggggagctagaggctaccaggcaaaaccagagtactgttgctgtccacagccatgagccactcctcagtgatggtgcacagttggatttcgatgccctatgtgacaatgatgacacagccatggctgcatttatgaattacttagaagcagaggggggcctgggagaccctggggacttcagtgacatccagtggaccctctagcctttgatttttaactccaaaaatgagaaacattttaaagcattatttacgaaaaaactgtctcaactattcttaagtactgtattgatattgtttgtatcttttattaatgttctaccactttttatagatttgcatcttcctgtcacagggatgtggggaaatacgttttcctcccaagagaaccaagtttattatagactcctttattcagtgaaatggcttataatccactagttgccatatttttgctaaaatatttctaaccaagaatactacttacatattgttttggctttgttttatttttgatgcagttttttttagttgaggtaatgtaatatattgatgttttcctttgtgtctaagattgatttataatagtaggtttgtataatttggaacattttccatgccttgcgaatttccttaattgaggatagggcttacacactttaagaaaacagtgagtacttgaacatttaaagggacagtgcaatttatagtcataatcacattgaatactgtatttgatctttggagacttaggcaagcacagagctgggatatttatgctcagttgagcactttaagatgaattttaagtgagatgatttcttgcttaaaactcagaaagtcaaaagagtttcagctttccttacagaaaaggaaggatcttgggccctagatcttggggattaacctctgcatataagatttactcttaataggccagacgtggtgctcacgcctgtaatcccagtactttgggaggctgagacgggcagatcacttgaggtcaggagttcaagaccagcctggccaatatggtgaaaccccgtttctactaaaaatacaaaaaaaattacccaggcactcactcttgaggtaactaaccaactcccacgataatgacagtccattcatgagcgcaaaggcctcatgacctaatggcacacacctgtaatcccaactgcttgggaggctgaggcgagaggattgcttgaacctgggaggcagaggttgcagtgagccgagatcgcaccactgcactccagtctgggcaacagagtgagacttcatctcaaaaaaagtaaaaaaaaagatttaatataatcactgaagatctctattatagatagattaggtttttgacattggaaacatacttagggatagatttgtcctaaaggaaaaaagtaggcccgggcagattaaatgtcttgtgtaaagtcacacattaaattcagtcacacattaaattcatagagttttaaatgtttaatgtatataaaccagtttctttatacacatttgggaaaacattggtctcacagattaaatgattaactaactgacccaggaactagttgtagctttctaagtaattaggcaattacagttattgcctgtaaccaaaggtaataaaacaaaatgacaagtacatgtttaaaattatgaggcaatgagaaataatttaaaaaccaattttctagttataatttaaaatttggagagcatttttaacagtaattaatccagaggtggctcaaattgagtataagaattaagattatttaaaatactgcatgtctaccttctcggggatcatactttataacactttctgcttcagtagctcttcatagcttgccaagtatgctcccatattttctctctcgtgcctcgcaaatgaaagtcagataggctgggaactcatggggcagccctcagacttcaatgtgggcttcaaatccagtttcctgttctatatggtgctacatctttccagaaaatttccctcagagcccctcgccaaaacaaagcattattttgaccctgcatgctatttctttagctgtaggtgatagattagaacttctgtcagacatgttaatgacaaacataccaacagacaataaccaaagcaaatgtttccttcaagtgtgaaatgtgcaggggctcgtgggcaaggatgtattggcacactgtcctcttgaactgatagtgtcccagcaatgttggaggttggcaccattcctggtccgacacttgaggacctgagagacatcaggtttagaatgagccaaagaaatcctacaagatggggagaattggtgtgcagcagcctaagtgttatagttaagtctaaagaagtatgaaagatcccctgtgttctctaaattgagcagaggggcctgcctaccaatatcactttttaggggactgaaccattgcaggttagacttggcttccaaagagtctgcctaagccaggggtggcagggtaggccatcatagctggatggcctcaaaagcagatgggggcagacttgccctcgtgatgccaggatttgagaggcagagtttctagagggagaccagtgctgcctctcacagtggcagttttttctctttgcaagaggaggggctgttcaattccatagaccagtgggcagatagccagttgaatactctgtgcatggtttgatcctttattagttcgctctaatatttttctgtagatccttttgtcctggactcaaaatctaatccatgcattgtatgataccgtagctctcctaaggtttgtgtttccttcaaaatgttttagttttcttcaactaaatttgatttttgctgttagaagtgacatatttttatggtatacactatgttccttttttctactgcgagtcaattttttgaattttcgtgagaaagaatatatctacaaattgcacgaaagtatcataaaaacagtactctagagcagcgctgtccaatagaaatataatctgagccacatgtataattttattttcttctagccacattaaagaagtaaaaagatacaagtagaactaattttaatgttttaattcagtatatccaaaatatcatttgaacatgtaattaatataaaattattaatgtgatattttacattcttttggtaatactagtcttcaaaatctggtatgtatcttacattgatagcacatctcactttgtactagccacattgcaagtgctcagtagccacatgtggctagtggctactgcactggacagcacagttctaggttccaccctaacacccaagtcctgtggattagaatcccagaatcagagctggaagtaaacatagagatcaaacctccttttaaaaatgaggacgctgaggcacagagtttaaatggcttgcatgaggtcatacagctaaattcagcctcaacagggtcttctgattccaggcactcttcccactccactacattactgtagtggtaattcttagggttaaaaaaagtgtagagtaggccgggcgcagtggctcatgcctgtaatcccagcactttgggaggccgaagtgggcggatcacgaggtcaggagatcgagaccatcctggccaacatggtgaaaccccgtctctactgaaaatacaaagcaaaattagccaggtgtggtggcgggcgcctgtggtcccagctgctctggaggctgaggcagaatggcgtgaacccaggaggcagagatggcagtgagccaagatcgcgccactgcaccccagcctgggcgacagagcgagactccatctcaaaaaaaaaaaaaaaaaaaaaagaaaagaaaagaaaagtctagagaacattatattaagtggttattattgaagtagaccaaagtttataccataaggatatttttccttaaataccatgtttgaagaacaattatttattgatccttgaatctgtaagatcaaataacaagtctctatccatgttaccaaatttaaccttttgaaaataataaactttaaaatatcagatgtgttattacaggatgatacttggaatcaagtgaaatgagttatatggtcatcactaaatttagaaatctattgtgaaacaaagacaaacaggaaagtacagaatagagacttttagtaaataaatggaatttaaaagaaagtgtttatttacagtgtcacgacagaaaaggatgtctttgttgtcatagtctttgagggatctccgtaaaatctggggcacaggtacaagaaatagccaatatttagttcccagaccatgtttagtagtgtccagtttcagatcatgctgccaagaggtatctccccctcaggtgggtcatcactgagccctggaattggagactcatacttgcccagcacaatgttacgggcagacaggccgacatctatgattagctagaagccataaagaaaagctgctaagtggccactaggtgccacttttctgtttttgtaatgctttcattagcagatcttttttttccaagctccatggggcctatgagaggcatttatgatttttgtgcctacaataagtcagcctgtctggtgtgagttgttttatgagaaatgctttccaagggaggtctaggaagatcctgacacataagaactttggcttagagagctttccaggtgtagtgccaataaaaactgacctggaaagaaaacctgcccagcacggaacatgctttctgaactcacttgagagtgtatggtgtatgtcacttctcatatattcttgagtttagatttgtcttttatacaatttttagctcttttccagttcacttgtgctcgtctgtatattggtatttttaaatttttgtggtaaataatgaaaagagtgaaattatattttataattactcatttgtagtttttttttttaatttaataaacttcctccaaaaagtgctcccttaaaa

SEQ ID NO: 3836 - protein, 602 aa, Homo sapien
MAAEEEAAAGGKVLREENQCIAPVVSSRVSPGTRPTAMGSFSSHMTEFPRKRKGSDSDPSQVEDGEHQVKMKAFREAHSQTEKRRRDKMNNLIEELSAMIPQCNPMARKLDKLTVLRMAVQHLRSLKGLTNSYVGSNYRPSFLQDNELRHLILKTAEGFLFVVGCERGKILFVSKSVSKILNYDQASLTGQSLFDFLHPKDVAKVKEQLSSFDISPREKLIDAKTGLQVHSNLHAGRTRVYSGSRRSFFCRIKSCKISVKEEHGCLPNSKKKEHRKFYTIHCTGYLRSWPPNIVGMEEERNSKKDNSNFTCLVAIGRLQPYIVPQNSGEINVKPTEFITRFAVNGKFVYVDQRATAILGYLPQELLGTSCYEYFHQDDHNNLTDKHKAVLQSKEKILTDSYKFRAKDGSFVTLKSQWFSFTNPWTKELEYIVSVNTLVLGHSEPGEASFLPCSSQSSEESSRQSCMSVPGMSTGTVLGAGSIGTDIANEILDLQRLQSSSYLDDSSPTGLMKDTHTVNCRSMSNKELFPPSPSEMGELEATRQNQSTVAVHSHEPLLSDGAQLDFDALCDNDDTAMAAFMNYLEAEGGLGDPGDFSDIQWTL

SEQ ID NO: 3837 - DNA, 2589 bp, Homo sapien
cggcccgctggagaggaagcccgagagctgccgcgcgcctgccggacgagggcgtagaagccaggcgtcagagcccgggctccggtggggtcccccacccggccctcgggtcccccgccccctgctccctgcccatcccagcccacgcgaccctctcgcgcgcggaggggcgggtcctcgacggctacgggaaggtgccagcccgccccggatgggcatcgtggagccgggttgcggagacatgctgacgggcaccgagccgatgccggggagcgacgagggccgggcgcctggcgccgacccgcagcaccgctacttctacccggagccgggcgcgcaggacgcggacgagcgtcgcgggggcggcagcctggggtctccctacccggggggcgccttggtgcccgccccgccgagccgcttccttggagcctacgcctacccgccgcgaccccaggcggccggcttccccggcgcgggcgagtccttcccgccgcccgcggacgccgagggctaccagccgggcgagggctacgccgccccggacccgcgcgccgggctctacccggggccgcgtgaggactacgcgctacccgcgggactggaggtgtcggggaaactgagggtcgcgctcaacaaccacctgttgtggtccaagtttaatcagcaccagacagagatgatcatcaccaagcagggacggcggatgttcccattcctgtcatttactgtggccgggctggagcccaccagccactacaggatgtttgtggacgtggtcttggtggaccagcaccactggcggtaccagagcggcaagtgggtgcagtgtggaaaggccgagggcagcatgccaggaaaccgcctgtacgtccacccggactcccccaacacaggagcgcactggatgcgccaggaagtttcatttgggaaactaaagctcacaaacaacaagggggcgtccaacaatgtgacccagatgattgtgctccagtccctccataagtaccagccccggctgcatatcgttgaggtgaacgacggagagccagaggcagcctgcaacgcttccaacacgcatatctttactttccaagaaacccagttcattgccgtgactgcctaccagaatgccgagattactcagctgaaaattgataataacccctttgccaaaggattccgggagaactttgagtccatgtacacatctgttgacaccagcatcccctccccgcctggacccaactgtcaattccttgggggagatcactactctcctctcctacccaaccagtatcctgttcccagccgcttctaccccgaccttcctggccaggcgaaggatgtggttccccaggcttactggctgggggccccccgggaccacagctatgaggctgagtttcgagcagtcagcatgaagcctgcattcttgccctctgcccctgggcccaccatgtcctactaccgaggccaggaggtcctggcacctggagctggctggcctgtggcaccccagtaccctcccaagatgggcccggccagctggttccgccctatgcggactctgcccatggaacccggccctggaggctcagagggacggggaccagaggaccagggtccccccttggtgtggactgagattgcccccatccggccggaatccagtgattcaggactgggcgaaggagactctaagaggaggcgcgtgtccccctatccttccagtggtgacagctcctcccctgctggggccccttctccttttgataaggaagctgaaggacagttttataactattttcccaactgagcagatgacatgatgaaaggaacagaaacagtgttattaggttggaggacaccgactaatttgggaaacggatgaaggactgagaaggcccccgctccctctggcccttctctgtttagtagttggttggggaagtggggctcaagaaggattttggggttcaccagatgcttcctggcccacgatgaaacctgagaggggtgtccccttgccccatcctctgccctaactacagtcgtttacctggtgctgcgtcttgcttttggtttccagctggagaaaagaagacaagaaagtcttgggcatgaaggagctttttgcatctagtgggtgggaggggtcaggtgtgggacatgggagcaggagactccactttcttcctttgtacagtaactttcaaccttttcgttggcatgtgtgttaatccctgatccaaaaagaacaaatacacgtatgttataaccatcagcccgccagggtcagggaaaggactcacctgactttggacagctggcctgggctccccctgctcaaacacagtggggatcagagaaaaggggctggaaaggggggaatggcccacatctcaagaagcaagatattgtttgtggtggttgtgtgtgggtgtgtgttttttctttttctttctttttattttttttgaatgggggaggctatttattgtactgagagtggtgtctggatatattccttttgtcttcatcactttctgaaaataaacataaaactgttaaaaaaaaaaaaaaaaa

SEQ ID NO: 3838 - protein, 535 aa, Homo sapien
MGIVEPGCGDMLTGTEPMPGSDEGRAPGADPQHRYFYPEPGAQDADERRGGGSLGSPYPGGALVPAPPSRFLGAYAYPPRPQAAGFPGAGESFPPPADAEGYQPGEGYAAPDPRAGLYPGPREDYALPAGLEVSGKLRVALNNHLLWSKFNQHQTEMIITKQGRRMFPFLSFTVAGLEPTSHYRMFVDVVLVDQHHWRYQSGKWVQCGKAEGSMPGNRLYVHPDSPNTGAHWMRQEVSFGKLKLTNNKGASNNVTQMIVLQSLHKYQPRLHIVEVNDGEPEAACNASNTHIFTFQETQFIAVTAYQNAEITQLKIDNNPFAKGFRENFESMYTSVDTSIPSPPGPNCQFLGGDHYSPLLPNQYPVPSRFYPDLPGQAKDVVPQAYWLGAPRDHSYEAEFRAVSMKPAFLPSAPGPTMSYYRGQEVLAPGAGWPVAPQYPPKMGPASWFRPMRTLPMEPGPGGSEGRGPEDQGPPLVWTEIAPIRPESSDSGLGEGDSKRRRVSPYPSSGDSSSPAGAPSPFDKEAEGQFYNYFPN

SEQ ID NO: 3839 - DNA, 1185 bp, Homo sapien
accgtcttccgccgcacgtggattcagcgcgatgcccaaatccaagcgcgacaagaaagtctccttaaccaaaactgccaagaaaggcttggaattgaaacaaaacctgatagaagagcttcggaaatgtgtggacacctacaagtaccttttcatcttctctgtggccaacatgaggaacagcaagctgaaggacatccggaacgcctggaagcacagccggatgttctttggcaaaaacaaggtgatgatggtggccttgggtcggagcccatctgatgaatacaaagacaacctgcaccaggtcagcaaaaggttgaggggtgaggtgggtctcctgttcaccaaccgcacaaaggaagaggtgaatgagtggttcacgaaatacacagaaatggactacgcccgagctggtaacaaagcagctttcactgtgagcctggatccagggcccctggagcagttcccccactccatggagccacagctcaggcagctgggcctgcccaccgccctcaagagaggtgtggtgactctgctgtctgactacgaggtgtgcaaggagggcgatgtgctgaccccagagcaggctcgcgtcctgaagctttttgggtatgagatggctgaattcaaggtgaccatcaaatacatgtgggattcacagtcgggaaggttccagcagatgggagacgacttgccagagagcgcatctgagtccacagaagagtcagactcagaagatgatgactgaaagggactcgggactgaaggtctcctggaagcttctgggtctcactggaccatcaggactgctgccgcccctctggagagagcagctttttatttgtctgtagacagggaacatgatgggcactgacctcctgtaaagaataaaactgtgggccgggcgcggtggctcacgcctggaatcccagcactttgggaagccgaggtgggcagatcataaggtcaggagattaagaccatcctggctaacacggtgaaaccccgtctctactaaaaatagaaaaaaaaactagttgggcatagtggcatgtgcctgtagtcccagctactcaggaggctgaggcaggagaatcacttgaacccgggaggtggaggttgccgtgagttgagattggaccactgctctccagcctgggcaacagagtaaaactctgtccc

SEQ ID NO: 3840 - protein, 239 aa, Homo sapien
MPKSKRDKKVSLTKTAKKGLELKQNLIEELRKCVDTYKYLFIFSVANMRNSKLKDIRNAWKHSRMFFGKNKVMMVALGRSPSDEYKDNLHQVSKRLRGEVGLLFTNRTKEEVNEWFTKYTEMDYARAGNKAAFTVSLDPGPLEQFPHSMEPQLRQLGLPTALKRGVVTLLSDYEVCKEGDVLTPEQARVLKLFGYEMAEFKVTIKYMWDSQSGRFQQMGDDLPESASESTEESDSEDDD

SEQ ID NO: 3841 - DNA, 1377 bp, Homo sapien
gaggcgggaggatgaagttgattgactatggtctctccggctaccaggaagagtctgccgaaggtgaaggccatggacttcatcacctccacagccatcctgcccctgctgttcggctgcctgggcgtcttcggcctcttccggctgctgcagtgggtgcgcgggaaggcctacctgcggaatgctgtggtggtgatcacaggcgccacctcagggctgggcaaagaatgtgcaaaagtcttctatgctgcgggtgctaaactggtgctctgtggccggaatggtggggccctagaagagctcatcagagaactcaccgcttctcatgccaccaaggtgcagacacacaagccttacttggtgaccttcgacctcacagactctggggccatagttgcagcagcagctgagatcctgcagtgctttggctatgtcgacatacttgtcaacaatgctgggatcagctaccgtggtaccatcatggacaccacagtggatgtggacaagagggtcatggagacaaactactttggcccagttgctctaacgaaagcactcctgccctccatgatcaagaggaggcaaggccacattgtcgccatcagcagcatccagggcaagatgagcattccttttcgatcagcatatgcagcctccaagcacgcaacccaggctttctttgactgtctgcgtgccgagatggaacagtatgaaattgaggtgaccgtcatcagccccggctacatccacaccaacctctctgtaaatgccatcaccgcggatggatctaggtatggagttatggacaccaccacagcccagggccgaagccctgtggaggtggcccaggatgttcttgctgctgtggggaagaagaagaaagatgtgatcctggctgacttactgccttccttggctgtttatcttcgaactctggctcctgggctcttcttcagcctcatggcctccagggccagaaaagagcggaaatccaagaactcctagtactctgaccagccagggccagggcagagaagcagcactcttaggcttgcttactctacaagggacagttgcatttgttgagactttaatggagatttgtctcacaagtgggaaagactgaagaaacacatctcgtgcagatctgctggcagaggacaatcaaaaacgacaacaagcttcttcccagggtgaggggaaacacttaaggaataaatatggagctggggtttaacactaaaaactagaaataaacatctcaaacagtaagagttgtagtcttccaggactagaaccttgtgtcctttgaattctcgccctgccagctcctagaaatagtttcaatcttggaatcagatgttatgtcacctgaaa

SEQ ID NO: 3842 - DNA, 918 bp, Homo sapien
ggggggagaggtagagatgagacaagaggtagaggggagaggtagaggtagccacgagctgataattacagacaagagatgcggagtatgtgggggctcattatcctgcatagtctatctttgtatatctttgaacttttcaagaataaaaaagcttaaaaagtatacatggcctggtcctaccagagactcacccaatgccagcctccagccagggagagccaagtttgcattttcacacgcatctcacactcctctgcactctcaacttggagagctccaaacagggaaaccccaagccttgctggcttctgccaaccccctgagcagaagcatgggtccccctgatcaccacctcaccaccctcatcctgatctcactgtacactccctttcctggtctgctaagtagcgggtgttttccttgacactaacgctacagctagaccacggtgggcttggcaacaggtgtcttcccagatgctggcgttaccgctagaccaaggagccctctggtggccccgtccgggcataacagaaagctcgcactcttgtcttctggtcactcctcactgtccccttcagcctcctatctctgtatggcctggtgtttcctaggttatgattgtagagcgaggattattataatattggaataaagaataattactacaaactaatgattaatgattcatatataatcatatctaagatctatatctagtataactattcttattttatatattttattatactggaacagctcgtgccctcggtctcttgcctcggcacctgggtggcttgctgcccacatccaccaagtgcactttgggaggctgaggctggaggactgctggaggccaggagttcaataccagcctgggcaacatagggagaccccccccccaccatctcc

SEQ ID NO: 3843 - protein, 136 aa, Homo sapien [sequence omitted]

SEQ ID NO: 3844 - DNA, 1330 bp, Homo sapien
ttttttttttcctgtgtcagcaagatcagtcttcatgaaatcctgctaaattccctgtgaaatataataagcttaagacattttagagaaccaaatgctgtttatgatacagtttagtagagttgtaatatatttcagcacagaattttagaatactatgggggctgattttcaattttgtaagagaaattatgagcatagtttatatagtcttttatttgtaattgtttacgtgatttcagaagtaatatgcttaagttattctaatgtttttaaagctagagagtctgaaaagagggaagaagaaagaaaagtgtttaaattgatctcttttgaatttaaaatgcatattaagtataactagaacataaaatgaagaatttaaattctcatcttattcctagaattatacctataatatgtatcattacttataacaattcatattttaattttgcatggcacataatctcttctgtgagttggatttttaggtggtgggaatttaagcataaattctcataactttcttggggtcaatttaatattaataagtgtagtaagtaataatacccagcttgagacctcatgtacttgttgcatttggatttaaagctcatttcctatagaagagctgtagaaatcagtcatgtagtttcataaactccttcatgcttgttaataattttcaagaatcttaaaataaattacaggaatattgttatgaagtagtagaagcagtatggtataggggagaaagtgattgtagttgggatctgaggatagtctttactttgctattaactagctgtgtgaccttgggcaagttgcttatctctgcttcagttccataaactaagaattacagagctgaaccggatcttggaagcaatctagtacaaacctctcattttacagatgaggaagcagataatttgcacaggctttcactgtaagacagttgggcccaaaattcagttttctgactctcaggttggttttttttttccattatactttacagcctcttttcatctgtaaaatgagagcattggattagaggctctcaaaggtctcttccagctcaaaaatattgtcattcctgtgacattagtcgtaatataatttattaggggaaagtttgtagcttttatttattggtgaaagaaatgtttcttgaagaggcagtataacctttgcaaggttatattttgtttttttaagagaatatcatcaggcgaggtgctatgtctcaggcctgtaatcccagctttgggagaccaaggcaagaggattgcttgagtccaggagtttgagactagcctgatcc

SEQ ID NO: 3845 - protein, 68 aa, Homo sapien
MGADFQFCKRNYEHSLYSLLFVIVYVISEVICLSYSNVFKARESEKREEERKVFKLISFEFKMHIKYN

SEQ ID NO: 3846 - DNA, 2229 bp, Homo sapien
ggcacgagggccaggaacgccagccgttcacgcgttcggtcctccttggctgactcaccgccctcgccgccgcaccatggacgcccccaggcaggtggtcaactttgggcctggtcccgccaagctgccgcactcagtgttgttagagatacaaaaggaattattagactacaaaggagttggcattagtgttcttgaaatgagtcacaggtcatcagattttgccaagattattaacaatacagagaatcttgtgcgggaattgctagctgttccagacaactataaggtgatttttctgcaaggaggtgggtgcggccagttcagtgctgtccccttaaacctcattggcttgaaagcaggaaggtgtgcggactatgtggtgacaggagcttggtcagctaaggccgcagaagaagccaagaagtttgggactataaatatcgttcaccctaaacttgggagttatacaaaaattccagatccaagcacctggaacctcaacccagatgcctcctacgtgtattattgcgcaaatgagacggtgcatggtgtggagtttgactttatacccgatgtcaagggagcagtactggtttgtgacatgtcctcaaacttcctgtccaagccagtggatgtttccaagtttggtgtgatttttgctggtgcccagaagaatgttggctctgctggggtcaccgtggtgattgtccgtgatgacctgctggggtttgccctccgagagtgcccctcggtcctggaatacaaggtgcaggctggaaacagctccttgtacaacacgcctccatgtttcagcatctacgtcatgggcttggttctggagtggattaaaaacaatggaggtgccgcggccatggagaagcttagctccatcaaatctcaaacaatttatgagattattgataattctcaaggattctacgtttgtccagtggagccccaaaatagaagcaagatgaatattccattccgcattggcaatgccaaaggagatgatgctttagaaaaaagatttcttgataaagctcttgaactcaatatgttgtccttgaaagggcataggtctgtgggaggcatccgggcctctctgtataatgctgtcacaattgaagacgttcagaagctggccgccttcatgaaaaaatttttggagatgcatcagctatgaacacatcctaaccaggatatactctgttcttgaacaacatacaaagtttaaagtaacttggggatggctacaaaaagttaacacagtatttttctcaaatgaacatgtttattgcagattcttcttttttgaaagaacaacagcaaaacatccacaactctgtaaagctggtgggacctaatgtcaccttaattctgacttgaactggaagcattttaagaaatcttgttgcttttctaacaaattcccgcgtattttgcctttgctgctactttttctagttagatttcaaacttgcctgtggacttaataatgcaagttgcgattaattatttctggagtcatgggaacacacagcacagagggtaggggggccctctaggtgctgaatctacacatctgtggggtctcctgggttcagcggctgttgattcaaggtcaacattgaccattggaggagtggtttaagagtgccaggcgaagggcaaactgtagatcgatctttatgctgttattacaggagaagtgacatactttatatatgtttatattagcaaggtctgtttttaataccatatactttatatttctatacatttatatttctaataatacagttatcactgatatatgtagacacttttagaatttattaaatccttgaccttgtgcattatagcattccattagcaagagttgtaccccctccccagtcttcgccttcctctttttaagctgttttatgaaaaagacctagaagttcttgattcatttttaccattctttccataggtagaagagaaagttgattggttggttgtttttcaattatgccattaaactaaacatttctgttaaattaccctatcctttgttctctactgttttctttgtaatgtatgactacgagagtgatactttgctgaaaagtctttcccctattgtttatctattgtcagtattttatgttgaatatgtaaagaacattaaagtcctaaaacatctaaaaaaaaaaaaaaaaaaaaaaaaaaaaaaaaaaa

SEQ ID NO: 3847 - protein, 370 aa, Homo sapien; identical to SEQ ID NO: 2293

SEQ ID NO: 3848 - DNA, 2418 bp, Homo sapien
gtgcagaaagcaccgtcttttactagaagaagacaataaaatgttggtcaatgaactgaatcattcgaaagaaaaagaatgccaatatgaaaaagagaaagcagaaagagaagtagctgtgagacagcttcaacaaaaacgagatgatgtcttaaacaaaggatcagcaacaaaagctctgctggatgcttcatcgcgtcactgcacctatttagaaaatgggatgcaggattcaaggaagaaattagaccagatgagaagtcaatttcaagaaatacaggatcaacttacagctactataagatgtactaaggagatggatggcgacacacaaaagcttgaagtagaacatgtgatgatgagaaaaattattaaaaaacaggatgaccaaattgagcggcttgagaaaatcctgcagcattcaagtttgatgctgcaggtgtttgagagctagatgaagatatggacatttctggaattaagagccccctctacattgagcacaagacagtgacgaatccacattcttcagccagaaagtcacctctgagagccaaatgtctgactatagaaaggagagtcaaagaatgataacgacatctcaggaaaattgtgaaaataatcagcagccggatgtggataaccctttcaaatttctcctggggcctccaaccacccccactggtgttctcctgctgacagtgatttcaattttttctgggctggagctccctgatggaggggcaggccaccatctttgctgtttttgcaacttagccacttcagccttcagtctttggagtgtccaaggagaccagggggtgatgtggaccctcagcatagcacagctgctctataaagatgaggccagactgcttttttgagcactttcccaatgccattcctcctcactgggcaaaacctccaaactggggtctccagccacctcctacaggtgtgtttgggccagcaacaagttcattcatacctccctagggcaaagcttccaaagggagcggtaggctgccatctttgctgtttcacaggcttcactgatgataactccaggtactggaaaatctgaggctactagagactggagcgggccctgggcatactgcagcagccctatggaaaagtggccagactgttacctgggttcccattcctatatcttctcactaggcaagtcttgcaggcctgggcctctacctaaccccccctaccagaactgttgagccagtagcaactcagccactccctggagagagcctccaggggcaactgaaagcctctctgccactgcttctgcagtggaactgtccttgctaccctcagactgatgaaggagctaacacccttatctacaccttcaacaagctttaattgaccaaagcccatctctcatgggttctacacactccccactgctcatgacagggaacccctggattggcccccacagcacgaattctccatcctgattgctgattgcagtaaacagttgctgtattctccaggggtggtggaactctgaggagacaaacaaaagacccttggctacaaccactactaatgtcccttcctcttctgcctcaaagttaggaaagaaatataaacactgagattgccccagagctgcagtgggcagcctaggagtgccaagccatgacctacagccagcactcaagggggagagaagcacattttcagatcattgagagggaacatggctgcaactgtaaggaaacataggggagccacatgaccaagcaagagtctaccaactgaccagtaagcccaagtgccacctactggatcacatcccaaagcttcagcatcaaaaataccctactaatatactcccctctgaaaccagaaatgagaagtcagcttcaaataaagaccctgcacaaagcctcagcctggtgaaaacatccgaaaataagtctacggactgtactcaatctacactgcaattaaaggaaaacccataggtggaaatgagaagaaaccaatgcaagaactccagtaactcaaatggcctctgtgtcatatgtccttctaacaaccacaccagttctccaacaagagttcttaacctggatgaactgtctggaattacataaatataattcagaatatggataggaaaaaaaatcatcaagactcaggagaatggcaaaacccaatccaaggaaaataagaataacagtaaagtgttacaggagctgaaggataaagtagctggtataataaaaaagaacctaaccgatctgaaagcgccgaagaacacaatacaagaattccacaatgcaatcacaagtattaacagcagaaaaaaaaacctgaggaacgaatctcagaacttgaagattggttctctaaaataagatggacaaaaaaaaaaaaaaaaaa

SEQ ID NO: 3849 - protein, 137 aa, Homo sapien [sequence omitted]

SEQ ID NO: 3850 - DNA, 1215 bp, Homo sapien
gtgacattgagctcaccagcgccaccgtccccggcgaagttctgcgctggtcggcggagagcaagtggccatggggagcctcagcggtctgcgcctggcagcaggaagctgttttaggttatgtgaaagagatgtttcctcatctctaaggcttaccagaagctctgatttgaagagaataaatggattttgcacaaaaccacaggaaagtcccggagctccattcccgcacttacaacagagtgcctttacacaaacctacggattggcagaaaaagatcctcatatggtcaggtcgcttcaaaaggaagatgaaatcccagagactgtctcgttggagatgcttgatgctgcaaagaacaagatgcgagtgaagatcagctatctaatgattgccctgacggtggtaggatgcatctttcattggttattgagggcaagaagcttgcccaaagaccgagactttaaccagcttggacctttagaaaagaaagctcgtctgaaagaaggaagcagctatgaaggccaaaacagattaccaaaggtatccgtgttggttgggattttgaaaatccaggaattatgttttaacgtgcctgtattaaaaaggatgtggtatgaggatccatttcataaagtatgatttgcccaaacctgtaccatttccgtatttctgctgtagaagtagaaataaattttcttaaataatgactgtgttttattgttttgatccaagtcaagtgtagcctctcagccttttggagaaaaatgaaacaatttatttcaacttgaataccaactcttcagagaagcaggtaccatatcttacttctcttcccattatcaaagtaacctctccacaggcgaactcattttgaggagataaggaaggccagttgagtatatggcccaggtgcagcttggagggccagccttctcaaatgtcctggtgtactggtggggaggctgccccctaatagagcgagcgctgagaagcagccagaccacattctataatctttgaacatgctggcagatggaggcttttaggagaatagttttttaaacattctgacaaggtccagccaggaatttctaaggacttagaaatcccagtgtcatggagttgcttgggggtcaacacaagtcacctcttagcttcatgccttagaattctcaactgggctgtttttcttaccacctgagaaactaaat

SEQ ID NO: 3851 - protein, 190 aa, Homo sapien
MGSLSGLRLAAGSCFRLCERDVSSSLRLTRSSDLKRINGFCTKPQESPGAPFPHLQQSAFTQTYGLAEKDPHMVRSLQKEDEIPETVSLEMLDAAKNKMRVKISYLMIALTVVGCIFHWLLRARSLPKDRDFNQLGPLEKKARLKEGSSYEGQNRLPKVSVLVGILKIQELCFNVPVLKRMWYEDPFHKV

SEQ ID NO: 3852 - DNA, 1041 bp, Homo sapien
gcccccgagcaggagccggtgcgagcggagcagagccgaggtcgggccgcgagcggagccggctgagcgggcgccgagctcccgccatggcccggaacacgctgtcctcgcgcttccgccgggtggacatcgacgaatttgacgagaacaaatttgtggacgagcaggaggaggcggcggcggcggcggcggagccaggcccggacccgagcgaggtggacgggctcctgcggcaaggggacatgcttcgggcattccatgcagccttgcggaactctcccgtcaacaccaagaatcaagctgtgaaggagcgagcccagggcgtggtgctgaaagtgctcacaaacttcaagagcagtgagattgagcaggctgtgcagtcactggacagaaacggcgttgacttgttaatgaagtacatttataaaggctttgagaagcccacagaaaatagcagcgcagtgttactccagtggcacgaaaaggccttagcagtaggaggactaggctccattataagagttcttacagcaagaaagactgtttaaaaaaaataaaaagactcatgttaccttgagaagaattctggatgcccaggctggtgaagaagggattgacaatggaccatcttcctaggaactcccaagtaaactatttcaggacatgtatctgctgaaatgtattttattttcaaggtggaggggaaaatcgtctgtttcctaaatcctgtttaggatctgatagtctatgcctttgtctccgagtactgcagaactgacattttgacggtctaccagcgtggcggctggtgttggtcagatgcacctgtgtgcactgggggagggatggtttgggcaggtgcagatccaagggctgtggtaaacgggagagcttgtgtttttgaagtggaaaaaaacccaagagtttgtacagacatcctgtcttcccagagaaggtggacactcttgggctcattgtaaagtgcctgctgcatcaataaagctcttggcttattagtctatacaaaaaaaaaaaaaaaaa

SEQ ID NO: 3853 - protein, 153 aa, Homo sapien
MARNTLSSRFRRVDIDEFDENKFVDEQEEAAAAAAEPGPDPSEVDGLLRQGDMLRAFHAALRNSPVNTKNQAVKERAQGVVLKVLTNFKSSEIEQAVQSLDRNGVDLLMKYIYKGFEKPTENSSAVLLQWHEKALAVGGLGSIIRVLTARKTV

SEQ ID NO: 3854 - DNA, 2530 bp, Homo sapien
ctaaagtggagcccagcggcgggtgtgagagtccgtaaggagcagcttccaggatcctgagatccggagcagccggggtcggagcggctcctcaagagttactgatctatgaaatggcagagaatggaaaaaattgtgaccagagacgtgtagcaatgaacaaggaacatcataatggaaatttcacagacccctcttcagtgaatgaaaagaagaggagggagcgggaagaaaggcagaatattgtcctgtggagacagccgctcattaccttgcagtatttttctctggaaatccttgtaatcttgaaggaatggacctcaaaattatggcatcgtcaaagcattgtggtgtcttttttactgctgcttgctgtgcttatagctacgtattatgttgaaggagtgcatcaacagtatgtgcaacgtatagagaaacagtttcttttgtatgcctactggataggcttaggaattttgtcttctgttgggcttggaacagggctgcacacctttctgctttatctgggtccacatatagcctcagttacattagctgcttatgaatgcaattcagttaattttcccgaaccaccctatcctgatcagattatttgtccagatgaagagggcactgaaggaaccatttctttgtggagtatcatctcaaaagttaggattgaagcctgcatgtggggtatcggtacagcaatcggagagctgcctccatatttcatggccagagcagctcgcctctcaggtgctgaaccagatgatgaagagtatcaggaatttgaagagatgctggaacatgcagagtctgcacaagactttgcctcccgggccaaactggcagttcaaaaactagtacagaaagttggattttttggaattttggcctgtgcttcaattccaaatcctttatttgatctggctggaataacgtgtggacactttctggtacctttttggaccttctttggtgcaaccctaattggaaaagcaataataaaaatgcatatccagaaaatttttgttataataacattcagcaagcacatagtggagcaaatggtggctttcattggtgctgtccccggcataggtccatctctgcagaagccatttcaggagtacctggaggctcaacggcagaagcttcaccacaaaagcgaaatgggcacaccacagggagaaaactggttgtcctggatgtttgaaaagttggtcgttgtcatggtgtgttacttcatcctatctatcattaactccatggcacaaagttatgccaaacgaatccagcagcggttgaactcagaggagaaaactaaataagtagagaaagttttaaactgcagaaattggagtggatgggttctgccttaaattgggaggactccaagccgggaaggaaaattcccttttccaacctgtatcaatttttacaacttttttcctgaaagcagtttagtccatactttgcactgacatactttttccttctgtgctaaggtaaggtatccaccctcgatgcaatccaccttgtgttttcttagggtggaatgtgatgttcagcagcaaacttgcaacagactggccttctgtttgttactttcaaaaggcccacatgatacaattagagaattcccaccgcacaaaaaaagttcctaagtatgttaaatatgtcaagctttttaggcttgtcacaaatgattgctttgttttcctaagtcatcaaaatgtatataaattatctagattggataacagtcttgcatgtttatcatgttacaatttaatattccatcctgcccaacccttcctctcccatcctcaaaaaagggccattttatgatgcattgcacaccctctggggaaattgatctttaaattttgagacagtataaggaaaatctggttggtgtcttacaagtgagctgacaccattttttattctgtgtatttagaatgaagtcttgaaaaaaactttataaagacatctttaatcattccaaaattgtgtccgttttcttgagcgttttgattttttacttttagcttataccagctgaatggcagccttgcctaatccacctacaacaagaatttcttaagctttcttttatttgcatgagagagccactaccaaggcatgttttgttatgctgaaactgggctgctgcatactgctaaatggcacctctgggattggcctacctggggatttcttggtttgtgaaaacaggagaggagaaatatctcatacaagtgaaaggatactggagagagaaattacccatttctaaaaaaaaaccacactctgtcgtatctgtgttaatgttttctagcatgtactctggtttcaacagacacaaatttatatgttaacccagttttcttgccgttctgtaagtgttttattcttagtgtgatttttttccattgggatgtttttgattgaacttgttcattttgttttgcttgggaggaaaataaacaattttacttttttccttaaaaaaaaaaaaaaa

SEQ ID NO: 3855 - protein, 406 aa, Homo sapien
MAENGKNCDQRRVAMNKEHHNGNFTDPSSVNEKKRREREERQNIVLWRQPLITLQYFSLEILVILKEWTSKLWHRQSIVVSFLLLLAVLIATYYVEGVHQQYVQRIEKQFLLYAYWIGLGILSSVGLGTGLHTFLLYLGPHIASVTLAAYECNSVNFPEPPYPDQIICPDEEGTEGTISLWSIISKVRIEACMWGIGTAIGELPPYFMARAARLSGAEPDDEEYQEFEEMLEHAESAQDFASRAKLAVQKLVQKVGFFGILACASIPNPLFDLAGITCGHFLVPFWTFFGATLIGKAIIKMHIQKIFVIITFSKHIVEQMVAFIGAVPGIGPSLQKPFQEYLEAQRQKLHHKSEMGTPQGENWLSWMFEKLVVVMVCYFILSIINSMAQSYAKRIQQRLNSEEKTK

SEQ ID NO: 3856 - DNA, 4326 bp, Homo sapien
  Unsure 2587: Unknown base
  Unsure 3487: Unknown base
  Unsure 3493: Unknown base
ctctggctttctgttttctactaacaggatttggtcactggttcttcatcttttgtctgttgcacgcatcccgccctccccacttgcttccccactccttggatccagccctgtgggcattcacgtcagttctctgaccccgccgtgagccccgctccgggtccccgggcgggcttggcacggaggcggtaactatggagaatatggcggaggaggagctgctgcccctggagaaggaggaggtggaggtggcccaggtccaggtcccgaccccggcccgggactcggctggggtcccagctccggccccggattcggctctggactcggctccgactccggcctcggctccagccccagcccctgccctggcccaggctccggccctgtccccgtccctagcctctgcccctgaggaggctaaaagcaagagacacatctcaattcaaaggcagcttgctgatctagagaatttagcttttgtaactgatggaaattttgactctgccagctcattgaactcagataatcttgatgcaggcaacagacaggcttgtccattgtgccctaaggaaaaattcagagcttgtaatagccataagcttcgtcgtcacctccagaatttacactggaaagtctcagttgaatttgaaggttacaggatgtgcatctgtcacttaccttgtcgaccagtgaaaccaaacattattggagaacagataaccagtaaaatgggagcccattatcattgtatcatttgttcagcaacaatcaccagaagaactgatatgctaggacatgttaggcgccacatgaataaaggagagactaaatctagttatattgcagcttccactgctaaaccacctaaggaaattttgaaagaggcagacacggatgtacaagtttgtcccaactattctatacctcagaaaacagattcctattttaaccccaaaatgaaactaaatcggcagctaatattctgtacattggctgctttggctgaggaacgaaaacctttggaatgtctagatgcttttggagccactgggataatgggattacagtgggcaaaacatcttggaaatgcagtcaaagttacaatcaatgacttgaatgaaaattctgtgacactgattcaggaaaactgccatttaaacaaattgaaagtggtggtggacagtaaggaaaaggaaaagagtgatgatattcttgaagaaggagagaaaaatcttggtaatattaaggtgaccaaaatggatgccaatgtactgatgcatttgagatcttttgatttcatacatctagacccttttggaacatcagtgaattatctagattctgcattcagaaatataagaaaccttggcatagtgtcagtgacttctacagatatcagttctttatatgccaaggcacagcatgttgcccggcgtcactacggatgtaacattgtccgaactgaatattacaaggaactagcagccagaattgttgtagctgcagtggcaagagctgcagcccgatgcaacaaaggcatagaagtactgtttgcagtggctctggaacattttgtgttggtagttgtgagagttttgaggggacctacttcagcagatgaaacagccaagaagattcaatacctgatccattgtcagtggtgtgaagagagaatttttcagaaggatggtaatatggtagaagaaaacccatatagacagctgccttgtaactgtcatggaagcatgcctggaaagacagcaatagaacttggacctctgtggtcaagttcccttttcaatactggattcctcaaaagaatgctatttgaatctcttcaccatggtttggatgacattcagaccctaataaagacattaatctttgaatcagagtgtacgcctcaaagtcagttttcaattcatgcatcttcaaatgtcaacaagcaagaagaaaatggtgtatttattaaaactacagatgacaccacaacagataattacattgcacaaggaaagagaaaaagtaatgaaatgatcacaaatttaggcaagaagcaaaagactgatgtcagtactgaacatcctcccttttattacaacattcacagacacagcattaaaggaatgaatatgccaaagttaaaaaagtttttgtgctatttatctcaagcaggctttcgagtaagccgaactcattttgacccaatgggtgtacgcacagatgcacctctgatgcagtttaaatctatccttttaaagtacagcacccccacctacactggaggacagtcagaaagccatgtccagtcagcatctgaagatacagtaactgaaagagttgaaatgtcagtgaatgacaaagcagaagcaagtggctgcagaagatggtaaacgtagagaagaattggttctcaggtgtctgtatagatggcctaatagttctctataccmactgtagttctttttctgttctttcaattcagtagagtaaaaataaaaaacagtgtcattttcattcagaamtgagcagttctacttagctggtttggagcttgctttccagtttttttgttttaaggcanacttaaaattttaatggacacatttcatatgaagccaagtctcactgagatcaccctactgcttaataattcagaaaattttcacatgcaaagtgtttggaattttatgtatgttatgaaagccatcttttacaattcttaatcacatctctgcctaaactgattcatgatgtttatgttttcctgtttgtagtgyacaaaatgaagctgaaggctcacatgttaaaatgaccctgaatagaataggaagaacagtgttcttacaggtcataatgtatttcacaattaaaaaactaaaatatgtacccatttttaagaaatcayacttctctccacattgatcttttcatttcttactagcttttaagaaattaaatacttgcctgagatagaaatactttatttttgtaactttaaggtctaaatgactaaacttcaaagtaagattttgtcagaataaattgagaccattaatcyaatataatacttgttcatgagcactgaaatcctgaagaggagagatttggttataaattaaaaaggttgggtgatcttaagtgcctcagttaatgcacgtacagtattcatttggttggttgtactacctctcagaagtaaaatttgtcaccttatggaatgagagtttttgggtttgggggttgtttttttgttgttgcttggtttggtatttttggttttgtgtgtatttgtataaattttctgtataattagcccaggctgatgtaactataaaaattagttgaaaaaaaaaatattgtttccttaatggaattctcacttcatttgaatataagattttggatgaaaggatttggtataaagtttgggtttttgtctcaaggatttgatccatatttatccctaaatatttcttaaggnatgtanctttttataaccattaagtggggggaagggggtggagggggtggtaataattataactgaaaggtttaaatatactacctaagaaaaaagtacttctgtgacatatacaaaaaaatctagtggataggcattagatgaatagagaatattaattttgcagaaatgaaggaaaatctcttcgtgctagtacagcgtattcccaagagagtttattttcctttctccaattaatgtggtcataaatttcggtaaaatcaagaaataggtgaagtgcaagctagtttctataatgaccattaaaaaaattctgctgtgtaattcttgccagttaaaattataacttgcaaatgagcagaataaatgaggtttttttcaattaaaaattactataaatccaggaggcaaactattttagcactcagattatctgatttaatacatattattgrattatcagtctcaaattttgctaaatgcttatcmgcmtgraatatgttgatcagtgatgagttgggcttaatgcaaagatcctaatttaataaagaaacctgtaaattactgttammwaaaawatatgtgtatattaatttcacatataaaggtagatttttcaaagaaaaatttggtaggcggtagtttagaactctgatcaggtactacatcaaccaaaagaggaaatactttaaaaattccttttagcaacctgagcaatcttattctcgtaacaatagtagtaatttgggacattgcaaatgtttatcatgttgtaaagtagcatcagttgtatcctttcattaaaacttgataaacaaaagaamrarwwaarraaacca

SEQ ID NO: 3857 - protein, 733 aa, Homo sapien
MENMAEEELLPLEKEEVEVAQVQVPTPARDSAGVPAPAPDSALDSAPTPASAPAPAPALAQAPALSPSLASAPEEAKSKRHISIQRQLADLENLAFVTDGNFDSASSLNSDNLDAGNRQACPLCPKEKFRACNSHKLRRHLQNLHWKVSVEFEGYRMCICHLPCRPVKPNIIGEQITSKMGAHYHCIICSATITRRTDMLGHVRRHMNKGETKSSYIAASTAKPPKEILKEADTDVQVCPNYSIPQKTDSYFNPKMKLNRQLIFCTLAALAEERKPLECLDAFGATGIMGLQWAKHLGNAVKVTINDLNENSVTLIQENCHLNKLKVVVDSKEKEKSDDILEEGEKNLGNIKVTKMDANVLMHLRSFDFIHLDPFGTSVNYLDSAFRNIRNLGIVSVTSTDISSLYAKAQHVARRHYGCNIVRTEYYKELAARIVVAAVARAAARCNKGIEVLFAVALEHFVLVVVRVLRGPTSADETAKKIQYLIHCQWCEERIFQKDGNMVEENPYRQLPCNCHGSMPGKTAIELGPLWSSSLFNTGFLKRMLFESLHHGLDDIQTLIKTLIFESECTPQSQFSIHASSNVNKQEENGVFIKTTDDTTTDNYIAQGKRKSNEMITNLGKKQKTDVSTEHPPFYYNIHRHSIKGMNMPKLKKFLCYLSQAGFRVSRTHFDPMGVRTDAPLMQFKSILLKYSTPTYTGGQSESHVQSASEDTVTERVEMSVNDKAEASGCRRW

SEQ ID NO: 3858 - DNA, 1634 bp, Homo sapien
acgatgaagtcagtgaggaggaggaatagtaattgtcaatgagcttttaataccaagatacaccccctgcccccaaagaagagtcctcttttagggaatcagaaccttcattgtcctagaagctgaaagattcttggaacattttagcttttactctcaacttgctgttctctttacattccttaagttagactttcgggtgtggcttctctctcaggggtaacatttacttccattttctagaccgaaccaaaagtcttctgcagaatctcccaccgagtgtggtaagaaggaaggacaaaaggctttaggatataaatttcatgttacagagcatgtcattgtcaaaggaaatctgtggccctgagattttaagaacataaaatgtgacatttgatatttctccagcccagggaagtaagatggttagcaatggttgccttaatcaaatggtcccatttttaaccccaaaggaagtgcccacagcaagaggtttgtgtgatgcacttatgtcctccggtgaggaaagggggccacatatgaaaggccccttaggtcagatcctgagagtagcacatttgagtgcagattcctgggccccacctcaaacctactaattctgaatctctgggaatagggccaggaaatctgccctttctacaaactacccaagttgttctgttgcacatcaatgtttgggaaccactgctgtaagggaatcattctggtcaccttgagctttgagctaccactaagccatgaaagaaaatacatcatacagggaagagagaagggaggaggttccaagtagtaactggcagatcctcctgtctggaggtaccaccttctattctggtttctgacttttccttcttgatgaccatagatgtgttccagaggcaaaagagacacattatcccagatggcagaacatgctttcaaaacatataaaatgtcaaagttccagatccttctacatctttagtcctgtctgaggatggtagctggctctctgtagctgatagatggctagagttccatccaaatccttgaccacgacttcatggagatttgaataatctatttgatgagatttctatttcaataacccacctctctcaccccacattcatatccctaaatttgaccctctgggccgagtcacattaccttcaggagacttgatcccagtagactgaggtcttccctttcagcagaaagatttcatttccctggcttgccagtggcactgatttccgaacacccaatgagtttaatattctttcctccttggcattactgccccagccgctttttttttttttttgtgtgtgtctaataaccaggaaaaaaataaagcttaggttttaaaaagttttaaaaataatctgtttcagaaactgtcaaatgtaccatatttgtattaagagttgttgggaatttttgtacaatgaatttacatttatttatggtgacatatttacgcttgtgatcaaataatgatgttaaattcttaaatcatatttgctatgcagctgaagatgatattttgatttgtattttgggggtacctgtgttgagttgataaacatttccatcttcattaaaactgcttccaaactaaaaaaaaaaaa

SEQ ID NO: 3859 - protein, 64 aa, Homo sapien
MVSNGCLNQMVPFLTPKEVPTARGLCDALMSSGEERGPHMKGPLGQILRVAHLSADSWAPPQTY

SEQ ID NO: 3860 - DNA, 2065 bp, Homo sapien
gggacgcgagcgggatccaaacttccggtgcctgcagagctcggagcggcggaggcagagaccgaggctgcaccggcagaggctgcggggcggacgcgcgggccggcgcagccatggtgaagattagcttccagcccgccgtggctggcatcaagggcgacaaggctgacaaggcgtcggcgtcggcccctgcgccggcctcggccaccgagatcctgctgacgccggctagggaggagcagcccccacaacatcgatccaagagggggggctcagtgggcggcgtgtgctacctgtcgatgggcatggtcgtgctgctcatgggcctcgtgttcgcctctgtctacatctacagatacttcttccttgcgcagctggcccgagataacttcttccgctgtggtgtgctgtatgaggactccctgtcctcccaggtccggactcagatggagctggaagaggatgtgaaaatctacctcgacgagaactacgagcgcatcaacgtgcctgtgccccagtttggcggcggtgaccctgcagacatcatccatgacttccagcggggtctgactgcgtaccatgatatctccctggacaagtgctatgtcatcgaactcaacaccaccattgtgctgccccctcgcaacttctgggagctcctcatgaacgtgaagagggggacctacctgccgcagacgtacatcatccaggaggagatggtggtcacggagcatgtcagtgacaaggaggccctggggtccttcatctaccacctgtgcaacgggaaagacacctaccggctccggcgccgggcaacgcggaggcggatcaacaagcgtggggccaagaactgcaatgccatccgccacttcgagaacaccttcgtggtggagacgctcatctgcggggtggtgtgaggccctcctcccccagaaccccctgccgtgttcctcttttcttctttccggctgctctctggccctcctccttccccctgcttagcttgtactttggacgcgtttctatagaggtgacatgtctctccattcctctccaaccctgcccacctccctgtaccagagctgtgatctctcggtggggggcccatctctgctgacctgggtgtggcggagggagaggcgatgctgcaaagtgttttctgtgtcccactgtcttgaagctgggcctgccaaagcctgggcccacagctgcaccggcagcccaaggggaaggaccggttgggggagccgggcatgtgaggccctgggcaaggggatggggctgtgggggcggggcggcatgggcttcagaagtatctgcacaattagaaaagtcctcagaagctttttcttggagggtacactttcttcactgtccctattcctagacctggggcttgagctgaggatgggacgatgtgcccagggagggacccaccagagcacaagagaaggtggctacctgggggtgtcccagggactctgtcagtgccttcagcccaccagcaggagcttggagtttggggagtggggatgagtccgtcaagcacaactgttctctgagtggaaccaaagaagcaaggagctaggacccccagtcctgccccccaggagcacaagcagggtcccctcagtcaaggcagtgggatgggcggctgaggaacggggcaggcaaggtcactgctcagtcacgtccacgggggacgagccgtgggttctgctgagtaggtggagctcattgctttctccaagcttggaactgttttgaaagataacacagagggaaagggagagccacctggtacttgtccaccctgcctcctctgttctgaaattccatccccctcagcttaggggaatgcacctttttccctttccttctcacttttgcatgtttttactgatcattcgatatgctaaccgttctcagccctgagccttggagaggagggctgtaacgccttcagtcagtctctggggatgaaactcttaaatgctttgtatattttctcaattagatctcttttcagaagtgtctatagaacaataaaaatcttttacttctg

SEQ ID NO: 3861 - protein, 267 aa, Homo sapien
MVKISFQPAVAGIKGDKADKASASAPAPASATEILLTPAREEQPPQHRSKRGGSVGGVCYLSMGMVVLLMGLVFASVYIYRYFFLAQLARDNFFRCGVLYEDSLSSQVRTQMELEEDVKIYLDENYERINVPVPQFGGGDPADIIHDFQRGLTAYHDISLDKCYVIELNTTIVLPPRNFWELLMNVKRGTYLPQTYIIQEEMVVTEHVSDKEALGSFIYHLCNGKDTYRLRRRATRRRINKRGAKNCNAIRHFENTFVVETLICGVV

SEQ ID NO: 3862 - DNA, 2645 bp, Homo sapien
gcggccgccatggcggagaattggaagaactgcttcgaggaggagctcatctgccctatctgcctgcacgttttcgtggagccagtgcagctgccgtgcaaacacaacttctgccggggctgcatcggcgaggcgtgggccaaggacagcggcctcgtacgctgcccagagtgcaaccaggcctacaaccagaagccgggcctggagaagaacctgaagctcaccaacatcgtggagaagttcaatgccctgcacgtggagaagccgccggcggcgctgcactgcgtgttctgccgccgcggccccccgctgcccgcgcagaaggtctgcctgcgctgcgaggcgccctgctgccagtcccacgtgcagacgcacctgcagcagccctccaccgcccgcgggcacctcctggtggaggcggacgacgtgcgggcctggagctgcccgcagcacaacgcctaccgcctctaccactgcgaggccgagcaggtggccgtgtgccagtactgctgctactacagcggcgcgcgtcagggacactcggtgtgcgacgtggagatccgaaggaatgaaatccggaagatgctcatgaagcagcaggaccggctggaggagcgagagcaggacattgaggaccagctgtacaaactcgagtcagacaagcgcctggtggaggagaaagtgaaccaactgaaggaggaagttcggctgcagtacgagaagctgcaccagctgctggacgaggacctgcggcagacagtggaggtcctagacaaggcccaggccaagttctgcagcgagaacgcagcgcaggcgctgcacctcggggagcgcatgcaggaggccaagaagctgctgggctccctgcagctgctctttgataagacggaggatgtcagcttcatgaagaacaccaagtctgtgaaaatcctgatggacaggacccagacctgcacgagcagcagcctttcccccactaagatcggccacctgaactccaagctcttcctgaacgaagtggccaagaaggagaagcagctgcggaaaatgctagaaggccccttcagcacgccggtgcccttcctgcagagtgtccccctgtacccttgcggcgtgagcagctctggggcggaaaagcgcaagcactcaacggccttcccagaggccagtttcctagagacgtcgtcgggccctgtgggcggccagtacggggcggcgggcacagccagcggtgagggccagtctgggcagcccctggggccctgcagctccacgcagcacttggtggccctgccgggcggcgcccaaccagtgcactcaagccccgtgttccccccatcgcagtatcccaatggctccgccgcccagcagcccatgctcccccagtatggcggccgcaagattctcgtctgttctgtggacaactgttactgttcttccgtggccaaccatggcggccaccagccctacccccgctccggccactttccctggacagtgccctcgcaggagtactcacacccgctcccgcccacaccctccgtcccccagtcccttcccagcctggcggtcagagactggcttgacgcctcccagcagcccggccaccaggatttctacagggtgtatgggcagccgtccaccaaacactacgtgacgagctaacgccacgcaggcggcggggcgctggggaatcttcctccccagcccccgggctcgggagttatgcatccagagacctgcccttctaccttcctcgcctcccctcttcctcattccattgccccaggtcttttccttttggattttgttttggttttggctttgtttttgatttttttttattatgaatctcctggacgcagaggtgacagtgggagctggcctgggccaggacggcaggtggccctggagatgggaaagtgtctgtgtcgaggcgctgagctctctctctgtttctccttttttcctctactccttccccttcacacccccgtggctggaaggaacctcggcttccctgaaagcttgggggtcccacccttcttaccccacccgggaggaacgcccagggccccgggcttgtttctcctcttgttttccttttgggcagtttgatcactgatcgagtaaggaatgacctttagattgtgcgacttttgtttttgtttttttaaatttttttaaaccaagaatgatttctcctgcttccttctcctcaccatcttcccagacggagttcaaaggccacttctcaagcagcttttggcaccttcagcctcagagtggaatcttttaaagacaggacccctatgtccaggaaaggggaaaaggaactttgccaatgatagtgaccacagcaaaagcaaataataataatattaataataataaagagaaataaaataataaaataaaaaacaatagcacagcccttgttgaggtcagcagggaggaggggctgcccggagttgggtccttgcctggattttgacacagcaacttcctgtagtgagcactttgtatgaatcgtggacttcctgttctcaaggcgcaggtatttattctgtatctgtctagcgcacacaccaaaatccaaccttctaataaacatgatggcgcagtcccaaaaaaaaaaaaaaaaa

SEQ ID NO: 3863 - protein, 551 aa, Homo sapien
MAENWKNCFEEELICPICLHVFVEPVQLPCKHNFCRGCIGEAWAKDSGLVRCPECNQAYNQKPGLEKNLKLTNIVEKFNALHVEKPPAALHCVFCRRGPPLPAQKVCLRCEAPCCQSHVQTHLQQPSTARGHLLVEADDVRAWSCPQHNAYRLYHCEAEQVAVCQYCCYYSGARQGHSVCDVEIRRNEIRKMLMKQQDRLEEREQDIEDQLYKLESDKRLVEEKVNQLKEEVRLQYEKLHQLLDEDLRQTVEVLDKAQAKFCSENAAQALHLGERMQEAKKLLGSLQLLFDKTEDVSFMKNTKSVKILMDRTQTCTSSSLSPTKIGHLNSKLFLNEVAKKEKQLRKMLEGPFSTPVPFLQSVPLYPCGVSSSGAEKRKHSTAFPEASFLETSSGPVGGQYGAAGTASGEGQSGQPLGPCSSTQHLVALPGGAQPVHSSPVFPPSQYPNGSAAQQPMLPQYGGRKILVCSVDNCYCSSVANHGGHQPYPRSGHFPWTVPSQEYSHPLPPTPSVPQSLPSLAVRDWLDASQQPGHQDFYRVYGQPSTKHYVTS

SEQ ID NO: 3864 - DNA, 4608 bp, Homo sapien
gacagaagtgaatgggaatggagaggccggcggcccgggagccgcatgggcccgacgcgctgcggcgcttccagggactgctgctggaccgccgaggccggctgcaccgccaggtgctgcgcctgcgcgaggtggcccggcgcctggagcgcctgcgcaggcgctccctcgtagccaacgtggccggcagctcgctgagcgcaacgggcgccctcgccgccatcgtggggctctcgctcagcccggtcaccctggggacctcgctgctggtgtcggccgtggggctgggggtggccacagccggaggggccgtcaccatcacgtccgatctctcgctgatcttctgcaactcccgggagctgcggagggtgcaggagatcgcggccacctgccaggaccagatgcgagagatcctgagctgcctcgagtttttctgccgctggcagggctgcggggaccgccagctgctgcagtgcgggaggaacgcctccatcgccctgtacaattctgtctacttcatcgtcttctttggctcacgtggcttcctcatccccaggcgggcggagggggacaccaaggttagccaggccgtgctgaaggccaagattcagaaactggccgagagcctggagtcctgcaccggggctctggacgaactcagcgagcagctggagtctcgggttcagctctgcaccaagtccagtcgtggccacgacctcaagatctctgctgaccagcgtgcagggctgtttttctgagaacatcctttccccctaatgaccgaggccagcaaatcatcctcatgggatgctccagaatttgtagctcccttaggaaaacaccaagctgggttaggagccgaaggcaaaggatgagaaaaactgtttttgaagtgggcaggtccccaaagcccttcttttcccatcactgtgacatctgcctgggcttgagtgctacggacttttcagtcttcctagtggaaaaatgtgacccaaaaactccttttcctttatcaaaaactttctgtctaaacacagctgggcaggcactcctgttttaaagttatttcggggtccctgaccctgccctggtggcttggcctgagactggagagagtgccatcctctgggtcctctccaagtcctactagtctttgaagtcctcaaaatgtgcgtgaggaaggcatttgcctctattccagaatttctgatacaaagaactccagaatccagagcaaatcagcccttctctgaacgttgtaggatggttcagaacccagagaggaccctggtgctgatatctcctcctcttccctttcccctcagcttacttactcccagatgcggcctgggtatgaagtaggcctttcctgagtggctcccaatccagtcctccaagtactcagaggggaagcccgtgaagccgtcatctaagtcctgctccctcacatgaagctgagggccagatagatggagcgactgccaacttcatttcccgacatcattgtgttcagaagagagtgatgggttttgagttagacagtcctgggcttgagacaggctttgtcactactgtgtgagtgtagccacctaatctctctgagactgtgtaaaacaaagatgataaaatctcaccctgttgtgagatattaaatgagccaaagtgcctagcatgatggtgctggctcatatagtgtagtccctggaatggcaaattaacatcacccaggaacttgttagaaaggcaaattcttggacacaaccctcctgatttatggaatcagaaactctggctgtggggcccagcaacctgagtttaaacaatttctctgggtggttctgcggcacactaaggtttgaaaatcactacaacaaatgctaacttctaatccccttgatgagctttcacgaagtctcacggcttctctagggactccatggtcttcagagtcgttcacagatgaccaaggacagactgtgtcccagaagccaaaatgagagagagagagagagcacgcgtacgtgcaccctggggcagtgtctcaccgtatgaataagggatgtaacactaaaagcccattagggggcagtgtttcccgcctgttgtagaaactggtacagaaaggatcctatatgaagttcctgaaactgacctttgtctattattaccttctctgaaaagtgccagtccatgtattttttatttattttaagtttgtaatttaatttttaattattgtttagtgtttgcatttaattttatttaatcaccacatttagaaaataataagagcaagtttctaaatgggagactgctgaggctctttgcaagagatgagattaagtttgagtttctaaggcagggcatgagctggaaatagcattgctttccttgattgtctctctccttcagggagattctttttctctagtgttttaagtgatcctttgaagtaagtgtggagagtcttgaatggcaagaccaggagctgagtttaagcttgtaatggaagcttgcattgtgggatatataactgaggaagcatatttatcctgaaggtattttgccagaaggtatcacttgacctggaaaaggaatctatttagttcaggaaagataaaaagtttagaggtatgtgaaggaagcacttagaacttgcaagcctgatgtcctatcaagttatgtcttctgggtgacagacaaaatagcttgtcttatggtggtgatgtgttgcattttcactttggggtctgtaagaaactgtcagtgaaaatatgtacaattccttcaatttccattcttaacaactgtaatgttgaaaaataagttgaaaagtctttgggaccatacatgcaaaaacggtgcctctgttacttaattatttaatattctataaatgtacccaatctgtccgcacccttcccagtgatggggcagtatgtctgaggaagtataatttcagtactggggtcggggagaggaggtgatgtttctacatttttattttttctataaattgcaattggtctgtatgctggtttattttgaaatttatattggtttcttttcaagctggtgtcatctcctagactgtttcacccagatgctagcattttttttttttttgagacagagtctcactctgtcacctaggctggagttgcagtggtttgatctcggctcactgcaacctccgactcctgggttcaagcaattcttctgcctcagcctcctgagtagctgggattacagatgtgcaccagcacacccggctaattttttgtatttttagtagagacagggtttcgccatgttggccaggctggtcttgaactcctggccttatgtgatccgcccaccttggcttcccaaagtgctgggattacaggcatgagccacctcgcctggccagatgctagcattttagatcaaacaattcattttagatgaattgttttgtttcacaatcattttaaatcattttagaatgtacttcacattattagttgtgttatggcataaaggtacaaccattccctaactccatcttttattaatgcttaagtttaaattatattcttccaatgcctaagctattccctagaattaaactgggcacttttggaagcagcaacagtaacagcagcagcaaacttttcctctcatattttgggtgtatcaaaagttctagacttttgaagttatgatttcagtggcccactttatttctaaggaagagtgtctactttggaacgatactttgcacatagtaggaactcaagaaatacatttgaataattataattaactgtttagctatcttaatgagaatttgttgacaacaaaagatcatccatcgccttatgtgtgagtaagattggagcctctatcaagatttagtcaagttcagttagattgattctagaaacaaatatttatttctttcttttacggggatgtgaataaggcttttccttaaggccttcattctttaaacaaacaggttgaaatggtatgttgtaaaagagaagacgggagagaggtatttagatgataagtgtacttcacaaaaatgccaaagtttgaaaaataggtatgtttgttctaaatgtttaagtgcttctctgttaggttctggggcttgcaatcatttgaattgttctgtttcacaataaaggagattcactgggttctgcattttcaggattcaatagaactgctccattaaaaaaataatccttagcaagcattcgaatcctaactgctttgatgcacttgccctcgggcacctgtcatttccaatatggtaggtgtcaaagtcaaaagtatttactgggagaaaaaagagaggagtggttgtagaagtctccctaaatcagacatgtcaagcaatcagccaacgtggtgtatttctcattcaatattttagtgtgaattgagacactgagataaagacatcgtgcagagataaatggggatacagttaaatgtagcaactcttgagttcattttttcccactgtagcaaaattaatgctttctctttattgaaataaattgctcattcctccaaaaaaaaaaaaaaaaaaaaaaaaaaaaaaaaaaaagg

SEQ ID NO: 3865 - protein, 248 aa, Homo sapien
MGMERPAAREPHGPDALRRFQGLLLDRRGRLHRQVLRLREVARRLERLRRRSLVANVAGSSLSATGALAAIVGLSLSPVTLGTSLLVSAVGLGVATAGGAVTITSDLSLIFCNSRELRRVQEIAATCQDQMREILSCLEFFCRWQGCGDRQLLQCGRNASIALYNSVYFIVFFGSRGFLIPRRAEGDTKVSQAVLKAKIQKLAESLESCTGALDELSEQLESRVQLCTKSSRGHDLKISADQRAGLFF

SEQ ID NO: 3866 - DNA, 995 bp, Homo sapien
gtttctgggaagggagaatggcggcgcccgggctgcggctgggagcggggagactctttgaaatgcctgcggtgctagagcgactgagccgctataatagcacgtcccaagcttttgctgaggtgctgcggctgccgaagcagcagctgaggaagctgctgtacccgctgcaggaagtagagcggttcctcgccccctacgggaggcaagaccttcacctgcgtatctttgacccaagcccggaggacatagccagggcggacaacatcttcacggccactgaacggaaccgcatcgactacgtcagctccgccgtccgtatcgaccacgccccggaccttccgcggccagaggtgagaggcgattctacggttcacctgcgcgccggcgtcacagcgctaccgcttcctggccgtccggctcgcggtgtgttttataggcagagcaatgttggaaaatcatctctaatcaagctttattttcactggcccctgaggttgaagtcagagtctccaaaaaaccaggacacacaagaaaatgaatttttcaaagttggaaaacattttacagtggtggacatgccaggttatggctttagagcacctgaagattttgttgacatggtagagacctatctaaaagaacgaaggaacttgaagagaacatttttattagtggatagcgttgttggaattcaaaaaacagacaatattgccatagaaatgtgtgaagaatttgcattaccttatgtgattgtattaacaaaaattgacaaatcttccaagggacatcttttaaaacaagtgcttcagatccagaaatttgttaacatgaaaactcaaggatgttttcctcagttgtttcctgtaagtgctgtgaccttttctggaatccacctgttgagatgctttatagccagtgtaacaggaagtcttgactaatggttcccggtttagctgaagattcaaaaaaaaaaaaaaaaaaaaaaaaaaaaa

SEQ ID NO: 3867 - protein, 307 aa, Homo sapien
MAAPGLRLGAGRLFEMPAVLERLSRYNSTSQAFAEVLRLPKQQLRKLLYPLQEVERFLAPYGRQDLHLRIFDPSPEDIARADNIFTATERNRIDYVSSAVRIDHAPDLPRPEVRGDSTVHLRAGVTALPLPGRPARGVFYRQSNVGKSSLIKLYFHWPLRLKSESPKNQDTQENEFFKVGKHFTVVDMPGYGFRAPEDFVDMVETYLKERRNLKRTFLLVDSVVGIQKTDNIAIEMCEEFALPYVIVLTKIDKSSKGHLLKQVLQIQKFVNMKTQGCFPQLFPVSAVTFSGIHLLRCFIASVTGSLD

SEQ ID NO: 3868 - DNA, 2811 bp, Homo sapien
acacaggaagctgagccggcttggggcccagcatacacaggcccccaggacccctggggagagggccccgctgggctggccctgcagggaccatggaatccagagctgaagggggctcccctgctgtgtttgattggttcttcgaagcggcctgccctgcctccctgcaggaggatccccccatcctgcggcagttccctccagacttcagggaccaggaagctatgcagatggtgcctaaattctgcttcccttttgatgtggaaagggagccccccagccccgccgtgcagcatttcaccttcgccctcacagaccttgccggcaaccgcagatttggtttctgccgcctgcgggcgggtacccagagctgtctctgcatcctcagccacctgccttggttcgaggtgttttacaagctattgaacacagtgggagacctcctagcccaggaccaagtcaccgaggcagaggaacttcttcaaaatctgtttcagcagtccctgtctgggccccaggcctcagtggggcttgagctgggcagcggagtgacggtctccagcgggcagggtatccccccccctacccgggggaatagcaagccgctttcctgcttcgtggccccggactccggccgcctgccatccatccctgagaacaggaacctaacggagctggtggtggccgtgactgacgagaacatcgtggggctgttcgcggcgctcctggccgagagaagagtcctgctcaccgccagcaaactcagcaccctgacctcgtgcgtccacgcgtcctgcgcgctcctgtaccccatgcgctgggagcacgtgctgatccccacgctgcccccacacctgctggactactgctgcgcgcccatgccctacctcattggagtgcacgccagtctcgccgagagagtacgagaaaaagccctggaggacgtcgtggtgctgaacgtggacgccaataccttggagacgacctttaacgacgtgcaggcgctgcctccagacgtggtgtccctgctgaggctccggctcaggaaggtcgccctggcccccggggaaggggtgtcccgtctcttcctcaaagcccaggccctgctcttcggggggtaccgcgacgcactcgtctgcagcccgggccagccagtgaccttcagtgaggaagtcttcttggcccagaagcctggggcacctctgcaggccttccaccggcgggctgtgcacctgcagctgttcaaacagttcatcgaagcccggctggagaagctcaacaagggggagggcttctcagatcaattcgagcaggagatcactggctgcggggcctccccaggggcccttcgatcctatcagctctgggccgacaatctaaagaaaggtggtggcgccctcctgcactcagtcaaggccaagacccaaccagccgtcaagaacatgtaccgctcggccaagagtggcttgaagggggtgcagagccttctaatgtataaggatggggactctgtcctgcagagggggggctctctgagggccccagccctccccagccgctcagaccgcctgcagcaacgcctcccaatcactcagcactttggaaagaaccggccccttcgccccagcaggagacgccagctggaagagggaacttccgagcccccaggggcggggacacccccactgagccctgaggatgaggggtgcccgtgggcagaagaagctctggacagcagcttcttggggtctggagaagaactggatttgttgagcgagattctggacagtcttagcatgggagccaagagcgcaggcagcctgagaccgagccagagtttagactgctgtcacagaggagacctggacagctgcttcagcctgcccaacatactaagatggcaaccagacgataagaaactaccagagccggagccccagcccctttccctgccatccctgcaaaatgcctcgtctttggatgccaccagctcttcaaaggactccaggtcccagctgataccctcagagtccgaccaagaagtcacgtctccatcccagtcctcaacagcttctgcagacccaagcatctggggggaccccaaaccctctcctctcacagagcccctaattcttcatctcaccccttcccacaaggcagctgaagattttacagcccaggaaaaccccactccctggctctccactgcacccactgagcccagccctccagaaagcccccaaattctggcccccacaaagcccaactttgatatagcctggacgtcccagccccttgatccttcctcagaccccagttctctggaggaccccagagcccggcctcccaaagccctgctggcagagcgcgctcacctccagccacgggaggaaccaggagccctgaattcccctgctacacccaccagcaactgtcaaaagtcccagcccagcaagccggcccagagtcgctgatcttaagaagtgctttgagggttaagaatcaggggtccaagagagaccccagtccctcaataaagccacaagagcccaaaaaagctggtttttttcctggtgaatttctctggtgccctcactctgctcggaaatccatcccacccacctctgtccctccaagggcagcctctctaactggctcctagcagggaattccaggaagcctcctggtcttctagaatcctggcaaccttacaattcctctcggcatttgtcacttccatctcagctaatgcacccaccagctcaaacacaccaataaagcttttgttactctcaaaaaaaaaaaaaaaaa

SEQ ID NO: 3869 - protein, 793 aa, Homo sapien
MESRAEGGSPAVFDWFFEAACPASLQEDPPILRQFPPDFRDQEAMQMVPKFCFPFDVEREPPSPAVQHFTFALTDLAGNRRFGFCRLRAGTQSCLCILSHLPWFEVFYKLLNTVGDLLAQDQVTEAEELLQNLFQQSLSGPQASVGLELGSGVTVSSGQGIPPPTRGNSKPLSCFVAPDSGRLPSIPENRNLTELVVAVTDENIVGLFAALLAERRVLLTASKLSTLTSCVHASCALLYPMRWEHVLIPTLPPHLLDYCCAPMPYLIGVHASLAERVREKALEDVVVLNVDANTLETTFNDVQALPPDVVSLLRLRLRKVALAPGEGVSRLFLKAQALLFGGYRDALVCSPGQPVTFSEEVFLAQKPGAPLQAFHRRAVHLQLFKQFIEARLEKLNKGEGFSDQFEQEITGCGASPGALRSYQLWADNLKKGGGALLHSVKAKTQPAVKNMYRSAKSGLKGVQSLLMYKDGDSVLQRGGSLRAPALPSRSDRLQQRLPITQHFGKNRPLRPSRRRQLEEGTSEPPGAGTPPLSPEDEGCPWAEEALDSSFLGSGEELDLLSEILDSLSMGAKSAGSLRPSQSLDCCHRGDLDSCFSLPNILRWQPDDKKLPEPEPQPLSLPSLQNASSLDATSSSKDSRSQLIPSESDQEVTSPSQSSTASADPSIWGDPKPSPLTEPLILHLTPSHKAAEDFTAQENPTPWLSTAPTEPSPPESPQILAPTKPNFDIAWTSQPLDPSSDPSSLEDPRARPPKALLAERAHLQPREEPGALNSPATPTSNCQKSQPSKPAQSR

SEQ ID NO: 3870 - DNA, 1047 bp, Homo sapien
ctgtgagtgacacacgctgagtggggtgaagggaaatgctggtgaatttcattttgaggtgtgggttgctgttagtcactctgtctcttgccattgccaagcacaagcaatcttccttcaccaaaagttgttacccaaggggaacattgtcccaagctgttgacgctctctatatcaaagcagcatggctcaaagcaacgattccagaagaccgcataaaaaatatacgattattaaaaaagaaaacaaaaaagcagtttatgaaaaactgtcaatttcaagaacagcttctgtccttcttcatggaagacgtttttggtcaactgcaattgcaaggctgcaagaaaatacgctttgtggaggactttcatagccttaggcagaaattgagccactgtatttcctgtgcttcatcagctagagagatgaaatccattaccaggatgaaaagaatattttataggattggaaacaaaggaatctacaaagccatcagtgaactggatattcttctttcctggattaaaaaattattggaaagcagtcagtaaaccaaagccaagtacattgattttacagttattttgaaatacaataagaactgctagaaatatgtttataacagtctatttcttttaaaaactttttaacataatactgacggcatgttaggtgattcagaatagacaagaaggatttagtaaattaacgttttggatataagttgtcactaatttgcacattttctgtgttttcaaataatgtttccattctgaacatgttttgtcattcacaagtacattgtgtcaacttaatttaaagtatgtaacctgaattaactcgtgtaatatttgtgtgtggagtgggatgtggggggtggagggggaatgacagatttctggaatgcaatgtaatgttactgagacttaaatagatgttatgtatatgattgtctgtttaagtgtttgaaaattgttaattatgcccagtgtgaacttagtacttaacacattttgattttaattaaataaattgggtttccttctc

SEQ ID NO: 3871 - protein, 171 aa, Homo sapien
MLVNFILRCGLLLVTLSLAIAKHKQSSFTKSCYPRGTLSQAVDALYIKAAWLKATIPEDRIKNIRLLKKKTKKQFMKNCQFQEQLLSFFMEDVFGQLQLQGCKKIRFVEDFHSLRQKLSHCISCASSAREMKSITRMKRIFYRIGNKGIYKAISELDILLSWIKKLLESSQ

SEQ ID NO: 3872 - DNA, 2068 bp, Homo sapien
ctgcacagggagtttgtcttgtgcaaacaatttccaaggcagcgttttcttccctgcctgggagtgcagggctcagcgccttcactttggaactgactcagagacctaaagaagcccacctggccagcgggaaggggggccgccgccgcctcccggttttgggcagccctggccagctccctgtggccttggaggacttccaccgggcaggcgttcccatgatgccaggctaccaggcgcgggggattcctgcaggccggcgctgcttttcttagaaccccctttctagaaaagtacacctggaggttttgcttcaaagagaggagaggcagcagcatggcgagtgtcctgtcccgacgccttggaaagcggtccctcctgggagcccgggtgttgggacccagtgcctcggaggggccctcggctgccccaccctcggagccactgctagaaggggccgctccccagcctttcaccacctctgatgacaccccctgccaggagcagcccaaggaagtccttaaggctcccagcacctcgggccttcagcaggtggcctttcagcctgggcagaaggtttatgtgtggtacgggggtcaagagtgcacaggactggtggagcagcacagctggatggagggtcaggtgaccgtctggctgctggagcagaagctgcaggtctgctgcagggtggaggaggtgtggctggcagagctgcagggcccctgtccccaggcaccacccctggagcccggagcccaggccctggcctacaggcccgtctccaggaacatcgatgtcccaaagaggaagtcggacgcagtggaaatggatgagatgatggcggccatggtgctgacgtccctgtcctgcagccctgttgtacagagtcctcccgggaccgaggccaacttctctgcttcccgtgcggcctgcgacccatggaaggagagtggtgacatctcggacagcggcagcagcactaccagcggtcactggagtgggagcagtggtgtctccaccccctcgcccccccacccccaggccagccccaagtatttgggggatgcttttggttctccccaaactgatcatggctttgagaccgatcctgaccctttcctgctggacgaaccagctccacgaaaaagaaagaactctgtgaaggtgatgtacaagtgcctgtggccaaactgtggcaaagttctgcgctccattgtgggcatcaaacgacacgtcaaagccctccatctgggggacacagtggactctgatcagttcaagcgggaggaggatttctactacacagaggtgcagctgaaggaggaatctgctgctgctgctgctgctgctgccgcaggcaccccagtccctgggactcccacctccgagccagctcccacccccagcatgactggcctgcctctgtctgctcttccaccacctctgcacaaagcccagtcctccggcccagaacatcctggcccggagtcctccctgccctcaggggctctcagcaagtcagctcctgggtccttctggcacattcaggcagatcatgcataccaggctctgccatccttccagatcccagtctcaccacacatctacaccagtgtcagctgggctgctgccccctccgccgcctgctctctctctccggtccggagccggtcgctaagcttcagcgagccccagcagccagcacctgcgatgaaatctcatctgatcgtcacttctccaccccgggcccagagtggtgccaggaaagcccgaggggaggctaagaagtgccgcaaggtgtatggcatcgagcaccgggaccagtggtgcacggcgtgccggtggaagaaggcctgccagcgctttctggactgagctgtgctgcaggttctactctgttcctggccctgccggcagccactgacaagaggccagtgtgtcaccagccctcagcagaaaccgaaagagaaagaacggaaacacggagtttgggctctgttggctaaggtgtaacacttaaagcaattttctcccattgtgcgaacattttattttttaaaaaaaa

SEQ ID NO: 3873 - protein, 513 aa, Homo sapien
MASVLSRRLGKRSLLGARVLGPSASEGPSAAPPSEPLLEGAAPQPFTTSDDTPCQEQPKEVLKAPSTSGLQQVAFQPGQKVYVWYGGQECTGLVEQHSWMEGQVTVWLLEQKLQVCCRVEEVWLAELQGPCPQAPPLEPGAQALAYRPVSRNIDVPKRKSDAVEMDEMMAAMVLTSLSCSPVVQSPPGTEANFSASRAACDPWKESGDISDSGSSTTSGHWSGSSGVSTPSPPHPQASPKYLGDAFGSPQTDHGFETDPDPFLLDEPAPRKRKNSVKVMYKCLWPNCGKVLRSIVGIKRHVKALHLGDTVDSDQFKREEDFYYTEVQLKEESAAAAAAAAAGTPVPGTPTSEPAPTPSMTGLPLSALPPPLHKAQSSGPEHPGPESSLPSGALSKSAPGSFWHIQADHAYQALPSFQIPVSPHIYTSVSWAAAPSAACSLSPVRSRSLSFSEPQQPAPAMKSHLIVTSPPRAQSGARKARGEAKKCRKVYGIEHRDQWCTACRWKKACQRFLD

SEQ ID NO: 3874 - DNA, 690 bp, Homo sapien
tgcacaagcagaatcttcagaacaggttctccttccccagtcaccagttgctcgagttagaattgtctgcaatggccgccctgcagaaatctgtgagctctttccttatggggaccctggccaccagctgcctccttctcttggccctcttggtacagggaggagcagctgcgcccatcagctcccactgcaggcttgacaagtccaacttccagcagccctatatcaccaaccgcaccttcatgctggctaaggaggctagcttggctgataacaacacagacgttcgtctcattggggagaaactgttccacggagtcagtatgagtgagcgctgctatctgatgaagcaggtgctgaacttcacccttgaagaagtgctgttccctcaatctgataggttccagccttatatgcaggaggtggtgcccttcctggccaggctcagcaacaggctaagcacatgtcatattgaaggtgatgacctgcatatccagaggaatgtgcaaaagctgaaggacacagtgaaaaagcttggagagagtggagagatcaaagcaattggagaactggatttgctgtttatgtctctgagaaatgcctgcatttgaccagagcaaagctgaaaaatgaataactaaccccctttccctgctagaaataacaattagatgccccaaagcgattttt

SEQ ID NO: 3875 - protein, 179 aa, Homo sapien
MAALQKSVSSFLMGTLATSCLLLLALLVQGGAAAPISSHCRLDKSNFQQPYITNRTFMLAKEASLADNNTDVRLIGEKLFHGVSMSERCYLMKQVLNFTLEEVLFPQSDRFQPYMQEVVPFLARLSNRLSTCHIEGDDLHIQRNVQKLKDTVKKLGESGEIKAIGELDLLFMSLRNACI

SEQ ID NO: 3876 - DNA, 2023 bp, Homo sapien
tttacttcctgcgtccccggacgccgtatgtggaaaggcgaaccctgagtggaggatgttcccgctgcctaaagaatgattgactgtgactgcacttttgtgagattataaatataccacggagggtaacgaagctacagaagaatggaagaagacagcctggaagactcaaacctttttccaaaagtttggcattctgagatgacggtgtcagcgacaggcgaaccacctagtgccgtcgaagaagaaggaatacctaacgaaacagacatagaaatcatgccagaaatcccggaaactctagagccactgtcccttccagatgtgctgaggatctcggcagttctggaggacaccacagaccagctctttattctgaactacatcatgcccgttcagtacgatgggagacagagcatctgcgtgaaaagcagagaattgaatctagaaggaacgaatctagacaaacttgcaatgggcctcaacatgacaaaaatactcagtccgttactacctgtggaaggacccaatttgcctgatttcacacccagaggccggttcgctgtggagtttaacaaaatgcaggatcttgtcttcaaaaaacctacaaggcagaccatcatgactacggagacactgaagaaaattcacattgataggcagtttttcagcgatgtgattgcagataccattaaggagttgcaagattcggccacttacaacagtctcctgcaagctttgagcaaagagagggaaaacaaaatgcatttctatgacatcattgccagggaggaaaaaggaagaaaacagataatatcacttcaaaaacagctaattaatgtcaaaaaggaatggcaatttgaagtccagagtcagaatgagtatattgctaacctcaaggaccaactgcaagagatgaaggcaaaatccaacttggagaatcgctacatgaaaaccaataccgagctgcagattgcccagacccagaaaaagtgtaacagaacagaggaactcttggtggaagattttgagaaactcaggatgaaaaccgaagaagaggcccggactcatacagagattgaaatgttccttagaaaggagcagcagaaacttgaggagaggctggagttctggatggagaaatacgataaggacacagaaatgaaacagaatgaactaaatgctctcaaagccacaaaggccagtgtcttagcacaccttcaagacctggcaaagatgataagagagtatgaacaggtcatcattgaagatcgtatagaaaaggagaggagcaagaagaaggtaaaacaggatctcttggaattaaagagcgttataaagctccaggcctggtggcgaggcactatgatacggagagaaattggtggtttcaagatgcctaaagacaaagttgatagcaaggattcaaaaggcaaaggtaaaggcaaggataagaggagaggcaagaagaagtgaccaagttctcttttgtgttttctgctggtattctggaggtgggaaggacttggagagagttaagaaacacctggtacctcaaagatgactcatctacaggttgtttcctattgagactttcccagggaagcctgatttcactttgcctgttaatttcactctgcctgttaggtgggttttcaaaccctgatttaggattacaccattgacttagggcttcctcataccttgctgggaagaagtttctagtagtcctgtgaagattcattcttcttgctctttctcagcagaacaaaggagttcactggcttagctacagtgacgcattgaaacttgagtaattcctgtaatgtcagattttgattttacccaatttgtctgtagtgaaaaaactcttatgagcaaaagtattcagtaggaattacaatatgatgttattagctgtccagcataatatatacacagcaaagttttaataaatgttggttcctgcctgccttttaaaaaaaaaaaaaaaaaaaaaaaaaaaaaaaaaaaaaaaaaaaaa

SEQ ID NO: 3877 - protein, 443 aa, Homo sapien
MEEDSLEDSNLFPKVWHSEMTVSATGEPPSAVEEEGIPNETDIEIMPEIPETLEPLSLPDVLRISAVLEDTTDQLFILNYIMPVQYDGRQSICVKSRELNLEGTNLDKLAMGLNMTKILSPLLPVEGPNLPDFTPRGRFAVEFNKMQDLVFKKPTRQTIMTTETLKKIHIDRQFFSDVIADTIKELQDSATYNSLLQALSKERENKMHFYDIIAREEKGRKQIISLQKQLINVKKEWQFEVQSQNEYIANLKDQLQEMKAKSNLENRYMKTNTELQIAQTQKKCNRTEELLVEDFEKLRMKTEEEARTHTEIEMFLRKEQQKLEERLEFWMEKYDKDTEMKQNELNALKATKASVLAHLQDLAKMIREYEQVIIEDRIEKERSKKKVKQDLLELKSVIKLQAWWRGTMIRREIGGFKMPKDKVDSKDSKGKGKGKDKRRGKKK

SEQ ID NO: 3878 - DNA, 1991 bp, Homo sapien
gtctggaatcaagcgaaccatcaaagaaaccgaccctgattacgaggatgtatctgtggcccttccaaataagcggcataaagcaattgagaattcagctcgagatgctgctgtgcagaagattgagactattatcaaagaacagtttgctcttgaaatgaagaataaggaacatgaaattgaagtcattgaccagcgactgattgaagcaagaaggatgatggataaactgcgtgcctgcattgtagcaaactactatgcttctgcaggtcttctaaaagtttctgagggatcaaagacatgtgatacgatggtttttaatcatcctgctatcaagaaatttttggaatcaccatctaggtcatcatctcctgccaatcagagagcagaaacaccatcagccaatcattcagaaagtgattctttatctcagcacaatgacttcttatctgacaaagataataacagcaatatggatatagaggaaagactctcaaacaacatggagcagagaccaagccgaaatactggaagggatacttctagaattactggctcccataaaacagaacagcggaatgctgatctcacagatgagacttcacgactttttgtaaagaaaacaatagtagtgggcaatgtgtccaagtatatacctccggataagagggaagaaaatgaccagtcaactcataagtggatggtatatgtccgagggtcccgtagagaacccagcattaatcattttgtcaagaaggtttggttcttccttcatcctagctataaaccaaatgaccttgtggaagttagagagcctccttttcacctgaccagaagaggctggggtgagtttcccgtcagagttcaagttcattttaaggacagccagctcaaaccactcagcgtaaacacatctggaggggtgcagacgatcctgatgcctgtgaataaagtggttcagtcattttctaccagcaagccacctgccattctgcctgtagctgccccaactccagttgtccccagctctgctccagcagctgttgcaaaagtgaagactgaaccagaaacacctggaccgagttgcctctctcaggagggtcagacagcagtgaaaacagaagaaagttctgagctgggaaactatgtcattaagatagaccatttagaaactatccagcaactcctaacttagtaaagaagattccattaatcactgcaaaaagtgaagatgccagctgcttttctgcaaagtctgtggagcagtactatggctggaacattggaaaaaggagagccgctgagtggcaaagagcaatgacaatgcgaaaagtcttacaagaaatcctggagaagaatccgagatttcaccacctgactcccctcaaaaccaagcacatcgctcactggtgccgctgtcatggctacaccccaccggaccctgagagcctgaggaatgacggggactccatcgaggacgtgctgacccagatcgacagcgagcccgagtgcccatcatcattctcctctgctgacaacctctgccgcaaactggaggacctgcaacagttccagccctggtgacagaggagaccccgtctcaaaaattgattgatcaattcagcatctgagggctgcaagtacagaaggaatctattctcagcagggcatagggcacgcactggcttaacagtttagtatataaggctcaaatagtctatacctgaactgctataagcaaggtcgatagggaagtggatagattgcttcagcaaagtgaactgtgagatctccaggacagagggagaaagatctgatccaaatgagaacagattggttattgcaggtatcacagcctaaagaaattatctttttgcaaaagaaatattaaatgatttagcagtctccacgtgtgttaatgtttcaaacgtgtatcataatgtgtataattgtgtaacaaaattgtctacaataaatcttttggtatttgt

SEQ ID NO: 3879 - protein, 345 aa, Homo sapien
MKNKEHEIEVIDQRLIEARRMMDKLRACIVANYYASAGLLKVSEGSKTCDTMVFNHPAIKKFLESPSRSSSPANQRAETPSANHSESDSLSQHNDFLSDKDNNSNMDIEERLSNNMEQRPSRNTGRDTSRITGSHKTEQRNADLTDETSRLFVKKTIVVGNVSKYIPPDKREENDQSTHKWMVYVRGSRREPSINHFVKKVWFFLHPSYKPNDLVEVREPPFHLTRRGWGEFPVRVQVHFKDSQLKPLSVNTSGGVQTILMPVNKVVQSFSTSKPPAILPVAAPTPVVPSSAPAAVAKVKTEPETPGPSCLSQEGQTAVKTEESSELGNYVIKIDHLETIQQLLT

SEQ ID NO: 3880 - DNA, 6485 bp, Homo sapien
tgcagccatgctgaatcactgttgctgatcagatttcccactggtctgctgggagaatcaagaacagaactaggatccccgagtgcatacacagttcagcagctaccaccctggctgggcctcacacaatggagggtgaaagtgtcaagctgagctcccagactctgatacaggctggggatgatgagaagaaccagaggacgatcactgtcaaccctgcccacatggggaaagcattcaaggttatgaatgaactgcggagtaaacagctgttgtgtgacgtgatgattgtggcagaagatgtcgagatagaagcccaccgtgtggtcctggcagcctgcagcccctacttctgtgcgatgttcacaggtgacatgtctgagagtaaagccaaaaagatagaaatcaaggacgtggatgggcagacgctgagtaagctgattgactacatctatactgctgaaatcgaggtgactgaagagaatgtccaggtgctgctcccggcagccagcttgctgcagctcatggatgttcggcagaactgctgtgacttcctgcagtctcagttgcatcccaccaattgcctgggcatccgtgcgtttgcagatgtacacacctgcactgaccttctgcagcaggccaatgcctacgcagagcagcactttccagaggtgatgctaggagaagaatttcttagcctgagtctggaccaggtgtgcagcttgatatccagcgacaagctgaccgtttcttcagaagagaaggtgtttgaagctgtgatctcatggatcaattatgagaaagaaaaccgtttagagcacatggcaaagctgatggaacatgtccgacttcctctcttacctagggactacctagtccaaacggttgaagaagaagctttgataaagaataacaacacctgtaaagacttcctcattgaggccatgaaataccatctcctccctctggatcagagactattgattaagaacccaaggaccaagcccaggactccagtcagccttcccaaggtcatgattgtggttggcggccaggcacccaaggcaatccgcagtgtggagtgctatgatttcgaggaggaccggtgggatcagattgctgagcttccttccagaagatgcagagcaggtgtggtgttcatggctggccacgtgtatgccgtgggagggtttaatggctcactgcgggtgcggacagtggatgtgtatgacggcgtgaaggaccagtggacgtccattgccagcatgcaggagcgccggagcacactgggcgcagcggtgctcaatgacttgctctacgcagtgggaggctttgatggcagtactggcctagcatcggtggaagcctacagctacaagaccaacgagtggttctttgtggccccgatgaacacgcggcagagcagtgtgggtgtgggcgttgtggaggggaagctatatgctgttgggggttatgatggagcttcccgccagtgtctgagcactgtggaacagtacaacccagcgaccaatgaatggatatacgtggcggacatgagcacccgccgcagtggcgcaggggttggagtgcttagcggacagctgtacgccacaggtgggcatgatgggcctttggtgaggaagagcgttgaggtttacgatcctggaacaaatacctggaagcaagtggcagacatgaacatgtgccggcgcaacgcaggggtctgtgcagtaaatgggctcctgtatgtggttggaggggatgatggatcctgcaacttggcttcggtggagtactacaatcctgtcactgacaaatggacgctgcttccaacgaacatgagcacggggcggagctatgcaggtgttgccgtgattcacaagtccttgtgacccaaactcctactgccaggaggtggaggaaggagcaggtgctgcctgtgactctgaacagcaggaccttggtgactggattcaacttgcttgggagggtctgtgctgctgtgagaaccgctctcctctgacttggcagactggtgttgttcatcgcagtgtggacaccattacccacccccgttcccctgaggtgctctggcctatgccctgagcaaggggggtcttgacatccccaggcagcacctttgggctttgttttggtgtttctacagggacaatacagaccctggagtgtgtgtgtgtgtgtgtgtagaccatggtgtttctctatgtttctctaagttggggggtgagcgtgtgtgacagtctactggatttctttactactgatcctttcgctgtgttaaaaatcaagtcacagagacctctcttctggatttgtcccatggggaccctgagactactaaagctgctttcttctgaaggtccagttggacagtctgggaatgtccagaaataaccagtgagaggggcagttctctggccacacccacttatgtactttaactactgtgactttgtctgcagaagagctggaaaattctcgaagctgcaccgtgtcctctgtgtgctagaataagggacaaatgggttccctgtgcttctcagctcactgtttttccttgagttctcctacaggaagcagatgagaactgcccagtcttcaggtttaggccattggtctttgatgtcatagattccaggcctgggaggtgttatgtctcttcagctgggaaaactagctcttcagagaagcctcgggtaacactgaaaaacaaaacaaaacaaaacaaaaacaggaaaaaaacaaaaaaccaaagtggtaaggattcagttcctgcctataatggtctcagagagggtcctacttttaggttttcccaggacaggacagtccccatttatacttattatcccagtttaattattcacagcaccccattttactcagaagtgttctggtctggaggataaataagaggtcaccctcctccagacccaaagatagatttgtgcctgtgttggatggggtcgtgtgtgattcagatggacattggatggcttcaaaggaatataccactagagctggcccttggcactttgtgacagtggtcaagtctgtctaatgtccttgtcttctttttcttgtgctttccccctattccagggtgtgcaccctctccccaacccccaagaaccccactactgctttccctgtgaggtaggagatatcagtgggtcttggatttgaggcttcctaagatgtgcttgcattttaaaaagggagcttggtgagagctttgctaattcacaggtaaaaattattaacaatagaacttcaagcatcttgaggagcgggcatttgagggggcatggagtaatttgtatttaaaaaaccttaaagttgtgctgttcctaaactagcaaattgctcatgctgaaatttctggcataagcaggggaagtcttgtgtctggagaatagtctcataccttgcagtctgggacaccctccctactttgagaatccacctacaggaagccaaggaactttataaatcctgatgttggacttctgatacgactgggctacttccaagcaggtgctgcaggagattggcatcccccagcccctgcagttagaaaccccgaagtcttcccagccagtgagccactttgtgtatttactgtatatttattgtgccctaaatgtgcaactctcctaaagacaaaacttctctttctgatgttaagcacatgttacttcaacaagatgcttggagaacaacaaggtacccagaatttttagaagccttcagaagaggctaaaatatccagctttgggggacctggaagaaatgtctccaaaggaagcaaggcatgttttagttgagtgctctggtctcactatgaagtggggatgactgtggcttcataactctacctggctgtgggttggaagctgatggaatgagaaatgtcctttctccttctctgaggaaattttgagacttgtttcggtgtgtctgtgtgatggggatgaggctggggttgggatctgatgtatgccattcacagaagctctcaatttcagatgataggtgaattccctgcccctcccccaccactgagaagctagactttcatgcgggagaggctacttttatgtgtcgtcttccggggaagggtccctccactgaaagctagccagtcatgttttctgtttttggatttttgcaattggtttcacctcatgtctccctccctacaaagcactgcctctactgggcgtgctgccaaggccatgtgcactccatcctcatgtatcctttttcacggggaccagaacactggtacgtcatcaccaaagccaatctgctctagctgcccacagatgccaccaaaacctgctatctcttcatcaccaggtacgattctctttccacagtggacacagcaggctattttctagtttgtgctggtcacgtggtagatgaagcctcttactgccccacttagggtggccacggctgcttgtgaatgcagctttgccagtggcatatctgtcatctgattgcggtggtgaaatggaattgaggcccaaggttagaagcagccgagacgccacttggatactgatttgaacaatgtagaagtcagattctgaattccaaagttatttctcataagtacccaatggcatctctccatctacaaagttgcagtattatgcaaataaaactgacctcattttctgctatgcaataagaatacttaattctagttcccgacaagccagttgcaatatcccctaagatgctttttgagctgtcttactttgatatctgttgtgtaacgtttgtatatttctgagccagatcctttcaaagattgcctttttataaaattgaagctatagcttttaggctaaaattttaacgtagatatttttataagatatttttttcaagagtttgaatcgctttttattgtccatggtaatgaaatgttgtgttctttgcatcattcactctcaaacgtagttcatgcctgtagctctcttccttttgtttctcacccttcagaaacatatttttcagtagctccaggtagatgagcctttttttttttttttttaaataccatattcaagggagtctgctgaattttaaaacgcagtcactggtgtttcttgaattgctagggactgatgttatgttcgactcagcacttgcccgtctgtattgattgtgtctttttttttttttttggagtctgctttctgtgggggtgaggccgggctgtctcgtggtggctcccactgacgggcactgagcctggtaccctgtggcatggagaagcctcagggaaaggcctgcccccccagcacatactcccatagtgtcctaggtccagccgaccattccttattctcttctatctccttgttgatctgaagcttccaatagcttgaggcctttgctgctggatgatgccctttttgggagcatcttgtctctaacctttaaaagaggggtcaatcctcatgatccctgtgtgttaagcatatgctttgcaggtgctcacactacacttacaacttgcttcttgagctatgtctctactccaggctctgttttgtgtatttatctgccatttgcatcatggtttttaaaatttattattattattattattgttgggacaggtgccatttaaattgcctccatgctccccatttgcacctagctggatcaagttgggaggctgagcaaactcatattccagttagttggagtttttaaaggctctgtttgcctggagaagcaaggaggttagaatgtaatttttttaagcgtttgcactatttagagtcctaagcccctcatgttcagctgtgctgtgtttctactgaccaagcaggagagccagcagcacttccagcatttgggaatggaagagatttcttctgtagtggataattacagcctcatagcccctgtgcagccttcgtcatgggactcagtgactcatggatatagcatcagccatggcaggaatgcacaggactgtggcatttgcagcatcaaatcaccctagtgccatgtttggttatgagattgtaaattattcgctcccccgtcctcccctcccctcattttcagtggcaatagaggacccttgttgtacttcttgtttaatttgcatattatgtgtaaaatgctttcgttgaaagaaaactgaagacactgaatgtgtatgtctgtgtgggtgctctgtccctgtggttgtcatagccagtcagacttgatcactgacaccccgtacaacatattgcataggtaagatcctcgatctggtgttctctgcgtggctgttagggactgtatatcttgtaaaagaacacttgtcacatgcttgatcagttacagcaatagctgaagaaacatttcctcaaatgtattattttaacaggaatcatgttctaatttcccatcctttaattttaataaaagctgaactgtgtgaa

SEQ ID NO: 3881 - protein, 587 aa, Homo sapien
MEGESVKLSSQTLIQAGDDEKNQRTITVNPAHMGKAFKVMNELRSKQLLCDVMIVAEDVEIEAHRVVLAACSPYFCAMFTGDMSESKAKKIEIKDVDGQTLSKLIDYIYTAEIEVTEENVQVLLPAASLLQLMDVRQNCCDFLQSQLHPTNCLGIRAFADVHTCTDLLQQANAYAEQHFPEVMLGEEFLSLSLDQVCSLISSDKLTVSSEEKVFEAVISWINYEKENRLEHMAKLMEHVRLPLLPRDYLVQTVEEEALIKNNNTCKDFLIEAMKYHLLPLDQRLLIKNPRTKPRTPVSLPKVMIVVGGQAPKAIRSVECYDFEEDRWDQIAELPSRRCRAGVVFMAGHVYAVGGFNGSLRVRTVDVYDGVKDQWTSIASMQERRSTLGAAVLNDLLYAVGGFDGSTGLASVEAYSYKTNEWFFVAPMNTRQSSVGVGVVEGKLYAVGGYDGASRQCLSTVEQYNPATNEWIYVADMSTRRSGAGVGVLSGQLYATGGHDGPLVRKSVEVYDPGTNTWKQVADMNMCRRNAGVCAVNGLLYVVGGDDGSCNLASVEYYNPVTDKWTLLPTNMSTGRSYAGVAVIHKSL

SEQ ID NO: 3882 - DNA, 2192 bp, Homo sapien
tccctgtcctgcgcccgcgcgccccgggagcctacccagcacgcgctccgcgcccactggttccctccagccgccgccgtccagccgagtccccactccggagtcgccgctgccgcggggacatggtcctctgcgttcaggggtgagcacccccttgtaagctcagggctactgttgggtgtcagggaacaaagttttagactgctgcgctccaaagcgggcacacacatgtacctagaacacaccagccactgtccccaccatgatgatgacacagccatggacacacccctgcccagacctcgtcctttgctggctgtggagcggactgggcagcggcccctgtgggccccgtccctggaactgcccaagccagtcatgcagcccttgcctgctggggccttcctcgaggaggtggcagagggtaccccagcccagacagagagtgagccaaaggtgctggacccagaggaggatctgctgtgcatagccaagaccttctcctaccttcgggaatctggctggtattggggttccattacggccagcgaggcccgacaacacctgcagaagatgccagaaggcacgttcttagtacgtgacagcacgcaccccagctacctgttcacgctgtcagtgaaaaccactcgtggccccaccaatgtacgcattgagtatgccgactccagcttccgtctggactccaactgcttgtccaggccacgcatcctggcctttccggatgtggtcagccttgtgcagcactatgtggcctcctgcactgctgatacccgaagcgacagccccgatcctgctcccaccccggccctgcctatgcctaaggaggatgcgcctagtgacccagcactgcctgctcctccaccagccactgctgtacacctaaaactggtgcagccctttgtacgcagaagcagtgcccgcagcctgcaacacctgtgccgccttgtcatcaaccgtctggtggccgacgtggactgcctgccactgccccggcgcatggccgactacctccgacagtaccccttccagctctgactgtacggggcaatctgcccaccctcacccagtcgcaccctggaggggacatcagccccagctggacttgggcccccactgtccctcctccaggcatcctggtgcctgcatacctctggcagctggcccaggaagagccagcaagagcaaggcatgggagaggggaggtgtcacacaacttggaggtaaatgcccccaggccgcatgtggcttcattatactgagccatgtgtcagaggatggggagacaggcaggaccttgtctcacctgtgggctgggcccagacctccactcgcttgcctgccctggccacctgaactgtatgggcactctcagccctggtttttcaatccccagggtcgggtaggacccctactggcagccagcctctgtttctgggaggatgacatgcagaggaactgagatcgacagtgactagtgaccccttgttgaggggtaagccaggctaggggactgcacaattatacactatttatttatttattctccttggggttggtgtcaggggcgagccaaccccacctctatgccctgagccctggtagtccagagaccccaactctgccctggcttctctggttcttccctgtggaaagcccatcctgagacatcttgctggaaccaaggcaatcctggatgtcctggtactgacccacccgtctgtgaatgtgtccactctcttctgcccccagccatatttggggaggatggacaactacaataggtaagaaaatgcagccggagcctcagtccccagcagagcctgtgtctcaccccctcacaggacagagctgtatctgcatagagctggtctcactgtggcgcaggccccggggggagtgcctgtgctgtcaggaagagggggtgctggtttgagggccaccactgcagttctgctaggtctgcttcctgcccaggaaggtgcctgcacatgagaggagagaaatacacgtctgataagacttcatgaaataataattatagcaaagaacagtttggtggtcttttctcttccactgatttttctgtaatgacattatacctttattacctctttattttattacctctataataaaatgatacctttttcatgtaaaaaaaaaaaaaaaaa

SEQ ID NO: 3883 - protein, 258 aa, Homo sapien
MVLCVQGPRPLLAVERTGQRPLWAPSLELPKPVMQPLPAGAFLEEVAEGTPAQTESEPKVLDPEEDLLCIAKTFSYLRESGWYWGSITASEARQHLQKMPEGTFLVRDSTHPSYLFTLSVKTTRGPTNVRIEYADSSFRLDSNCLSRPRILAFPDVVSLVQHYVASCTADTRSDSPDPAPTPALPMPKEDAPSDPALPAPPPATAVHLKLVQPFVRRSSARSLQHLCRLVINRLVADVDCLPLPRRMADYLRQYPFQL

SEQ ID NO: 3884 - DNA, 1478 bp, Homo sapien
tttttgtccttttgggactctaagtgggtcaagaagcaaaaacatccatgtgttgtttggggggaattggcaccattttttcctgactatgtttcaattaactaaagaataaatgatgaagaaattctccttgtagcacaactgtatgctgtgtaaattggtgtgagctcaaagcccagtcatgtgttttacctgtgggtgactctgttgtagaatggtcatattactgcatatgttatcatgacaacttgtgagtttgagtttatatttctcaaagaacaagttacccgtatatgcaacattgcgccattaaaagcttatttctctgtacacaaaatgggtaaaatcttgaaaaaacttagtaatttctcattcctaacacacagacagagtctcactctgtcacccaggctggagtgcagtggcgcaatctcggctcactgcaacctccacctcctgggttcaagcaattctgctgcctcagcctcccgagtagctgggactacaggtgcatgccaccacgcccagctaatttttgtatttttagtagagacggggtttcaccatgttggccaggatggtctcggtctcctgacctcgtgatctgcctgcctcggcctcccaaagtgctgggattacaggcgtgagccactgcgcccagccaacactagtcatttttattttttcactgaacattgatcaatactctaaaatgtttgtcatcctttagaataatgggaattaaagttgagcagttttccgtctctaccaaatccttcaccacaagcagcattctattacagtatgaagaattgtctcatatgttaaaactgtacttttctctaacctttctctcactcctacaaggcccttttctcaaatcatatttctgagagaaatgtatggttctttctcacaggcctgctgatttgtaactgtgccatcgaatagagcaattagatccatcagacctttttcccctcattaggttcagtggaaccattctggttaaaacagcatgaactgaactcagtttacattcatattctatgggcaataccatttggtttttggaactgtttatctgctgttccctatcaagtattaatgtagggatgtcactcaggctgcgttgcactgggctgagttcaactgcgacgctctcactgacgcgtgcttacatgtgcttctcacttccggagcacaggcaggtggctgcggggtcccagctctgaatggatgcccatgatgcaactggggcagcccttgctttttgcttgctctcccacagaaacctttgtccttgcaactttatcctttgtcccgattgggtcccagatacacaaaatgtacaaatgtaaacttgctcattttattaaaattcttttagttctttgttctttctgtaattttttaaaataaaaattgccttgatggagtgatggttttcactcgcaccataaaaaaaaaaaaaaaaa

SEQ ID NO: 3885 - protein, 120 aa, Homo sapien
MTTCEFEFIFLKEQVTRICNIAPLKAYFSVHKMGKILKKLSNFSFLTHRQSLTLSPRLECSGAISAHCNLHLLGSSNSAASASRVAGTTGACHHAQLIFVFLVETGFHHVGQDGLGLLTS

SEQ ID NO: 3886 - DNA, 2330 bp, Homo sapien
  Unsure 2: Unknown base
  Unsure 14: Unknown base
gnccctcgacggcntgcagccgggagagccatggcgggggccgcagcgggcggcagaggcggaggtgcctgggggccggggcgcggaggggccggggggctccggcggggctgctctcccccagcccccgccggctccccccgggctgggctgcagccgctcagggccacgatccccttccagctgcagcagccgcaccagcgccgggacgggggtggccgtgcagccagcgtcccatgctcggtggccccagaaaagtcagtgtgtaggcctcagccacttcaggtccggcgtacattctccctggacaccatcctcagctcctaccttctgggccagtggccacgagatgctgatggggccttcacctgctgcaccaatgacaaggccacccagacgcccctgtcctggcaagagctagaaggtgagcgtgccagttcctgtgcacacaagcgctcagcatcctggggcagcacagaccaccgaaaagagatttccaagttgaagcaacaactgcagaggacgaagctgagccgcagtgggaaagagaaggagcgaggttcaccactcctaggggaccacgcagtgcggggagcactgagggcgtcccctcccagcttcccctcagggtcccctgtcttgcgactcagcccctgcctgcacaggagcctggaagggctcaaccaagagctggaggaggtatttgtgaaggagcagggagaagaggagctgctgaggatccttgatatccctgatgggcaccgggccccagctcctccccagagtggcagctgtgatcatcccctcctcctcctggagcctggcaaccttgccagctctccttccatgtccttggcatctccccagccttgtggcctggccagtcatgaggaacatcggggtgccgccgaggagctggcatccacccccaacgacaaagcctcctctccaggacacccagcctttcttgaagatggcagcccatctccagtccttgcctttgctgcctcccctcgacctaatcatagctacatcttcaaacgggagcccccagaaggctgtgagaaagtgcgtgtgtttgaagaagccacgtctccaggtcctgacctggccttcctgacttcctgtcctgacaagaacaaagtccatttcaacccgactggctcagccttctgccccgtcaacctgatgaagcccctcttccccggcatgggcttcatcttccgtaactgcccctcaaacccgggatctccccttcccccggccagccccaggccaccacctcggaaggatccggaagcctccaaggcctccccactgccattcgagccatggcagcgcaccccaccatcagaagagcctgtgcttttccagagctccctgatggtctgagggtcccacccctgccccactttaccatagagaccagtgccttggtggcaggtccctccccaggtcccctgagatggggtatggaggggcccttccctctcggccttcgagcactttctttcacttactgtgtcaaagccctgggtcctctttttgatgggcaccggcccctctgaacgtgatgggacctgccttctccactagtagctgggcagctcacaattcacacctgtgtacctgccacatccctcacttggtggaaaacacccagaaggtcttgagtcccccacccctgggtgtcagtccaaatgactgtataggaggcccttatttttgtcacagagcaagctggccatgaacgaaggagagaagacgccacagatttccttccctctcctccaggagaccataagatagatcccccatcctctcagccctattcccatgcctccctctcattggaggagctgaccaaagcagccctaacgggccataacacttgaccaattcagctgctggcagagggaggaaacaagtgttttcccaagtggcattttcatctcgctttcaccctgactaaagattgtcttaagtagcagcccagcccgcccagccccaggtgggtagtggggaggagagctggcattcctccaggtggcaaatggcgactctatactctccgcccgccccagggctggatggattagaaaaatccctatttttcttgtatcgatgtagagactctattttctcccaaagacactatttttgcagctgtttgaagtttgtatattttccgtactgcagagcttacacaaaattgaagaatgttaatgttcgagttttcttatcttgtgtttagaggttgttttttgcagatcttggtgttaatagaccaaataaataaataaatattcccagcaaaaaaaaaagtcgac

SEQ ID NO: 3887 - protein, 453 aa, Homo sapien
MAGAAAGGRGGGAWGPGRGGAGGLRRGCSPPAPAGSPRAGLQPLRATIPFQLQQPHQRRDGGGRAASVPCSVAPEKSVCRPQPLQVRRTFSLDTILSSYLLGQWPRDADGAFTCCTNDKATQTPLSWQELEGERASSCAHKRSASWGSTDHRKEISKLKQQLQRTKLSRSGKEKERGSPLLGDHAVRGALRASPPSFPSGSPVLRLSPCLHRSLEGLNQELEEVFVKEQGEEELLRILDIPDGHRAPAPPQSGSCDHPLLLLEPGNLASSPSMSLASPQPCGLASHEEHRGAAEELASTPNDKASSPGHPAFLEDGSPSPVLAFAASPRPNHSYIFKREPPEGCEKVRVFEEATSPGPDLAFLTSCPDKNKVHFNPTGSAFCPVNLMKPLFPGMGFIFRNCPSNPGSPLPPASPRPPPRKDPEASKASPLPFEPWQRTPPSEEPVLFQSSLMV

SEQ ID NO: 3888 - DNA, 3379 bp, Homo sapien
ctggcctgggcctgaagtgagtgagaggcacatgaagagaagtattcaagtatttatacagataggaatcaagataatcaacaatgtctgtcactgaggaagacctgtgccaccatatgaaagtagtagttcgtgtacgtccggaaaacactaaagaaaaagcagctggatttcataaagtggttcatgttgtggataaacatatcctagtttttgatcccaaacaagaagaagtcagttttttccatggaaagaaaactacaaatcaaaatgttataaagaaacaaaataaggatcttaaatttgtatttgatgctgtttttgatgaaacgtcaactcagtcagaagtttttgaacacactactaagccaattcttcgtagttttttgaatggatataattgcacagtacttgcctatggtgccactggtgctgggaagacccacactatgctaggatcagctgatgaacctggagtgatgtatctaacaatgttacacctttacaaatgcatggatgagattaaagaagagaaaatatgtagtactgcagtttcatatctggaggtatataatgaacagattcgtgatctcttagtaaattcagggccacttgctgtccgggaagatacccaaaaaggggtggtcgttcatggacttactttacaccagcccaaatcctcagaagaaattttacatttattggataatggaaacaaaaacaggacacaacatcccactgatatgaatgccacatcttctcgttctcatgctgttttccaaatttacttgcgacaacaagacaaaacagcaagtatcaatcaaaatgtccgtattgccaagatgtcactcattgacctggcaggatctgagcgagcaagtacttccggtgctaaggggacccgatttgtagaaggcacaaatattaatagatcacttttagctcttgggaatgtcatcaatgccttagcagattcaaagagaaagaatcagcatatcccttacagaaatagtaagcttactcgcttgttaaaggattctcttggaggaaactgtcaaactataatgatagctgctgttagtccttcctctgtattctacgatgacacatataacactcttaagtatgctaaccgggcaaaggacattaaatcttctttgaagagcaatgttcttaatgtcaataatcatataactcaatatgtaaagatctgtaatgagcagaaggcagagattttattgttaaaagaaaaactaaaagcctatgaagaacagaaagccttcactaatgaaaatgaccaagcaaagttaatgatttcaaaccctcaggaaaaagaaatcgaaaggtttcaagaaatcctgaactgcttgttccagaatcgagaagaaattagacaagaatatctgaagttggaaatgttacttaaagaaaatgaacttaaatcattctaccaacaacagtgccataaacaaatagaaatgatgtgttctgaagacaaagtagaaaaggccactggaaaacgagatcatagacttgcaatgttgaaaactcgtcgctcctacctggagaaaaggagggaggaggaattgaagcaatttgatgagaatactaattggctccatcgtgtcgaaaaagaaatgggactcttaagtcaaaacggtcatattccaaaggaactcaagaaagatcttcattgtcaccatttgcacctccagaacaaagatttgaaagcacaaattagacatatgatggatctagcttgtcttcaggaacagcaacacaggcagactgaagcagtattgaatgctttacttccaaccctaagaaaacaatattgcacattaaaagaagccggcctgtcaaatgctgcttttgaatctgacttcaaagagatcgaacatttggtagagaggaaaaaagtggtagtttgggctgaccaaactggcgaacaaccaaagcaaaacgatctacccgggatttctgttcttatgaccttttcacaacttggaccagttcagcctattccttgttgctcatcttcaggtggaactaatctggttaagattcctacagaaaaaagaactcggagaaaactaatgccatctcccttgaaaggacagcatactctaaagtctccaccatctcaaagtgtgcagctcaatgattctcttagcaaagaacttcagcctattgtatatacaccagaagactgtagaaaagcttttcaaaatccgtctacagtaaccttaatgaaaccatcatcatttactacaagttttcaggctatcagctcaaacataaacagtgataattgtctgaaaatgttgtgtgaagtagctatccctcataatagaagaaaagaatgtggacaggaggacttggactctacatttactatatgtgaagacatcaagagctcgaagtgtaaattacccgaacaagaatcactaccaaatgataacaaagacattttacaacggcttgatccttcttcattctcaactaagcattctatgcctgtaccaagcatggtgccatcctacatggcaatgactactgctgccaaaaggaaacggaaattaacaagttctacatcaaacagttcgttaactgcagacgtaaattctggatttgccaaacgtgttcgacaagataattcaagtgagaagcacttacaagaaaacaaaccaacaatggaacataaaagaaacatctgtaaaataaatccaagcatggttagaaaatttggaagaaatatttcaaaaggaaatctaagataaatcacttcaaaaccaagcaaaatgaagttgatcaaatctgcttttcaaagtttatccaataccctttcaaaaatatatttaaaatctttgaaagaagacccatcttaaagctaagtttacccaagtactttcagcaagcagaaaaatgaaactctttgttttcttcttttgtgttctaaaaaaataaaatttcaaaagaaaaggttgtcttttaagttttttaaatatttgttgccttttaaaatccctgagtgtaagttaccatggtggcagcttagttttactatgccacaacaagttgactaggacattttagtaaatggtagtgagttaaattatctttattattttttaaaaataagaatttagaagtggtaaaattatggcccaagatgtatttggttctctattatgttttgatacattattttaatcatatatatgactttccttttcaaaaatactttaatgtacaagtgtaaatatatgtgcccataaaatcattgtaaatattatttagtcatcacaaataaaatattgtcccttgctacttgatatattaaagatgtagattttaaagtgaaaaaaaaaaaaaaaaa

SEQ ID NO: 3889 - protein, 898 aa, Homo sapien
MSVTEEDLCHHMKVVVRVRPENTKEKAAGFHKVVHVVDKHILVFDPKQEEVSFFHGKKTTNQNVIKKQNKDLKFVFDAVFDETSTQSEVFEHTTKPILRSFLNGYNCTVLAYGATGAGKTHTMLGSADEPGVMYLTMLHLYKCMDEIKEEKICSTAVSYLEVYNEQIRDLLVNSGPLAVREDTQKGVVVHGLTLHQPKSSEEILHLLDNGNKNRTQHPTDMNATSSRSHAVFQIYLRQQDKTASINQNVRIAKMSLIDLAGSERASTSGAKGTRFVEGTNINRSLLALGNVINALADSKRKNQHIPYRNSKLTRLLKDSLGGNCQTIMIAAVSPSSVFYDDTYNTLKYANRAKDIKSSLKSNVLNVNNHITQYVKICNEQKAEILLLKEKLKAYEEQKAFTNENDQAKLMISNPQEKEIERFQEILNCLFQNREEIRQEYLKLEMLLKENELKSFYQQQCHKQIEMMCSEDKVEKATGKRDHRLAMLKTRRSYLEKRREEELKQFDENTNWLHRVEKEMGLLSQNGHIPKELKKDLHCHHLHLQNKDLKAQIRHMMDLACLQEQQHRQTEAVLNALLPTLRKQYCTLKEAGLSNAAFESDFKEIEHLVERKKVVVWADQTGEQPKQNDLPGISVLMTFSQLGPVQPIPCCSSSGGTNLVKIPTEKRTRRKLMPSPLKGQHTLKSPPSQSVQLNDSLSKELQPIVYTPEDCRKAFQNPSTVTLMKPSSFTTSFQAISSNINSDNCLKMLCEVAIPHNRRKECGQEDLDSTFTICEDIKSSKCKLPEQESLPNDNKDILQRLDPSSFSTKHSMPVPSMVPSYMAMTTAAKRKRKLTSSTSNSSLTADVNSGFAKRVRQDNSSEKHLQENKPTMEHKRNICKINPSMVRKFGRNISKGNLR

SEQ ID NO: 3890 - DNA, 642 bp, Homo sapien
gctgaagtgaaaacgagaccaaggtctagctctactgttggtacttatgagatccagtcctggcaacatggagaggattgtcatctgtctgatggtcatcttcttggggacactggtccacaaatcaagctcccaaggtcaagatcgccacatgattagaatgcgtcaacttatagatattgttgatcagctgaaaaattatgtgaatgacttggtccctgaatttctgccagctccagaagatgtagagacaaactgtgagtggtcagctttttcctgttttcagaaggcccaactaaagtcagcaaatacaggaaacaatgaaaggataatcaatgtatcaattaaaaagctgaagaggaaaccaccttccacaaatgcagggagaagacagaaacacagactaacatgcccttcatgtgattcttatgagaaaaaaccacccaaagaattcctagaaagattcaaatcacttctccaaaagatgattcatcagcatctgtcctctagaacacacggaagtgaagattcctgaggatctaacttgcagttggacactatgttacatactctaatatagtagtgaaagtcatttctttgtattccaagtggaggagccctattaaattatataaagaaata

SEQ ID NO: 3891 - protein, 162 aa, Homo sapien
MRSSPGNMERIVICLMVIFLGTLVHKSSSQGQDRHMIRMRQLIDIVDQLKNYVNDLVPEFLPAPEDVETNCEWSAFSCFQKAQLKSANTGNNERIINVSIKKLKRKPPSTNAGRRQKHRLTCPSCDSYEKKPPKEFLERFKSLLQKMIHQHLSSRTHGSEDS

SEQ ID NO: 3892 - DNA, 1776 bp, Homo sapien
tggttcgtttattcctggggttgtcatatcatggcttataatgacacagacagaaaccagactgagaagctcctaaaaagagtacgagaactggagcaagaggtgcaaagacttaaaaaggaacaggccaaaaataaggaggactcaaacattagagaaaattcagcaggagctggaaaaactaagcgtgcatttgatttcagtgctcatggccgaagacacgtagccctaagaatagcctatatgggctggggataccagggctttgctagtcaggaaaacacaaataataccattgaagagaaactgtttgaagctctaaccaagactcgactagtagaaagcagacagacatccaactatcaccgatgtgggagaacagataaaggagttagtgcctttggacaggtgatctcacttgaccttcgctctcagtttccaaggggcagggattccgaggactttaatgtaaaagaggaggctaatgctgctgctgaagagatccgttatacccacattctcaatcgggtactccctccagacatccgtatattggcctgggcccctgtagaaccaagcttcagtgctaggttcagctgccttgagcggacttaccgctattttttccctcgtgctgatttagatattgtaaccatggattatgcagctcagaagtatgttggcacccatgatttcaggaacttgtgtaaaatggatgtagccaacggtgtgattaattttcagaggactattctatctgctcaagtacagctagtgggccagagcccaggtgaggggagatggcaagaacctttccagttatgtcagtttgaagtgactggccaggcattcctttatcatcaagtccgatgtatgatggctatcctctttctgattggccaaggaatggagaagccagagattattgatgagctgctgaatatagagaaaaatccccaaaagcctcaatatagtatggctgtagaatttcctctagtcttatatgactgtaagtttgaaaatgtcaagtggatctatgaccaggaggctcaggagttcaatattacccacctacaacaactgtgggctaatcatgctgtcaaaactcacatgttgtatagtatgctacaaggactggacactgttccagtaccctgtggaataggaccaaagatggatggaatgacagaatggggaaatgttaagccctctgtcataaagcagaccagtgcctttgtagaaggagtgaagatgcgcacatataagcccctcatggaccgtcctaaatgccaaggactggaatcccggatccagcattttgtacgtaggggacgaattgagcacccacatttattccatgaggaagaaacaaaagccaaaagggactgtaatgacacactagaggaagagaatactaatttggagacaccaacgaagagggtctgtgttgacacagaaattaaaagcatcatttaaccatagacaatttgccaggatctaggaaccacctaatggtaggtggacagaaaaggaaaaaaaaaaaaatttacttgcaagtactaggaattcagatgatcagctcttaaaaaaaaaaaaaaagcaaaaagactaaagccctattaaggaagttattgctttaataagaaatttcaaatattctcttatcccggtccaaaaggattaagcgattaaagaacgtaaaatggagatgtatttacatacacctggaaacctgtgccttgtattcaaattcattaaagcctaatcctgcaagaa

SEQ ID NO: 3893 - protein, 481 aa, Homo sapien
MAYNDTDRNQTEKLLKRVRELEQEVQRLKKEQAKNKEDSNIRENSAGAGKTKRAFDFSAHGRRHVALRIAYMGWGYQGFASQENTNNTIEEKLFEALTKTRLVESRQTSNYHRCGRTDKGVSAFGQVISLDLRSQFPRGRDSEDFNVKEEANAAAEEIRYTHILNRVLPPDIRILAWAPVEPSFSARFSCLERTYRYFFPRADLDIVTMDYAAQKYVGTHDFRNLCKMDVANGVINFQRTILSAQVQLVGQSPGEGRWQEPFQLCQFEVTGQAFLYHQVRCMMAILFLIGQGMEKPEIIDELLNIEKNPQKPQYSMAVEFPLVLYDCKFENVKWIYDQEAQEFNITHLQQLWANHAVKTHMLYSMLQGLDTVPVPCGIGPKMDGMTEWGNVKPSVIKQTSAFVEGVKMRTYKPLMDRPKCQGLESRIQHFVRRGRIEHPHLFHEEETKAKRDCNDTLEEENTNLETPTKRVCVDTEIKSII

SEQ ID NO: 3894 - DNA, 2025 bp, Homo sapien
cttctgtgtgtgcacatgtgtaatacatatctgggatcaaagctatctatataaagtccttgattctgtgtgggttcaaacacatttcaaagcttcaggatcctgaaaggttttgctctacttcctgaagacctgaacaccgctcccataaagccatggcttgccttggatttcagcggcacaaggctcagctgaacctggctaccaggacctggccctgcactctcctgttttttcttctcttcatccctgtcttctgcaaagcaatgcacgtggcccagcctgctgtggtactggccagcagccgaggcatcgccagctttgtgtgtgagtatgcatctccaggcaaagccactgaggtccgggtgacagtgcttcggcaggctgacagccaggtgactgaagtctgtgcggcaacctacatgatggggaatgagttgaccttcctagatgattccatctgcacgggcacctccagtggaaatcaagtgaacctcactatccaaggactgagggccatggacacgggactctacatctgcaaggtggagctcatgtacccaccgccatactacctgggcataggcaacggaacccagatttatgtaattgatccagaaccgtgcccagattctgacttcctcctctggatccttgcagcagttagttcggggttgtttttttatagctttctcctcacagctgtttctttgagcaaaatgctaaagaaaagaagccctcttacaacaggggtctatgtgaaaatgcccccaacagagccagaatgtgaaaagcaatttcagccttattttattcccatcaattgagaaaccattatgaagaagagagtccatatttcaatttccaagagctgaggcaattctaacttttttgctatccagctatttttatttgtttgtgcatttggggggaattcatctctctttaatataaagttggatgcggaacccaaattacgtgtactacaatttaaagcaaaggagtagaaagacagagctgggatgtttctgtcacatcagctccactttcagtgaaagcatcacttgggattaatatggggatgcagcattatgatgtgggtcaaggaattaagttagggaatggcacagcccaaagaaggaaaaggcagggagcgagggagaagactatattgtacacaccttatatttacgtatgagacgtttatagccgaaatgatcttttcaagttaaattttatgccttttatttcttaaacaaatgtatgattacatcaaggcttcaaaaatactcacatggctatgttttagccagtgatgctaaaggttgtattgcatatatacatatatatatatatatatatatatatatatatatatatatatatatattttaatttgatagtattgtgcatagagccacgtatgtttttgtgtatttgttaatggtttgaatataaacactatatggcagtgtctttccaccttgggtcccagggaagttttgtggaggagctcaggacactaatacaccaggtagaacacaaggtcatttgctaactagcttggaaactggatgaggtcatagcagtgcttgattgcgtggaattgtgctgagttggtgttgacatgtgctttggggcttttacaccagttcctttcaatggtttgcaaggaagccacagctggtggtatctgagttgacttgacagaacactgtcttgaagacaatggcttactccaggagacccacaggtatgaccttctaggaagctccagttcgatgggcccaattcttacaaacatgtggttaatgccatggacagaagaaggcagcaggtggcagaatggggtgcatgaaggtttctgaaaattaacactgcttgtgtttttaactcaatattttccatgaaaatgcaacaacatgtataatatttttaattaaataaaaatctgtggtggtcgttttaaaaaaaaaaaaaaaaaaaaaaaaaaaaaaaaaaaaaaaaaaaaaaaaaaaaaaaaaa

SEQ ID NO: 3895 - protein, 223 aa, Homo sapien
MACLGFQRHKAQLNLATRTWPCTLLFFLLFIPVFCKAMHVAQPAVVLASSRGIASFVCEYASPGKATEVRVTVLRQADSQVTEVCAATYMMGNELTFLDDSICTGTSSGNQVNLTIQGLRAMDTGLYICKVELMYPPPYYLGIGNGTQIYVIDPEPCPDSDFLLWILAAVSSGLFFYSFLLTAVSLSKMLKKRSPLTTGVYVKMPPTEPECEKQFQPYFIPIN

SEQ ID NO: 3896 - DNA, 330 bp, Homo sapien
atggcggcctcagcagcgcgaggtgctgcggcgctgcgtagaagtatcaatcagccggttgcttttgtgagaagaattccttggactgcggcgtcgagtcagctgaaagaacactttgcacagttcggccatgtcagaaggtgcattttaccttttgacaaggagactggctttcacagaggtttgggttgggttcagttttcttcagaagaaggacttcggaatgcactacaacaggaaaatcatattatagatggagtaaaggtccaggttcacactagaaggccaaaacttccgcaaacatctgatgatgaaaagaaagatttttga

SEQ ID NO: 3897 - protein, 109 aa, Homo sapien
MAASAARGAAALRRSINQPVAFVRRIPWTAASSQLKEHFAQFGHVRRCILPFDKETGFHRGLGWVQFSSEEGLRNALQQENHIIDGVKVQVHTRRPKLPQTSDDEKKDF

SEQ ID NO: 3898 - DNA, 1148 bp, Homo sapien
ggcacgaggccacgagctgttgtgcatccagaggtggaattggggcccggcattccctcctcgtcccgggctggcccttgcccccaccctgcaactcctggttgagatgggctcagccaagagcgtcccagtcacaccagcgcggcctccgccgcacaacaagcatctggctcgagtggcggacccccgttcacctagtgctggcatcctgcgcactcccatccaggtggagagctctccacagccaggcctaccagcaggggagcaactggagggtcttaaacatgcccaggactcagatccccgctctcctactcttggtattgcacggacacctatgaagaccagcagtggagaccccccaagcccactggtgaaacagctgagtgaagtatttgaaactgaagactctaaatcaaatcttcccccagagcctgttctgcccccagaggcacctttatcttctgaattggacttgcctctgggtacccagttatctgttgaggaacagatgccaccttggaaccagactgagttcccctccaaacaggtgttttccaaggaggaagcaagacagcccacagaaacccctgtggccagccagagctccgacaagccctcaagggaccctgagactcccagatcttcaggttctatgcgcaatagatggaaaccaaacagcagcaaggtactagggagatcccccctcaccatcctgcaggatgacaactcccctggcaccctgacactacgacagggtaagcggccttcacccctaagtgaaaatgttagtgaactaaaggaaggagccattcttggaactggacgacttctgaaaactggaggacgagcatgggagcaaggccaggaccatgacaaggaaaatcagcactttcccttggtggagagctaggccctgcatggccccagcaatgcagtcacccagggcctggtgatatctgtgtcctctcaccccttctttcccagggatactgaggaatggcttgttttcttagactcctcctcagctaccaaactgggactcacagctttattgggctttctttgtgtcttgtgtgtttcttttatattaaaggaagtaattttaaatgttactttaaaaaggtaaaaaaaaaaaaaaaaaaaaa

SEQ ID NO: 3899 - protein, 268 aa, Homo sapien
MGSAKSVPVTPARPPPHNKHLARVADPRSPSAGILRTPIQVESSPQPGLPAGEQLEGLKHAQDSDPRSPTLGIARTPMKTSSGDPPSPLVKQLSEVFETEDSKSNLPPEPVLPPEAPLSSELDLPLGTQLSVEEQMPPWNQTEFPSKQVFSKEEARQPTETPVASQSSDKPSRDPETPRSSGSMRNRWKPNSSKVLGRSPLTILQDDNSPGTLTLRQGKRPSPLSENVSELKEGAILGTGRLLKTGGRAWEQGQDHDKENQHFPLVES

SEQ ID NO: 3900 - DNA, 540 bp, Homo sapien
tgctccgtctcacagggatctttttgtatatttggcttagcatcatacatttgccatgttgtttcatcatctgcctaatttactgtttttgaatatttcatttgtctctactaaaaatacaaaaattgtttagctctgtttttcataatagaaatagaaaaggtaaaattgcttttcttctgaaaagaacaagtattgttcatccaagaagggtttttgtgactgaatcagcagtgcctgccctagtcatagctgtgcttcaaaaacctcagcatgattagtgttggagcaaaacaaggaagcaaagcaaatactgtttttgaaattctatctgttgcttgaactattttgtaataattaaactttgatgttgagaaatcacaactttattgtacacttcattgcaacttgaaattcatggtcttaaagtgagatttgaatttctattgagcgcctttaaaaaagtaataccaaaccccaaaaacaactgatataattactcaagaaatatttgcaacattagtttttttccagcatcag

SEQ ID NO: 3901 - protein, 22 aa, Homo sapien
MISVGAKQGSKANTVFEILSVA

SEQ ID NO: 3902 - DNA, 851 bp, Homo sapien
gttcaggtcccgcgaccgctacccgcaccctaaatcccagaggttggccccctgaggtgtgagtgaaatgagcttttgctttattttccaagtttctctctcaccttcaggggcattcttcgggggtgcatcagagggagggcagagcctgaggatctaagcgaaggcttccccggtgtaatttcctgggctgtttgtgaggagagatcgaattcgcctcctgctctcaggcctctctgctcctgtcttttgtttggatgccggcgctgctgcctgtggcctcccgccttttgttgctaccccgagtcttgctgaccatggcctctggaagccctccgacccagccctcgccggcctcggattccggctctggctacgttccgggctcggtctctgcagcctttgttacttgccccaacgagaaggtcgccaaggagatcgccagggccgtggtggagaagcgcctagcagcctgcgtcaacctcatccctcagattacatccatctatgagtggaaagggaagatcgaggaagacagtgaggtgctgatgatgattaaaacccaaagttccttggtcccagctttgacagattttgttcgttctgtgcacccttacgaagtggccgaggtaattgcattgcctgtggaacaggggaactttccgtacctgcagtgggtgcgccaggtcacagagtcagtttctgactctatcacagtcctgccatgatgagccctgttcctgctcatcatgaagatccccgcgatacttcaacgccttctgacttccaggtgatgactgggcccccaataaatcccgtctttgggtctctctgccaaaaaaaaaaaaaaa

SEQ ID NO: 3903 - protein, 156 aa, Homo sapien
MPALLPVASRLLLLPRVLLTMASGSPPTQPSPASDSGSGYVPGSVSAAFVTCPNEKVAKEIARAVVEKRLAACVNLIPQITSIYEWKGKIEEDSEVLMMIKTQSSLVPALTDFVRSVHPYEVAEVIALPVEQGNFPYLQWVRQVTESVSDSITVLP

SEQ ID NO: 3904 - DNA, 1341 bp, Homo sapien
  Unsure 69: Unknown base
actggggcccacagtcagacatgagccactggtgggacagaaataggctcctggttctgtgtgatccanagttggtgcttttctgtctatccctagctgttggtcaccaccagctttctgcatattttctcacggtgcctctcatttcccagagccgcctggagcccaaggctgtacacgtgccctgtgctgattctctgcctaggaaaggaccatgcagctagagatcaaagtggccctgaacttcatcatctcctacttgtacaacaagctgccccggcgccgggcagacctgtttggggaggagctagagcggcttttgaaaaagaaatatgaaggccactggtaccctgagaagccactgaaaggctctggcttccgctgtgttcacattggggagatggtggaccccgtggtggagctggccgccaagcggagtggcctggcagtggaagatgtgcgggccaatgtgcctgaggagctgagtgtctggattgatccctttgaggtgtcctaccagattggtgagaagggagctgtgaaagtgctgtacctggatgacagtgagggttgcggtgccccagagctggacaaggagatcaagagcagcttcaaccctgacgcccaggtgttcgtgcccattggcagccaggacagctccctgtccaactccccatcgccatcctttggccagtcacccagccctaccttcattccccgctccgctcagcccatcaccttcaccaccgcctccttcgctgccaccaaatttggctccactaagatgaagaaggggggcggggcagcaagtggtgggggtgtagccagcagtggggcgggtggccagcagccaccacagcagcctcgcatggcccgctcacccaccaacagcctgctgaagcacaagagcctctctctgtctatgcattcactgaacttcatcacggccaacccggcccctcagtcccagctctcacccaatgccaaggagttcgtgtacaacggtggtggctcacccagcctcttctttgatgcggccgatggccagggcagcggcaccccaggcccgtttggaggcagtggggctggcacctgcaacagcagcagctttgacatggcccaggtatttggaggtggtgccaacagcctcttcctggagaagacaccctttgtggaaggcctcagctacaacctgaacaccatgcagtatcccagccagcagttccagcccgtggtgctggccaactgaccatctacctgcccgtggggccaggagcacccaagaccacagaaaagagaaaggaaaggccaaaaaaaagaggaaaagaaaaaaaaaaaaaa

SEQ ID NO: 3905 - protein, 344 aa, Homo sapien
MQLEIKVALNFIISYLYNKLPRRRADLFGEELERLLKKKYEGHWYPEKPLKGSGFRCVHIGEMVDPVVELAAKRSGLAVEDVRANVPEELSVWIDPFEVSYQIGEKGAVKVLYLDDSEGCGAPELDKEIKSSFNPDAQVFVPIGSQDSSLSNSPSPSFGQSPSPTFIPRSAQPITFTTASFAATKFGSTKMKKGGGAASGGGVASSGAGGQQPPQQPRMARSPTNSLLKHKSLSLSMHSLNFITANPAPQSQLSPNAKEFVYNGGGSPSLFFDAADGQGSGTPGPFGGSGAGTCNSSSFDMAQVFGGGANSLFLEKTPFVEGLSYNLNTMQYPSQQFQPVVLAN

SEQ ID NO: 3906 - DNA, 4438 bp, Homo sapien
  Unsure 312: Unknown base
  Unsure 3415: Unknown base
  Unsure 3451: Unknown base
  Unsure 3671: Unknown base
  Unsure 3880: Unknown base
gcggccgctgaattctagggcggagcgaagagaaccggtcgcggcaatcctagcgcgcagcagcagcagcagcagcagcacccgcatccgctgcgggagtccgagccggaaccacacccaagtagctgccctttcctcttctgtcatctcaccgccccaccacagaccgcgttccccgaggaaaccggccgcccacgcccggagcatcctcccctgttgagcgggcgctgacggacccggcggcatgatgcggctgcgaggctcggggatgctgcgggacctgctcctgcggtcgcccgccggcgtgagcgngactctgcggcgggcacagcccttggtcaccctgtgccggcgtccccgaggcgggggacggccggccgcgggcccggctgccgccgcgcgactccacccgtggtggggcgggggcggctggccggcggagcccctcgcgcggggcctgtccagctctccttcggagatcttgcaggagctgggcaaggggagcacgcatccccagcccggggtgtcgccacccgctgccccggcggcgcccggccccaaggacggccccggggagacggacgcgtttggcaacagcgagggcaaagagctggtggcctcaggtgaaaacaaaataaaacagggtctgttacctagcttggaagatttgctgttctatacaattgctgaaggacaagagaaaatacctgttcataaatttattacagcactcaaatctacaggattgcgaacgtctgatcccaggttgaaagagtgtatggatatgttaagattaactcttcaaacaacatcagatggtgtcatgctagacaaagatctttttaaaaaatgtgttcagagcaacattgttttgttgacacaagcatttagaagaaagtttgtgattcctgactttatgtcttttacctcacacattgatgagttatatgaaagtgctaaaaagcagtctggaggaaaggttgcagattatattcctcaactggccaaattcagtcccgatttgtggggtgtgtctgtttgtacagcagatggacagaggcattctactggagataccaaagttcccttctgtcttcagtcctgtgtaaaacctttgaaatatgccattgctgttaatgatcttggaactgaatatgtgcatcgatatgttggaaaagagccgagtggactaagattcaacaaactatttttgaatgaagatgataaaccacataatcctatggtaaatgctggagcaattgttgtgacttcactaataaagcaaggagtaaataatgctgaaaaatttgactatgtcatgcagtttttgaataagatggctggtaatgaatatgttggattcagtaatgcaacgtttcagtctgaaagagaaagtggagatcgaaattttgcaataggatattacttaaaagaaaagaagtgttttccagaaggcacagacatggttggtatattagacttctacttccagctgtgctccattgaagtgacttgtgaatcagccagtgtgatggctgcgacactggctaatggtggtttctgcccaattactggtgaaagagtactgagccctgaagcagttcgaaatacattgagtttgatgcattcctgtggcatgtatgacttctcagggcagtttgctttccatgttggtcttcctgcaaaatctggagttgctgggggcattcttttagttgtccccaatgttatgggtatgatgtgctggtctcctcctctggataagatgggcaacagtgttaagggaattcacttttgtcacgatcttgtttctctgtgtaatttccataactatgataatttgagacactttgcaaaaaaacttgatcctcgaagagaaggtggtgatcaaaggcattcctttggaccattggactatgaaagtctccaacaagaacttgctttaaaagagacagtatggaaaaaagtgtcacctgagtcaaatgaggacatctctacaactgtagtatatagaatggaaagtctgggagagaaaagctaaagaaatgggttctagtttcagaatgtttcttcatttaatctttcaaacatctttagcttttttttgcaagttataaatatttatttgaggtattttttgttctcaatcttgggtgctggagccataaagcttttttttccttttaatctttgtataaaggcagtagattaagaagtgcatttgttggtctttaaaaagtatttacaagtacataaatttgctttatttttaaaaatacaaaaaggaaaaatttaaattttttttgatgtaattaaaatgttaactatgtggtcagataatcccattttacaatagtaacagaaaattgtaattcttagttctaaaattcacaaattaaactcataagctttgttgcattttgttttttcttttccatttttaaaactaatgtgatgtctttagtggcaatagaaggtacttctatgctaaatacaaaactaaaaaggcaaaataatgaaccccaaattattttatttaaaatagcagtggattataaaattagcttgtgtttacatttatgccatttttggtgatagattggctttacattttaaaaaatttatttaaaaatttatcaaatgctttaaaatatgactcctactttttttattttgcaactcctctgttctgtcagagttgttatatacaggagtgtcttatgttactaaaacattccagccaaagaatttcagatgtgagataatgatgtttcatcaataaaaagctataatggttagttactcagaaggagaaacagtgagtgtcttcaagtgaattgttcacctaaacaattttattttcatattatccacataactttttctatgttatatttaaatatgaatggcaaattttggtttttagcttttacattttattatcttaattttataaatgctaatatttcttttgtgataagttatagcatctcataaagtttgttctatttgaagttttttagagtacttgagaaatgaatttagtctgcaggtagtaagtatgctactaaaatacgttagatctaaatccttttatttggtataaaaatgcaatattgagaatcaaaacttgtttttaagagaactatagattctacacaacctgatttcaagtaattattcatagtatttatagttgtcttggcaaagtgattgtaaaattctgtaggacctattcacacttcttccttcttccatatacttctctggttttccccatagttcccctataatttcaagtttgttgaaacctgttaattttagtgggggattagaagaaaaacttggtggtttcttagcatgatggtgtatgtatgtggtaatggaaagtctgtaaaagtaaatatagtgtagnaaaaaagatttcactgagtattttagatactagtgnaaataaagatagaaaatcttgatcataatgtcttaagtttgggaactgtgatattaagaaaagaaattcccttctagaggtgctggccaaaaagccttttgggctaacttaagtattaaatttatatatttaaataattatattttaagttgtagaggattttcccaaggattttatgcttacttgaatgttctttgaatgttcagatgcatatcctaanctggatgcttctcaaggccttactgcatatttgtgttgcatatttatgttagttgcaccagggccatttgtagtttgggcaaccgaatgccttaattggaaaaaaggcattgtggtttcccctattatctaaattgttacattttaccatttcattccgaagttggttttactttattaaatgaagatttagttttcatatcgtatacntagctgtatagatttcaaaattaggttgttaatttgtgtcacttactatttttgtgttggtaatgctttaaatgcatacttaaaaatgaagtactgttatctaagctactgtgtttagaaaatgttaagaatgagcagaaatttttatagaaaagataaacggaagaagagataagatactgcgaataggccctcaaacttaaaaaagaaaaaactttgccagttttaaggacatattttgattctttcagtatcttaacacctttttaaacaaagttcttgatagtaccactattattgggtttgttttatgccattattgattcttgatattcaagcatttacaatgtagcatatttgattttcttttttctttctttttttggcatgtttttagcataaatgttgcattttatcttagtgtttggatgaaaacatttgtgttgtttagctttcatttgctttgtatatttaataatgtacctttattttccagtatgcctacattttgtattgcacaataaatttattttaagctgaaaaaaaaaaaaaaaaaaa

SEQ ID NO: 3907 - protein, 598 aa, Homo sapien
  unsure 23: unknown amino acid
MMRLRGSGMLRDLLLRSPAGVSXTLRRAQPLVTLCRRPRGGGRPAAGPAAAARLHPWWGGGGWPAEPLARGLSSSPSEILQELGKGSTHPQPGVSPPAAPAAPGPKDGPGETDAFGNSEGKELVASGENKIKQGLLPSLEDLLFYTIAEGQEKIPVHKFITALKSTGLRTSDPRLKECMDMLRLTLQTTSDGVMLDKDLFKKCVQSNIVLLTQAFRRKFVIPDFMSFTSHIDELYESAKKQSGGKVADYIPQLAKFSPDLWGVSVCTADGQRHSTGDTKVPFCLQSCVKPLKYAIAVNDLGTEYVHRYVGKEPSGLRFNKLFLNEDDKPHNPMVNAGAIVVTSLIKQGVNNAEKFDYVMQFLNKMAGNEYVGFSNATFQSERESGDRNFAIGYYLKEKKCFPEGTDMVGILDFYFQLCSIEVTCESASVMAATLANGGFCPITGERVLSPEAVRNTLSLMHSCGMYDFSGQFAFHVGLPAKSGVAGGILLVVPNVMGMMCWSPPLDKMGNSVKGIHFCHDLVSLCNFHNYDNLRHFAKKLDPRREGGDQRHSFGPLDYESLQQELALKETVWKKVSPESNEDISTTVVYRMESLGEKS

SEQ ID NO: 3908 - DNA, 2307 bp, Homo sapien
gtgactgtggagtttgaattgggtggcggttgactgtagagccgctctctctcactggcacagcgaggttttgctcagcccttgtctcgggaccgcagcctccgccgagcgccatggctcctaggaagggcagtagtcgggtggccaagaccaactccttacggaggcggaagctcgcctcctttctgaaagacttcgaccgtgaagtggaaatacgaatcaagcaaattgagtcagacaggcagaacctcctcaaggaggtggataacctctacaacatcgagatcctgcggctccccaaggctctgcgcgagatgaactggcttgactacttcgcccttggaggaaacaaacaggccctggaagaggcggcaacagctgacctggatatcaccgaaataaacaaactaacagcagaagctattcagacacccctgaaatctgccaaaacacgaaaggtaatacaggtagatgaaatgatagtggaagaggaagaagaagaagaaaatgaacgtaagaatcttcaaactgcaagagtcaaaaggtgtcctccatccaagaagagaactcagtccatacaaggaaaaggaaaagggaaaaggtcaagccgtgctaacactgttaccccagccgtgggccgattggaggtgtccatggtcaaaccaactccaggcctgacacccaggtttgactcaagggtcttcaagacccctggcctgcgtactccagcagcaggagagcggatttacaacatctcagggaatggcagccctcttgctgacagcaaagagatcttcctcactgtgccagtgggcggcggagagagcctgcgattattggccagtgacttgcagaggcacagtattgcccagctggatccagaggccttgggaaacattaagaagctctccaaccgtctcgcccaaatctgcagcagcatacggacccacaaatgagacaccaaagttgacaggatggacttttaatgggcacttctgggaccctgaagagacttcttcccttcaggcttattgtttgagtgtgaagttccagagcaaggagccatgttcctctaagggaattcaggaattcagacgtgctagtcccacaccagttaggtagagctgtctgttcaccctcccatcccagctgatcccagtcactgcttgctggggccatgccatggaagcttcccatcagtctcccagctgaatcctccctgctctctgagctgctgccttttgcctcctgcaactcaacatcctcttcaccctgccctgcctgcagttgagggggcgaagaagaaccctgtgttctcaggaagactgcctccaccaccgctacccagagaacctctgcatctggcatttctgctctctatgcttgagaccgggaggtttaggctcagataagtgagctctgggccatgagagggtaggtccagaaggtggggggaactgtacagatcagcagagcaggacagttggcagcagtgacctcagtagggaacatgtccgtctaccctctcgcactcatgacacctccccctaccagccctcctcttcctcctcctcctcctcctgtgggaggtggtcagtgggacttagggatctttcacctgctgtgcccagtagttctgaagtctgcttgtggagcagtgttttatgtttatccctgtttactgaagaccaaatactggtttggagacaacttccatgtcttgctcttctacctccctagttagtggaaatttggataagggaactgtagggcccagattctggaggttttatgtcattggccacagaataactgtctctaagctatccatggtccagtggtccctgccaagtctgtagacttcagagagcacttctctcttatggggttcatgggaacaggggcgggtgtgacttgcttggtggcctcattccatgtgtgcctgtgcctggggcatggactttgttaagcagagtcagcagtgaggtcctcattctccagccagcctctctgccctggagaatcatgtgctatgttctaagaatttgagaactagagtcctcatccccaggcttgaaggcacatggctttctcatgtagggctctctgtggtatttgttattattttgcaacaagaccattttagtaaaacagtcctgttcaagttgtattcttttaagttcttttattctcctttccctgagatttttgtatatattgttctgagtaatggtatctttgagctgattgttctaatcagagctggtacctactttcaataaattctggttttgtgttttcttctgt

SEQ ID NO: 3909 - protein, 280 aa, Homo sapien
MAPRKGSSRVAKTNSLRRRKLASFLKDFDREVEIRIKQIESDRQNLLKEVDNLYNIEILRLPKALREMNWLDYFALGGNKQALEEAATADLDITEINKLTAEAIQTPLKSAKTRKVIQVDEMIVEEEEEEENERKNLQTARVKRCPPSKKRTQSIQGKGKGKRSSRANTVTPAVGRLEVSMVKPTPGLTPRFDSRVFKTPGLRTPAAGERIYNISGNGSPLADSKEIFLTVPVGGGESLRLLASDLQRHSIAQLDPEALGNIKKLSNRLAQICSSIRTHK

SEQ ID NO: 3910 - DNA, 1182 bp, Homo sapien
gcggccggcggcgtctcctcccgggacgctgaggggcccgaggagaccgtgaggctctggcctgcagctcgcgccgccatggacgctgccgaggtcgaattcctcgccgagaaggagctggttaccattatccccaacttcagtctggacaagatctacctcatcgggggggacctggggccttttaaccctggtttacccgtggaagtgcccctgtggctggcgattaacctgaaacaaagacagaaatgtcgcctgctccctccagagtggatggatgtagaaaagttggagaagatgagggatcatgaacgaaaggaagaaacttttaccccaatgcccagcccttactacatggaacttacgaagctcctgttaaatcatgcttcagacaacatcccgaaggcagacgaaatccggaccctggtcaaggatatgtgggacactcgtatagccaaactccgagtgtctgctgacagctttgtgagacagcaggaggcacatgccaagctggataacttgaccttgatggagatcaacaccagcgggactttcctcacacaagcgctcaaccacatgtacaaactccgcacgaacctccagcctctggagagtactcagtctcaggacttctagagaaaggcctggtgcaggcggcttgctgggggatgtgagcgctcaggatgtgatgaggtactcgtggttctggagctctagaaacacttctgatgcatgaaaaatgtgtgatggtgcaaggaatggattcaggatgttgttggagaaacaagtttgtgattagtccttaaaacttagctccctgggacattcttcaattccacatctgtttctagaaaccagccctttttccccccacttttgagaaataaaaaagccttaggtaaataagtcattctccctagcagagccacttgggtctcctgcatggaagccgtcacacttgggcaggtgttcagtgactggtaggtgtagatacagcaggagtggccatgtggtccacggctttttaccccttcttgatcctgatttcttgggctgaatttagactctctcacagaggtggctcacagagaaggatggcagatggtgcagccaacaatgctgaccggtgcttatcctctaagccctgatccacaataaaaatggacccaactcaaaaaaaaa

SEQ ID NO: 3911 - protein, 185 aa, Homo sapien
MDAAEVEFLAEKELVTIIPNFSLDKIYLIGGDLGPFNPGLPVEVPLWLAINLKQRQKCRLLPPEWMDVEKLEKMRDHERKEETFTPMPSPYYMELTKLLLNHASDNIPKADEIRTLVKDMWDTRIAKLRVSADSFVRQQEAHAKLDNLTLMEINTSGTFLTQALNHMYKLRTNLQPLESTQSQDF

SEQ ID NO: 3912 - DNA, 895 bp, Homo sapien
gcggagcgaggctggaggcgcgggagggcagcgagaggttcgcgggtgcagcgcacaggagaccatgtccgggggcagcagctgcagccagaccccaagccgggccatccccgccactcgccgggtggtgctcggcgacggcgtgcagctcccgcccggggactacagcacgacccccggcggcacgctcttcagcaccaccccgggaggtaccaggatcatctatgaccggaaattcctgatggagtgtcggaactcacctgtgaccaaaacacccccaagggatctgcccaccattccgggggtcaccagcccttccagtgatgagccccccatggaagccagccagagccacctgcgcaatagcccagaagataagcgggcgggcggtgaagagtcacagtttgagatggacatttaaagcaccagccatcgtgtggagcactaccaaggggcccctcagggccttcctgggaggagtcccaccagccaggccttatgaaagtgatcatactgggcaggcgttggcgtggggtcggacaccccagccctttctccctcactcagggcacctgccccctcctcttcgtgaacaccagcagatacctccttgtgcctccactgatgcaggagctgccaccccaaggggagtgacccctgccagcacaccctgcagccaagggccaggaagtggacaagaacgaacccttccttccgaatgatcagcagttccagcccctcgctgctgggggcgcaaccaccccttccttaggttgatgtgcttgggaaagctccctccccctccttccccaagagaggaaataaaagccaccttcgccctaggaaaaaaaaaaaaaaaaaaaaaaaaaaaaaaaaaaaaaaaaaaaaaaaaaaa

SEQ ID NO: 3913 - protein, 118 aa, Homo sapien
MSGGSSCSQTPSRAIPATRRVVLGDGVQLPPGDYSTTPGGTLFSTTPGGTRIIYDRKFLMECRNSPVTKTPPRDLPTIPGVTSPSSDEPPMEASQSHLRNSPEDKRAGGEESQFEMDI

SEQ ID NO: 3914 - DNA, 3084 bp, Homo sapien; identical to SEQ ID NO: 2501

SEQ ID NO: 3915 - protein, 399 aa, Homo sapien; identical to SEQ ID NO: 2502

SEQ ID NO: 3916 - DNA, 2509 bp, Homo sapien
ctcgccgagatgacctgggcacctctgcgttgaatcggcaaatactgatcaagccgcatttattctgctctcaggaactctaagtctagcagagaagatgaggcggtagaagttcatcaatggcttggctggaggacaagcaaattgaggacattggcaacggagtgatcaaaatgatagatcatgaggcctaaaatgaataaggaaagaagagaagtggcagaggctgagaacagaaagagagggtggaggggctgtaaatcttgaagattagggtataatatgagtatatgggtaagaattggaagaattgtgtaggaggcagtagtcaaaaagtagaagcagtttggaagagtagttacaaatatcaagagccaggtggctaaaaggtggagctataggtcattgaagctcaagaaactgagtctctagggcattggttaagtcatctgtctagacttcaaagttgtctaggatgataattcagaagactgatctgtgccaaagtcacaggtttttcacgactgaaaacaacatagcaaaataagccaagatgtctgtggatccaatgacctacgaggcccagttctttggcttcacgccacaaacgtgcatgcttcggatctacattgcatttcaagactacctatttgaagtgatgcaggccgttgaacaggttattctgaagaagctggatggcatcccagactgtgacattagcccagtgcagattcgcaaatgcacagagaagtttctttgcttcatgaaaggacattttgataacctttttagcaaaatggagcaactgtttttgcagctgattttacgtattccctcaaacatcttgcttcctgaagataaatgtaaggagacaccttatagtgaggaagattttcagcatctccagaaagaaattgaacagttacaggagaagtacaagactgaattatgtactaagcaggcccttcttgcagaattagaagagcaaaaaattgttcaggccaaactcaaacagacgttgactttctttgatgagcttcataatgttggcagagatcatgggactagtgattttagggagagtttagtatccctggttcagaactccagaaaactacagaacattagagacaatgtggaaaaggaatcgaaacgactgaaaatatcttaattgctcagtagtcaaaaggaggagcctgtcaaaaagtagaatcataaggactgttcaaaccataaggactgttcaaatcataccagtgactgttcaaaccaaccatactttttattagatttgctttgtcaactctttcttgtattctgtgttttcctcttttttggtccactttgctgaggtatgaagtgtactactttgaactaggctgaagcatctgagtcttctaataagtgggaagggatccaacaaagaagccatgaccagttaaagatatttgcagagttacaccttggtcataagtcctttgtgaccttgattattttggcttactctttggatgagaccagacaagaaaaggattaaacgggtggctcctttaatattattattattgtttttgagacaaggtccctttctgtcacccaggttagagtagatttcagtggcacaatcttggctcactgcaacctctgtgtcctgggctcaagtgatcctcctgcctcagcctcccaagtagctaggaccacaggtgcgtgtcaccatgcttggctaatttttttgcagaaacgaggcctcactatattgtccaggctgagtggctcttttattaaccagtcattacactgcggaacagccaacatagagtacttgctctcgtcctgtgaattttctttcatgagggagtcaatatgtagtggaaagaagcatgtagcaaaaaagacaaccttgatctttaataaaaaagaagttggtttatttccaaaataaatcccctgacaaaaaacctggtgatgttaagcaattgactgtcttagagtccagcagaagaccttagacaaaaaaagcagaacccactggagtagaaaaggaagcatgtagcatatactcagtagtgaaatttaattttactgactgttaggtatctatgccaatttgttttcatacttcagttggttttggaatctgccttatacctaatatttatttattcacactcataagcatcaaatatttaatgccctcagtgggaaatttgtgtttaaactcaatggaatctaatatttctttatgtcgttagtccctgtaaaatgttaggtcacccaaggaaaggggagaaatagcaatggttgttcctaaggtattgcttgccctccatgtcttcctaaagagcagaacttggagtttctcctttatgtagagaagaagtaacttagggtgtatttgcaatgaaatattcatagatattgaaagcttgtgtttacatgaaatatgtttattatcaagaagtcctttttccaattctgtacattaaatatatgtgttttaaaaaaaaaa

SEQ ID NO: 3917 - protein, 205 aa, Homo sapien
MSVDPMTYEAQFFGFTPQTCMLRIYIAFQDYLFEVMQAVEQVILKKLDGIPDCDISPVQIRKCTEKFLCFMKGHFDNLFSKMEQLFLQLILRIPSNILLPEDKCKETPYSEEDFQHLQKEIEQLQEKYKTELCTKQALLAELEEQKIVQAKLKQTLTFFDELHNVGRDHGTSDFRESLVSLVQNSRKLQNIRDNVEKESKRLKIS

SEQ ID NO: 3918 - DNA, 1977 bp, Homo sapien
ggcacgaggatttcctcatcgtcaagctttgttcctcgtgggggctagaaatctctttccagttccagattgtgaagggttcctgagtaagcagcgtgtctccatccccctctctaggggctcttggatggaccttgcactctagaagggacaatggacttctggctttggccactttacttcctgccagtatcgggggccctgaggatcctcccagaagtaaaggtagagggggagctgggcggatcagttaccatcaagtgcccacttcctgaaatgcatgtgaggatatatctgtgccgggagatggctggatctggaacatgtggtaccgtggtatccaccaccaacttcatcaaggcagaatacaagggccgagttactctgaagcaatacccacgcaagaatctgttcctagtggaggtaacacagctgacagaaagtgacagcggagtctatgcctgcggagcgggcatgaacacagaccggggaaagacccagaaagtcaccctgaatgtccacagtgaatacgagccatcatgggaagagcagccaatgcctgagactccaaaatggtttcatctgccctatttgttccagatgcctgcatatgccagttcttccaaattcgtaaccagagttaccacaccagctcaaaggggcaaggtccctccagttcaccactcctcccccaccacccaaatcacccaccgccctcgagtgtccagagcatcttcagtagcaggtgacaagccccgaaccttcctgccatccactacagcctcaaaaatctcagctctggaggggctgctcaagccccagacgcccagctacaaccaccacaccaggctgcacaggcagagagcactggactatggctcacagtctgggagggaaggccaaggatttcacatcctgatcccgaccatcctgggccttttcctgctggcacttctggggctggtggtgaaaagggccgttgaaaggaggaaagccctctccaggcgggcccgccgactggccgtgaggatgcgcgccctggagagctcccagaggccccgcgggtcgccgcgaccgcgctcccaaaacaacatctacagcgcctgcccgcggcgcgctcgtggagcggacgctgcaggcacaggggaggcccccgttcccggccccggagcgccgttgccccccgccccgctgcaggtgtctgaatctccctggctccatgccccatctctgaagaccagctgtgaatacgtgagcctctaccaccagcctgccgccatgatggaggacagtgattcagatgactacatcaatgttcctgcctgacaactccccagctatcccccaaccccaggctcggactgtggtgccaaggagtctcatctatctgctgatgtccaatacctgcttcatgtgttctcagagccctcatcacttcccatgccccatctcgactcccatccccatctatctgtgccctgagcatggctctgcccccaggtcgtcttgcacaccttggcagccccctgtagttgacaggtaagctgtaggcatgtagagcaattgtcccaatgccacttgcttcctttccaagccgtcgaacagactgtgggatttgcagagtgtttcttccatgtctttgaccacagggttgttgctgcccaggctctagatcacatggcatcaggctggggcagaggcatagctattgtctcgggcatccttcccagggttgggtcttacacaaatagaaggctcttgctctgagttatgtgacatgcctcagccccatggactaagcaggggtctggtataaaaacactcctggaaacgcctttgccctgatccaaatgttagcacttgctagtgaacgtctacttatctcaagttctatgctaaaggcaatttatcttgatgtgatgataaaccaaacttattagcaagatatgcatatatatcaaaaaaaaaaaaaaaaaa

SEQ ID NO: 3919 - protein, 390 aa, Homo sapien
MDFWLWPLYFLPVSGALRILPEVKVEGELGGSVTIKCPLPEMHVRIYLCREMAGSGTCGTVVSTTNFIKAEYKGRVTLKQYPRKNLFLVEVTQLTESDSGVYACGAGMNTDRGKTQKVTLNVHSEYEPSWEEQPMPETPKWFHLPYLFQMPAYASSSKFVTRVTTPAQRGKVPPVHHSSPTTQITHRPRVSRASSVAGDKPRTFLPSTTASKISALEGLLKPQTPSYNHHTRLHRQRALDYGSQSGREGQGFHILIPTILGLFLLALLGLVVKRAVERRKALSRRARRLAVRMRALESSQRPRGSPRPRSQNNIYSACPRRARGADAAGTGEAPVPGPGAPLPPAPLQVSESPWLHAPSLKTSCEYVSLYHQPAAMMEDSDSDDYINVPA

SEQ ID NO: 3920 - DNA, 1977 bp, Homo sapien; identical to SEQ ID NO: 3918

SEQ ID NO: 3921 - protein, 390 aa, Homo sapien; identical to SEQ ID NO: 3919

SEQ ID NO: 3922 - DNA, 1172 bp, Homo sapien
aaaatggtggtgttcgggtatgaggctgggactaagccaagggattcaggtgtggtgccggtgggaactgaggaagcgcccaaggaaatgaaacacgatttccaaaatgaacttaatctttcatgagaaactgaggatagagatgtcaataagcagccactgtttccacctccccacctgaagagctaggagcgcccaagctttcggttctgagctcggactaagccatgtggattcaggtgtggatgacggtgggaactgaggaagcgcccaaggttttcaagatggcagcatctatgcatggtcagcccagtccttctctagaagatgcaaaactcagaagaccaatggtcatagaaatcatagaaaaaaattttgactatcttagaaaagaaatgacacaaaatatatatcaaatggcgacatttggaacaacagctggtttctctggaatattctcaaacttcctgttcagacgctgcttcaaggttaaacatgatgctttgaagacatatgcatcattggctacacttccatttttgtctactgttgttactgacaagctttttgtaattgatgctttgtattcagataatataagcaaggaaaactgtgttttcagaagctcactgattggcatagtttgtggtgttttctatcccagttctttggcttttactaaaaatggacgcctggcaaccaagtatcataccgttccactgccaccaaaaggaagggttttaatccattggatgacgctttgtcaaacacaaatgaaattaatggcgattcctctagtctttcagattatgtttggaatattaaatggtctataccattatgcagtatttgaagagacacttgagaaaactatacatgaagagtaaccaaaaaaatgaatggttgctaacttagcaaaatgaagtttctataaagaggactcaggcattgctgaaagagttaaaagtaactgtgaacaaataatttgttctgtgccttttgcctggtatatagcaaatactcaaaaagtattcaataattcaatcaataaatataagtttcatcttacacgtaagatacaggtcttatctcctgatggtgtgtccattttgcctggtatataacagataataaatatccagtgtcaataaatgtaacaataaaaaaaaaaa

SEQ ID NO: 3923 - protein, 219 aa, Homo sapien
MWIQVWMTVGTEEAPKVFKMAASMHGQPSPSLEDAKLRRPMVIEIIEKNFDYLRKEMTQNIYQMATFGTTAGFSGIFSNFLFRRCFKVKHDALKTYASLATLPFLSTVVTDKLFVIDALYSDNISKENCVFRSSLIGIVCGVFYPSSLAFTKNGRLATKYHTVPLPPKGRVLIHWMTLCQTQMKLMAIPLVFQIMFGILNGLYHYAVFEETLEKTIHEE

SEQ ID NO: 3924 - DNA, 3462 bp, Homo sapien
gaggaacatgattttattggttctttcagttcaccacatccgactcgcgtctcggccctggcccgccttgcggaccttaaagcagtcagtccagggtttgggggaaacgtgctcacccgacggcagctcacaggaccccggagagtcctggcatggtatctcggtccggactctccgctgggcccacgaaggagaaaggctgcctcggattcctgcgcccaagccaaggtccggcgcccacggaggcaagtccggtctcacggtgacctcccgctggcgccgccttcgccgccaaccatccagttcttcctccaggccacgttctcctgcgtggtcgctgcctcctgcagagtggccagcaatagctgctgggtcctggccgcctcctccctgctccttgggtcctgcagtggcatctcctgagggcaggaaggggagttcgcaggagctccagtccggggctctccacccgcccacccttcctcgggactaccagttgcttctacctttagcatttcctgcttccgccgctctcccggggtcacgataacgaggagcgcgtagcccacgccagcccctgcgcccagcattgcgactgagatcagcattttccgcaaggaatccatggccgcctgcacagccagcggagcgcccacgggagctccccgcagccgcaagctgttgccgcgcggtctcactaccccttggcgcaggctagagcgccctatagcagaaaccatagataagcggccggctagagaggacctgctcgaggaaacgtttggaatccggagcgcttggatctcaggtttagctgagggggttgaggtgtccaagaagtgctggcaccaagggctgagcgcggggaccctgtgtcctcaattccggggtgggattgctagggggagagtgcgtgtcttcatggttgccgtgggttttatgattgcccatttttctgtcttccgacgtttcccgatcagtagaggcccgagctgtgctctgtggtttcctgcagtcacccgcgagttttcaacacagcgcatggagggcatctacacacatacacatccctctccatcccctcaactctggaacaaacactcaaagtcaagtatactggttggagaaatgggtaatagttacttatctttaacatttattttacaaacaacctattccttttctcgtcatggtacacacttggtattgtttgggtttttttttggttttgttgttgttgttagtgtgtgggcgtggttttgtttgtttttggagacaaggtctcgctctgtcgcccagggctggagtgcagtggcgcgatcatggctcactgaagcctcgacttccagggcccaagcgatcctcctgcctcaacctcccggatagctgggattacaggcgtgcaccaccacgcccggctggtattgctttttgttttgcttcgttttcttttttgctttttgagacagagtctcactctgttgcccagctggagtgcagtggcgtgatctcggctcactgcaagctctgcctcccgggttcacgccattctcctgcctcagcctcccgagtagctgggactacaggcgcccgccaccacggccggctaattttttgtatttttagtagagaaagagtttcactatgtaggtcaggctggtctcgaactcctgacctcgtgatccgcccaatccgcccacctcggcctcccaaagtgctgggattacaggtgtgagccaccgcgcccggctgttttgctttgttttcaaccactaaaaggctggattcgtgtaacatactgaattctgctttacagaagaaaacacctcttagctgtgtgactgattataggcaagttcttgtgccccggtttctgcatcagaaaatgaagcttataacaacagtacttgtctcacagttttaggataattaaattagttatatgtaaagcaattaaaacagctcctgccaaagagtaaacaccatataaatattcattaaataacatacaaacataccaggttgggaaaaatcagtaagcataggagtcaggaaattccaagttggttatcacaactcttggcccacagggctttaatccaggtgcccttgtctcctacccttgttgccatcccagtgtctccagggagtaagtagaaataaagatcctatctcacctcttgggcattttcccctgccctgaaagcgtataatcgcttagcacagtcggtgcttaaggggccaggctccaaagaagattaaaggaacagtttgtggggtgcactgggcagcagtactctcctctgagttcaatcatcttgcactctaagaatcaccaccatggcccttgtgccagggagaagcaaggaggatgggctttggactagaaatagcccaggctcctcccagcatccagaaagtcccaggctgcccaaccctctctgggacagaggaaaaattggcaaggttgaaggtcaccagcacattcaggatttctctcaaaagtcccatctgccgtctattgtggtggaatccagtgaggtgaatgaagagagtggggatctccatttgccccatgaggagctgctgctgctcactgatggtgaggaagaggatgctgaggccttcttccaagaccaaagtgaagagccaggctgggcttggagcccacaggaccctagaagtcctttaagaacatttaacgctggactcagctgggggcaggaccaggatgaagaagatgcttgttggattcttgaggacacagcatgtctggaagccaccaaccactgtcccttctgggactcaacaggctcccgtgtttgtagaagtggctttgtggaatattcccatctcctgcctcctaatagctttgagggagctgaagaagaagctgttcaaacgccggcgggtgttgaatcgggagcggcgtctgaggcaccgggtggtcggggctgtgatagaccaagggctgatcacgcggcaccacctcaagaagcgggcgtccagtgcacgtgccaacattacactgtcagggaagaagcgcagaaaactcctccagcagatccggcttgcccagaaagagaagacagccatggaagtggaagccccttcaaagccagccaggactagtgaaccacagctcaaaaggcaaaagaagacaaaagccccccaggatgtagaaatgaaggaccttgaagatgagagctaaacctcttccactagaagattctcaactggagccagccttcagactcagtggttgtttcagaggactttgacaaaagcaaggccccttttcactctccagatttcctcctacctaatggcctactgacctcccctagagggatgtctttgggagggaagaaggtacagaagaaagattggagaagggcctctctagcagtcaactccatttgtaataaagccctagcactctgaaaaaaaaaaaaaaaaaaa

SEQ ID NO: 3925 - protein, 159 aa, Homo sapien
MKKMLVGFLRTQHVWKPPTTVPSGTQQAPVFVEVALWNIPISCLLIALRELKKKLFKRRRVLNRERRLRHRVVGAVIDQGLITRHHLKKRASSARANITLSGKKRRKLLQQIRLAQKEKTAMEVEAPSKPARTSEPQLKRQKKTKAPQDVEMKDLEDES

SEQ ID NO: 3926 - DNA, 2635 bp, Homo sapien
gcgctcctgctcttaggaagcctgggaaggaccggtgtgctaggagatgatcggggaaagcatagtcccctgtctgtggcaccagacactcccgactgtgcgctgactctccccgcccagccagcagccttttccagagaggctgtggtccatagcctctgttcgttttcactgcaggaccaggcacgaaagttaaaacaaaatgaagattttttctgaatctcataaaacagtgtttgttgtggatcactgcccttatatggcagaatcttgcaggcagcatgtcgggtttgatatgctggtgaagaatagaacccaaggaatcattcctttggcccccatatctaaatcattgtggccttgctcagtagaatcttccatggaatattgtagaataatgtatgatatatttcctttcaaaaagccggtgaattttattgtgagtgactctggagcacatgttttaaattcttggactcaagaagaccaaaatttacaggagctaatggcagcattagccgctgttgggcctcctaatcctcgggcagatccagagtgctgcagtattctgcatggccttgttgcagcagtggaaactctctgcaaaattactgaataccaacatgaggctcgtactctactcatggagaatgcagaacgtgttggaaatagaggacgaataatctgtattactaatgcaaaaagtgatagtcatgtgcgaatgcttgaagactgtgtccaggaaacgattcatgaacataacaagcttgctgcaaattcagatcatctcatgcagattcaaaaatgtgagttggtcttgatccacacctacccagttggtgaagacagccttgtatctgatcgttctaaaaaagagttgtccccggttttaaccagtgaagttcatagtgttcgtgcaggacggcatcttgctaccaaattgaatattttagtacagcaacattttgacttggcttcaactactattacaaatattccaatgaaggaagaacagcatgctaacacatctgccaattatgatgtggagctacttcatcacaaagatgcacatgtagatttcctgaaaagtggtgattcgcatctaggtggcggcagtcgagaaggctcgtttaaagaaacaataacattaaagtggtgtacaccaaggacaaataacattgaattacactattgtactggagcttatcggatttcacctgtagatgtaaatagtagaccttcctcctgccttactaattttcttctaaatggtcgttctgttttattggaacaaccacgaaagtcaggttctaaagtcattagtcatatgcttagtagccatggaggagagatttttttgcacgtccttagcagttctcgatccattctagaagatccaccttcaattagtgaaggatgtggaggaagagttacagactaccggattacagattttggtgaatttatgagggaaaacagattaactccttttctagaccccagatataaaatcgatggaagtcttgaggtccctttggaacgagcaaaagatcagttagaaaaacatacccgttaccggcctatgatcatttcacaaaccaccatttttaacatgcaagcggtagttccattagccagtgttattgtgaaagaatctctgacagaagaagatgtgttaaactgtcaaaaaacaatatacaacttagttgatatggaaagaaaaaatgatcctctacctatttccacagttggtacaagaggaaagggccctaaaagagatgaacaataccgtatcatgtggaatgaattagaaacccttgtcagagcccatatcaacaactcagagaaacatcaaagagtcttggaatgtctgatggcatgcaggagcaaacccccagaagaggaagaacgaaagaaacgaggaagaaagagggaagacaaagaggacaagtcagagaaagcagtgaaagattatgaacaggaaaagtcttggcaagactcagagagattaaaaggaatcttagagcgtggaaaagaagaattggctgaagctgagattataaaagattcgcctgattccccagaacctccaaacaaaaaaccccttgttgaaatggatgaaactccacaagtggaaaaatcaaaagggccagtgtcgttattatccttgtggagtaatagaatcaatactgccaattccagaaaacatcaggaatttgctggacgtttgaactctgttaataacagagctgaactatatcaacatcttaaagaggaaaatgggatggagacaacagaaaatggaaaagccagccggcagtgaagagtgacttgaagaactaaatttagcatattgcaaaaatattttgtgcggaattcgatataagtacttttacagcaggatggtatagttatgttgcctggactggtttttacatttttaaaatatttcagctgtcatttttgtactaattataaaattggcacataattcaaaaatatacatttgagatgatttgtcctcccaaattatacaagtttattttatggtataaagtgttctctctggaaatgtttttaaaaaaattcttaggcttctctttgcgaaataaaactattgaaatatttgaaatgc

SEQ ID NO: 3927 - protein, 706 aa, Homo sapien
MKIFSESHKTVFVVDHCPYMAESCRQHVGFDMLVKNRTQGIIPLAPISKSLWPCSVESSMEYCRIMYDIFPFKKPVNFIVSDSGAHVLNSWTQEDQNLQELMAALAAVGPPNPRADPECCSILHGLVAAVETLCKITEYQHEARTLLMENAERVGNRGRIICITNAKSDSHVRMLEDCVQETIHEHNKLAANSDHLMQIQKCELVLIHTYPVGEDSLVSDRSKKELSPVLTSEVHSVRAGRHLATKLNILVQQHFDLASTTITNIPMKEEQHANTSANYDVELLHHKDAHVDFLKSGDSHLGGGSREGSFKETITLKWCTPRTNNIELHYCTGAYRISPVDVNSRPSSCLTNFLLNGRSVLLEQPRKSGSKVISHMLSSHGGEIFLHVLSSSRSILEDPPSISEGCGGRVTDYRITDFGEFMRENRLTPFLDPRYKIDGSLEVPLERAKDQLEKHTRYRPMIISQTTIFNMQAVVPLASVIVKESLTEEDVLNCQKTIYNLVDMERKNDPLPISTVGTRGKGPKRDEQYRIMWNELETLVRAHINNSEKHQRVLECLMACRSKPPEEEERKKRGRKREDKEDKSEKAVKDYEQEKSWQDSERLKGILERGKEELAEAEIIKDSPDSPEPPNKKPLVEMDETPQVEKSKGPVSLLSLWSNRINTANSRKHQEFAGRLNSVNNRAELYQHLKEENGMETTENGKASRQ

SEQ ID NO: 3928 - DNA, 2887 bp, Homo sapien; identical to SEQ ID NO: 3771

SEQ ID NO: 3929 - protein, 538 aa, Homo sapien; identical to SEQ ID NO: 3772

SEQ ID NO: 3930 - DNA, 936 bp, Homo sapien
gagggcgcgatcctggcgtcccccgacggcctggggccccaatccagaggcctgggtgggaggggaccaagggtgtagtaaggaagcgccttttgctggagggcaacggaccggggcggggagtcgggagaccagagtgggaggaaggcggggagtccaggttccgccccggagccgacttcctcctggtcggcggctgcagcggggtgagcggcggcagcggccggggatcctggagccatggggcgcgcgcgcgacgccatcctggatgcgctggagaacctgaccgccgaggagctcaagaagttcaagctgaagctgctgtcggtgccgctgcgcgagggctacgggcgcatcccgcggggcgcgctgctgtccatggacgccttggacctcaccgacaagctggtcagcttctacctggagacctacggcgccgagctcaccgctaacgtgctgcgcgacatgggcctgcaggagatggccgggcagctgcaggcggccacgcaccagggctctggagccgcgccagctgggatccaggcccctcctcagtcggcagccaagccaggcctgcactttatagaccagcaccgggctgcgcttatcgcgagggtcacaaacgttgagtggctgctggatgctctgtacgggaaggtcctgacggatgagcagtaccaggcagtgcgggccgagcccaccaacccaagcaagatgcggaagctcttcagtttcacaccagcctggaactggacctgcaaggacttgctcctccaggccctaagggagtcccagtcctacctggtggaggacctggagcggagctgaggctccttcccagcaacactccggtcagcccctggcaatcccaccaaatcatcctgaatctgatctttttatacacaatatacgaaaagccagcttgaaaaaaaaaaa

SEQ ID NO: 3931 - protein, 195 aa, Homo sapien
MGRARDAILDALENLTAEELKKFKLKLLSVPLREGYGRIPRGALLSMDALDLTDKLVSFYLETYGAELTANVLRDMGLQEMAGQLQAATHQGSGAAPAGIQAPPQSAAKPGLHFIDQHRAALIARVTNVEWLLDALYGKVLTDEQYQAVRAEPTNPSKMRKLFSFTPAWNWTCKDLLLQALRESQSYLVEDLERS

SEQ ID NO: 3932 - DNA, 2352 bp, Homo sapien
cagtgccaggctggaggcggcagcggttggaggcttcgcccggctttgcagcggggacttcggcggcggcgcctcaggcacctcggcccggacacgatgaggcgagtggtacgacagagcaagtttcggcatgtatttgggcaagcggtgaaaaatgaccagtgctatgatgacatccgggtttctcgtgtgacctgggatagttccttttgtgctgtcaatcccagatttgttgccataatcatagaggcaagtgggggaggagcgttccttgtcctccctctgcacaagactggtcgaattgacaaatcttaccctacagtatgtggccacacaggaccagtgctggacatagactggtgcccacataacgatcaggtcattgccagcggttcagaggactgcacggtcatggtatggcagatcccagaaaatggactcaccctttccctgactgaacctgtggtgattttggaaggccactcaaagagagtcggcatcgtggcttggcatccaacggcccgcaatgtgcttcttagtgcaggctgtgataatgccattatcatctggaatgtgggaacaggggaagcccttataaacttggacgatatgcattcagacatgatttacaatgtgagctggaaccggaatggcagtctgatctgcacagcttccaaagacaagaaagtgagagtcattgatcccaggaaacaagagattgttgctgagaaggagaaagcacatgaaggagcaagacccatgagagccatcttcctggccgatggcaatgtcttcaccactgggttcagccgcatgagcgagcggcagctggctctctggaatccgaaaaatatgcaggaaccaattgctcttcatgagatggacactagcaatggggtgttgctgcctttctatgaccctgacaccagcatcatttacttatgtggaaagggtgacagcagtattcgctattttgagatcacggatgaatccccgtacgtccactacctcaacacattcagcagcaaggagcctcagagagggatgggttacatgcccaagaggggacttgatgttaacaaatgtgagattgccagattcttcaaacttcatgagagaaagtgtgaacctattattatgactgttcccaggaagtctgaccttttccaagatgacctgtatcctgacacagcggggccagaggccgcgctggaggcagaagagtggttcgaaggcaagaatgcagacccaatcctcatctccttgaagcacgggtacattccaggcaaaaacagggatctcaaggtggtcaagaagaacattctggatagcaagcccactgcaaacaagaagtgcgacctgatcagcatccccaagaaaaccacagacacggccagtgtgcaaaatgaagccaagttggatgagattttaaaagagatcaaatctataaaagacacaatctgcaatcaagatgagcgtatttccaagttagaacagcagatggcaaagatagcagcctgaaggtcccacccccacccctacagaaaaaatgggagcaagaacttgtgcttgggagctggttattggtgtggtcctagggagggcggaaagggaggcactgccatttggagacattccatttcagatttgtcaaccagcgataggccacattccagtaagaactcaatttgtctcccaaatttgcagaaacaaaacgtgatttaaaagctgagctttttatcagaaagcttttttgatgttttaagtgttatgtgacttgttgaactttttaaaaagtgctacttttaaaatcccagatactctgaattttagaaaacaaactaattctgattgtgtcgtgcccaagtacccttttttttttaatgaatagggaccaatgccacattgctttttatatttctttcttttttaatgttgccaaaaccaaaagtagctttgttttcctttgtattttgctactttgcagtatttgtgtgtgtggttttttttccttaatttgaaagggacagcactgtgtatgtttataaactaaatgaagataagatattattttgtataaacattcatctgagaacaatcaaagcagtagccacatggtgctggctcctttgcagcacaaacctggtcattttgatgactgtacaacaggaagacttgaaaaatcacgtggattcatattaccaccgctctcatttcatggagtcttctgatcaaaaaagctcacgtcgtatttcttcttttcctttctcttttctagaaattgggtgtttgtaccagaatggaattttgcttctcggttatcctgtgcttcagatgattataatctaaccc

SEQ ID NO: 3933 - protein, 474 aa, Homo sapien
MRRVVRQSKFRHVFGQAVKNDQCYDDIRVSRVTWDSSFCAVNPRFVAIIIEASGGGAFLVLPLHKTGRIDKSYPTVCGHTGPVLDIDWCPHNDQVIASGSEDCTVMVWQIPENGLTLSLTEPVVILEGHSKRVGIVAWHPTARNVLLSAGCDNAIIIWNVGTGEALINLDDMHSDMIYNVSWNRNGSLICTASKDKKVRVIDPRKQEIVAEKEKAHEGARPMRAIFLADGNVFTTGFSRMSERQLALWNPKNMQEPIALHEMDTSNGVLLPFYDPDTSIIYLCGKGDSSIRYFEITDESPYVHYLNTFSSKEPQRGMGYMPKRGLDVNKCEIARFFKLHERKCEPIIMTVPRKSDLFQDDLYPDTAGPEAALEAEEWFEGKNADPILISLKHGYIPGKNRDLKVVKKNILDSKPTANKKCDLISIPKKTTDTASVQNEAKLDEILKEIKSIKDTICNQDERISKLEQQMAKIAA

SEQ ID NO: 3934 - DNA, 2189 bp, Homo sapien
aggggcgggcccggcgcgcgcgggaagtctctgtagggcggccggctaccctcagccgccgcgcgtcatggccctttcggtgcccggctactcaccgggcttccgaaagccgcccgaggtagtgcggctccgacggaaaagggcccggagccgtggagctgccgcctccccgccccgtgagctgacggagccggcggcccgccgagccgccctggtggcggggctgcctcttcgccctttccctgctgcggggggcagaggcggtggcagcggcggcggcccggccgctgctcggaggaaccccttcgcccgcctggacaaccgaccgcgggtcgccgcggagccccccgacgggccggcccgcgagcagccggaggccccggtcccgtttttagattctaatcaagaaaatgatttgctatgggaagagaagtttcctgaaagaacaactgttactgaattacctcagacttcacatgtatcattctccgagcctgatattccgtcctcaaaaagtactgagttacctgtggactggagtattaaaacgcgactccttttcacctcttctcaaccctttacctgggcagatcatttgaaagcacaggaagaagctcaaggtcttgtccagcattgtagggcaacagaagttactttgcctaaaagtatacaggatcccaaactctcctctgagctccgttgtaccttccagcagagccttatctattggctccaccctgctttgtcttggctaccactgttccctcgtattggagctgatagaaaaatggctggaaagacaagtccttggtcaaatgatgcaaccctgcagcatgttttaatgagtgactggtctgtgagctttacttctctatataatttgctgaagacaaaactttgcccctatttctacgtttgtacctatcagtttactgtcctgttccgagcagcaggattagctggaagtgacttaatcacagctctcatatctccaacaactcgaggtttaagagaagctatgagaaatgaaggtattgaattttctctgcctttaataaaagaaagtggccataagaaggagacagcatctggaacaagcttgggatatggggaggagcaagccatcagtgatgaggatgaagaggaaagtttttcctggctggaagagatgggtgtgcaagataaaattaaaaagccagacatactttctatcaagctgcgtaaagagaaacatgaagtacaaatggatcacagacctgaatctgttgtgttggtaaaaggaatcaacacctttacattgctcaattttttgattaactctaagagtttagttgctacctcaggtccacaggcaggacttcctccaaccctcttgtcccctgttgctttccgaggtgccacaatgcaaatgcttaaggcacggagtgtgaatgtgaagacacaagctctttctggatacagagaccaatttagtttggagattacaggtcctatcatgcctcattctctgcattcactgaccatgctgctcaaatcttcacagagtggatctttctctgcagtactgtatccacacgagccaactgctgtatttaacatctgcctgcaaatggacaaagtacttgatatggaggttgttcataaggagcttactaactgtggtttgcaccctaacactctggagcaacttagtcaaataccgttacttgggaaatcatctttacggaatgtggtgctgagagactacatttataattggagatcctgaacaccaaagtaagcctaaaaggaatctttgaggaaaaaagccttctagcaaggaaattcaagattcttgaagttgaaggaatatactgaaatgtttataaacataacttttactacagtagcatctaaggttttaaatgtgttttactattttcagattagatttttagatataaagatgaaaaactcagataactcaaatgagatatctatatccctacaacctaattgtatattgagcagaaactgaattaatatgcttccttgcaaatgggaaatcacatagcagttaccccatggcattgtgactaatggcatcagggcaaaaatatgttactttacgatttacctgttagcaggttcttgtttcataaaggtagaaaataaatacagacaacatctaaaaaaaaaaaaaaaaaaaa

SEQ ID NO: 3935 - protein, 566 aa, Homo sapien
MALSVPGYSPGFRKPPEVVRLRRKRARSRGAAASPPRELTEPAARRAALVAGLPLRPFPAAGGRGGGSGGGPAAARRNPFARLDNRPRVAAEPPDGPAREQPEAPVPFLDSNQENDLLWEEKFPERTTVTELPQTSHVSFSEPDIPSSKSTELPVDWSIKTRLLFTSSQPFTWADHLKAQEEAQGLVQHCRATEVTLPKSIQDPKLSSELRCTFQQSLIYWLHPALSWLPLFPRIGADRKMAGKTSPWSNDATLQHVLMSDWSVSFTSLYNLLKTKLCPYFYVCTYQFTVLFRAAGLAGSDLITALISPTTRGLREAMRNEGIEFSLPLIKESGHKKETASGTSLGYGEEQAISDEDEEESFSWLEEMGVQDKIKKPDILSIKLRKEKHEVQMDHRPESVVLVKGINTFTLLNFLINSKSLVATSGPQAGLPPTLLSPVAFRGATMQMLKARSVNVKTQALSGYRDQFSLEITGPIMPHSLHSLTMLLKSSQSGSFSAVLYPHEPTAVFNICLQMDKVLDMEVVHKELTNCGLHPNTLEQLSQIPLLGKSSLRNVVLRDYIYNWRS

SEQ ID NO: 3936 - DNA, 2561 bp, Homo sapien
gggggactcgagagctagctgagcgaatgggccggcgactgtggagttagcgtcctcaatgtggacgccctgagctcccattaggagccgctggctgcggcagcaggggactagcgtgaaagttggctaaaaaaaagaaaagaacatggaggcagatataatcacaaatcttcgatgcaggctcaaagaggctgaagaagagcgactaaaagctgcacagtatggtttacaactagtagagagtcaaaatgaattacagaatcaattggataaatgtcgtaatgaaatgatgaccatgactgagagttatgaacaagaaaaatatacccttcaaagagaagttgaactcaagagtcgaatgttagaaagtttgagctgcgaatgtgaagctattaaacaacaacaaaaaatgcacctggagaaattggaagaacaactaagcagaagccatggacaggaagtgaatgaactaaaaactaagatagaaaaactgaaagtggaattagatgaagccaggcttagtgaaaagcagctgaagcaccaagtagatcatcagaaggaactcctctcttgtaaatcagaggaactgcgcgtaatgtctgaacgtgtgcaggaaagcatgtcttcagagatgctggctcttcaaattgagctgacagaaatggagagtatgaagaccaccctcaaagaagaagtgaatgaactacaatacagacaagaacagctagaacttcttattactaacctaatgcgccaggtagaccggcttaaagaggaaaaagaggagcgagagaaagaagcagtttcttactataatgccctagagaaagctcgtgtagcaaatcaagatcttcaggtacagttggaccaggcactccagcaagccttggatcccaatagtaaaggcaactctttgtttgcagaggtggaagatcgaagggcagcaatggaacgtcagcttatcagtatgaaagtcaagtatcagtcactaaagaagcaaaatgtatttaacagagaacagatgcagagaatgaagttacaaattgccacgttgctacagatgaaagggtctcaaactgaatttgagcagcaggaacggttgcttgccatgttggagcagaagaatggtgaaataaaacatcttttaggtgaaattagaaatctggagaaatttaagaatttatatgacagtatggaatctaagccttcagtcgactctggtactctggaagataacacctattatacagatttacttcagatgaagctggataacttaaacaaagaaattgaaagcactaaaggtgaattgtccatacagcgaatgaaagcattatttgagagccagcgggctctagatattgagcgaaaactttttgcaaatgaaagatgcctccagctttcagaaagtgaaaatatgaaactgagagctaaactagatgaattgaaactaaaatatgaacctgaagagacagttgaagtgcctgtactgaaaaagaggcgtgaggtgctccctgtggatataaccaccgctaaagatgcatgtgtcaacaacagtgctctcgggggagaagtttatcgattaccgcctcagaaagaggagacacagtcctgccctaacagtttagaagataacaacttgcaattagaaaaatcagtttctatacacacaccagtagtcagtctctctcctcacaaaaatctgcccgtggatatgcagctgaagaaggaaaagaaatgtgtgaaactcataggagttcccgctgacgctgaggccttaagtgaaagaagtggaaacacccctaactctcccaggttagctgctgaatcaaagcttcaaacagaagttaaagaaggaaaagaaacttcaagcaaattggaaaaagaaacttgtaagaaatcacaccctattctatatgtgtcttctaaatctactccagagacccagtgccctcaacagtaaagacttttctttaataagagtacggtgccacttgcctcaaaagttactatggtgcttaagattgtcttgatctgacatatatcaccttctgggttatttactcattgtgccaggacctggcattttcatgtgcctttgaccaagtgttcagaatttgcttgactctaacctggagagcttcttaagtgatgccccttcatggagcttctatgacagtgaataaactattaattgaaggaaaatgttataattaatgtatctatttgctgcattgtatatggattaaatgataaaaaacaagtaatctaccctcagagccatgtatttgagaatgcttcaatcatattttcctatgtacttttttttataaacttagttttagactatgttgtaaaaatgggaaggttgtaaactatgttgtaaaaataggaaatgtggcttaaaatatatacattatattgtttcaggattttgtcagtgtttaaagaaccaatgttcatctttgtatttatatacatgatttaaattttgtctaaaattttaaataaaactgcagtgatttatccgtaaaaaaaaaaaaaaaaaaaaaaaaaaaaaa

SEQ ID NO: 3937 - protein, 605 aa, Homo sapien
MEADIITNLRCRLKEAEEERLKAAQYGLQLVESQNELQNQLDKCRNEMMTMTESYEQEKYTLQREVELKSRMLESLSCECEAIKQQQKMHLEKLEEQLSRSHGQEVNELKTKIEKLKVELDEARLSEKQLKHQVDHQKELLSCKSEELRVMSERVQESMSSEMLALQIELTEMESMKTTLKEEVNELQYRQEQLELLITNLMRQVDRLKEEKEEREKEAVSYYNALEKARVANQDLQVQLDQALQQALDPNSKGNSLFAEVEDRRAAMERQLISMKVKYQSLKKQNVFNREQMQRMKLQIATLLQMKGSQTEFEQQERLLAMLEQKNGEIKHLLGEIRNLEKFKNLYDSMESKPSVDSGTLEDNTYYTDLLQMKLDNLNKEIESTKGELSIQRMKALFESQRALDIERKLFANERCLQLSESENMKLRAKLDELKLKYEPEETVEVPVLKKRREVLPVDITTAKDACVNNSALGGEVYRLPPQKEETQSCPNSLEDNNLQLEKSVSIHTPVVSLSPHKNLPVDMQLKKEKKCVKLIGVPADAEALSERSGNTPNSPRLAAESKLQTEVKEGKETSSKLEKETCKKSHPILYVSSKSTPETQCPQQ

SEQ ID NO: 3938 - DNA, 3527 bp, Homo sapien
  Unsure 94: Unknown base
  Unsure 96: Unknown base
  Unsure 1926: Unknown base
gccggcgtctcctggctgccgtcacttccggttctctgtcagtcgcgagcgaacgaccaagagggtgttcgactgctagagccgagcgaagcgntngcctaaatcaaaggaacttgtttcttcaagctcttctggcagtgattctgacagtgaggttgacaaaaagttaaagaggaaaaagcaagttgctccagaaaaacctgtaaagaaacaaaagacaggtgagacttcgagagccctgtcatcttctaaacagagcagcagcagcagagatgataacatgtttcagattgggaaaatgaggtacgttagtgttcgcgattttaaaggcaaagtgctaattgatattagagaatattggatggatcctgaaggtgaaatgaaaccaggaagaaaaggtatttctttaaatccagaacaatggagccagctgaaggaacagatttctgacattgatgatgcagtaagaaaactgtaaaattcgagccatataaataaaacctgtactgttctagttgttttaatctgtctttttacattggcttttgttttctaaatgttctccaagctattgtatgtttggattgcagaagaatttgtaagatgaatacttttttttaatgtgcattattaaaaatattgagtgaagctaattgtcaactttattaaggattactttgtctgcccaccacctagtgtaaaataaaatcaagtaatacaatcttaactgttgtggccttttttgatcataagagttggtactgtttaaggccaaaagtaacagtttttatagatcttttagtttcaactcagcttttacaataaaaaggatttgtattgcattgagtttataaacttttggtttgtgaacttcatatttgatcttttctcttccaatcaaatgtctaggcttgtttgacttccacccccaatggtttttcactctttttatttacttcattttcctttaataacttaatctcttcatgttcagtttttacttcactctttattcttttctttgattatggtatgcttatttggaaagtcagtgaaactgtcaaaatgttatctcaataagatacttatatgagaactacaatcaccgaatctactgtattcaatattagcagatctaatttgataaacaacatggcttgtgtgaaaactgagcaggtgtttgtttacccatagtgttctgtgtagttattgcttagtctgcagaaaataatgacttagatgagatgtctgacttgctttcacttattaaacatgttcaccatgggatgatgtctgtaacatcagatattgttcaactagactaggatttaataaaaattgtgaaagcttactggcctaacattttattttataatattgggtatgaattatatgtagccagagatgtcattaagctttactgttatagtaggtaatatggttagtttgtagggaaaagagcatatgagcacatgcttgtgtattttggcctttgccccagtagaacagaccaatggcattctagacttgatgatactaagttttagcagacactagtaagtggtttgtatttaaccatactgatgaagcagacagattgaggcacagattttagtggctttgtggcaataaatagggcatggtgtgccttaggaaaagaatgtttataaagggaattataactgaaattaaaggaggcggcagtgaagaggaaataatyctcttctatctaaatgatatacatatgatattttgagatttttataacagcagtggaacacaattctaggtagagtagaaaaaggaaagttttaaagacatataaaagattcttgttgacaaattatttttggtagcaaatctcaaatggttacctgctattaaggtctgccatattagagttttgcactattttgctaccaagtntgattcatacatctaaaacattttgtagttacttgtcaaggacttaatttgaaaatcatttgccaggccacatagttatcaatttttttttctatcagctattctgttgtatttctaaaacattttttagatgactttttaaagtatatttagcagtaaccttatgaggttcaaattggtaaatctcttgtaatttagccttcatcgaataataggtaccagtgtattaaaaatgtgtattttttgcagccccttgaaccagagtaggttcagagaaactcccaaagtttgtactttagacacatcawgcttgattggtaacttccctccttttttggggaacatgtttgtgtcctattaacttaattggatagatttttaaatatttcttatttttggcacacggaaagggtagttcgagtacagaactttgatttttggtgtagatgcagagggaatgatgggtaaatttcctaggtttatgtgaatttagggggtgtatgcattttgaaacaatctactaacagatggtgctgaaatctattacctacatgttttctagttgttcagcattatgttaatgaagcctccatataaggagtgtttctctggcacagttggtaagttgactgctaacttcatttaaatgtgttactggatatgcagtatactgaaattattaatcagtttgtgtataggaaaagagaactgggttaaaagcaaattaacttgttctgaaaagaaagtatagattaattttgttttctgtttaaattttatctccttggtaaagatttttttttcctgggcagaaaacttgggcatttttaggcgtagataccttaccttacaatgccaaaatgaatttaattccagtactcaggtttttccctttaacagactctatgtgtatcagggctttctaatgggtttttcctcttcgtttttaaaatgtgagtagcatttgaccaatttccagtgctcttarcattttacttaaagaacaaccactacaaaagaaaatctttgtaatttgattgtcttttgctttgcttcattaatgcctaagaacttaagaatactcctacctcattagctactcaagatgctgtgacgatcaaatctattctacataatgcgtttagaaacaaagacttgggtgaaaaatgaaataagtatattctgacttggctattgaggggaaaattcagtattaagtgttcctcacaggagatatgttagcagaatactataaaagtttgaaatttttaaaaagtaaaagtacttaaatttaggtatctctcctgaaattctttgcagttcattttttatggcagttaatccagtgaaacactcaaaagtttttttttttttaaaagtgtttttccagataaactgtagggtgaacattcacataatcacaaatatgtaattctgtaattgtggaatgcttgtatgctttgttttcgtacatcttccatggagatgtctgaatataatactccatctgtgaatattttaaatgttgaaataaaagtaagaaatgtgaaaaaaaaaaaaaaaaaaaaaaaaaaaaaaaaaaaaaaaaaaaaaaaaaaaaa

SEQ ID NO: 3939 - DNA, 2002 bp, Homo sapien
agatcattgtggccctcaaatccgaggaggacagcggcagagtcgcctcctacatcatggccttcacgctggacgggcgcttcctgttgccggagaccaagatcggaagcgtgaaatacgaaggcatcgagttcatttaactcaaaacggaaacactgagcaaggccatcaggactcagcttttataaaaacaagaggagtgcacttttgttttgttttgttctttttggaactgtgcctgggttggaggtctggacagggagcccagtcccgggccccatagtggtgcgggcactggacccccgggccccacggaggccgcggtctgaactgctttccatgctgccatctggtggtgatttcggtcacttcaggcattgactcaaggcctgcctaactggctgggtcgtttcttccatccgacctcgtttcttttctttcctatgttcttttgttcagtgaatatccctagagctcctaccatatgtcaggccctatgcctcaccctgagaacgcagtgagcatgaggtggacctgtttgctgggaaccccaggtcacccccttttcttcctactctgtgcctggagcatcatgtccacccctgcagatccttggaaaagaaaatgtttatgttgcagggtattgcatggtcacgagtgagggcaggcccctggggacacatctgcccacagctgcacaggccagggcgcaggcacatctgttggttctcaggcctcagataaaaccatctccgcatcatatggccagtgaccgctttctcccttcaagaaaattctgtggctgtgcagtactttgaagttttaattattaacctgctttaattaaagcagtttcctttcttataaagtggaatcaccaaatcttatcacacagagcacagtcctgtagttacccagcccgctccagcagtgcgggagattgtaaggaagcggtggcggctggtgaagcaagtctcacatgtcggcgttcttggccaatggatacaaagataaagaaaatgttgcctttttctaggaactgtcagaaatcctcatgcctttcaagacttctgtgaatgacttgaattttttattccctgcctagggtctgtgaacgaggcctgtctcttccctggggtttctttccatggcctttatttctcctcttccagtgggagttttgcaggctcttctctgtggaaacttcacgagcgttggctgggcctcggcttcgctggagtgtactccagggtgaaggcagagtgggatttgagacccaggttaggcacgacccaggctgagaagggacgtttccatcattcacagtgccctccccacagcactacctcaccccgacccccaccctcactcctaccccaccccgcgatcgtcaggggtgccacggtgggccggagggtgccggctctggctgtccctgtgccggtccctcacaaacctctccccctttgaaactcaagcacagctgcgaggagggcagcgaggagggacccctctctcatggttgtctctttcccccgctatgtcataggtagtggaggaagcgaaggaagtgaacgctgaatgtgacgcatttctgaagagctcagctgtcaccgggcatagcctggaagccccaagtctgttctgactttgcctggctgtctccttgacccgcctcctagatcattgtccttgatgtccaggctgggtcatttaaaatagagatgcaatcaggaaggttgggggacttgggactgtggctgaattgagaccttgctgatgtattcatgtcagcacctgagtcacagcccaggtgcccggaagcagcctcttcgcataggcagtgatttgcgattactttaaagctcacctttttttcttcccctctctgttcgctgctgtcagcataatgattgtgttccttccctatgggatccatctgttttgtaaacaataaagcgtctgagggagtgtaaaaaaaaaaaaaaaaaaaaaaaaaaaa

SEQ ID NO: 3940 - DNA, 2427 bp, Homo sapien
cggacgcgtggggagaggctgtttaccagaacagcataacaagggcaggtctgactgcaaggctgggactgggaggcagagccgccgccaagggggcctcggttaaacactggtcgttcaatcacctgcaagacgaaggaggcaaggatgctgttggcctgggtacaagcattcctcgtcagcaacatgctcctagcagaagcctatggatctggaggctgtttctgggacaacggccacctgtaccgggaggaccagacctcccccgcgccgggcctccgctgcctcaactggctggacgcgcagagcgggctggcctcggcccccgtgtcgggggccggcaatcacagttactgccgaaacccggacgaggacccgcgcgggccctggtgctacgtcagtggcgaggccggcgtccctgagaaacggccttgcgaggacctgcgctgtccagagaccacctcccaggccctgccagccttcacgacagaaatccaggaagcgtctgaagggccaggtgcagatgaggtgcaggtgttcgctcctgccaacgccctgcccgctcggagtgaggcggcagctgtgcagccagtgattgggatcagccagcgggtgcggatgaactccaaggagaaaaaggacctgggaactctgggctacgtgctgggcattaccatgatggtgatcatcattgccatcggagctggcatcatcttgggctactcctacaagagggggaaggatttgaaagaacagcatgatcagaaagtatgtgagagggagatgcagcgaatcactctgcccttgtctgccttcaccaaccccacctgtgagattgtggatgagaagactgtcgtggtccacaccagccagactccagttgaccctcaggagggcagcaccccccttatgggccaggccgggactcctggggcctgagcccccccagtgggcaggagcccatgcagacactggtgcaggacagcccaccctcctacagctaggaggaactaccactttgtgttctggttaaaaccctaccactcccccgcttttttggcgaatcctagtaagagtgacagaagcaggtggccctgtgggctgagggtaaggctgggtagggtcctaacagtgctccttgtccatcccttggagcagattttgtctgtggatggagacagtggcagctcccacagtgatgctgctgctaagggcttccaaacattgcctgcacccctggaactgaaccagggatagacggggagctcccccaggctcctctgtgctttactaagatggcctcagtctccactgtgggcttgagtggcatacactgttattcatggttaaggtaaagcaggtcaagggatggcattgaaaaaatatatttagtttttaaaatatttgggatggaactccctactgacctctgagaactggaaacgagtttgtacagaagtcagaactttgggttgggaatgagatctaggttgtggctgctggtatgcttcagcttgctggcaatgatgtgccttgacaaccgtgggccaggcctgggcccagggactcttcctgtttcataaggaaaggaagaattgcactgagcattccacttaggaagaggatagagaaggatctgctccgcctttggccacaggagcagaggcagacctgggatgccccagtttctcttcagggatggatagtgacctgtcttcattttgcacaggtaagagagtagttagctaacctatgggaattatactgtggggccttgtgagctgcttctaagaggctaacctggaaactaagctcagaggcaaggtaataaagcacttcagggcttgctccccaagtgggcctgatttagcaggtggtcctgcgggcgtccaggtcagcaccttcctgtagggcactggggctagggtcacagcccctaactcataaagcaatcaaagaaccattagaaagggctcattaagccttttggacacaggaccccagagaggaaaaagtgacttgcccaaggtcgtaagcaagctactggcatggcaagagcccagcttcctgacggagcgcaacatttctccactgcactgtgctagcagctcagcagggcctctaacctgtgatgtcacactcaagaggccttggcagctcctagccatagagcttcctttccagaacccttccactgcccaatgtggagacaggggttagtggggctttctatggagccatctgctttggggacctagacctcaggtggtctcttggtgttagtgatgctggagaagagaatattactggtttctacttttctataaaggcatttctctatatacatgttttatatacctcattctgacacctgcatatagtgtgggaaattgctctgcatttgacttaattaaaaaaaaaaaaaaa

SEQ ID NO: 3941 - protein, 263 aa, Homo sapien
MLLAWVQAFLVSNMLLAEAYGSGGCFWDNGHLYREDQTSPAPGLRCLNWLDAQSGLASAPVSGAGNHSYCRNPDEDPRGPWCYVSGEAGVPEKRPCEDLRCPETTSQALPAFTTEIQEASEGPGADEVQVFAPANALPARSEAAAVQPVIGISQRVRMNSKEKKDLGTLGYVLGITMMVIIIAIGAGIILGYSYKRGKDLKEQHDQKVCEREMQRITLPLSAFTNPTCEIVDEKTVVVHTSQTPVDPQEGSTPLMGQAGTPGA

SEQ ID NO: 3942 - DNA, 2427 bp, Homo sapien; identical to SEQ ID NO: 3940

SEQ ID NO: 3943 - protein, 263 aa, Homo sapien; identical to SEQ ID NO: 3941

SEQ ID NO: 3944 - DNA, 1702 bp, Homo sapien
acaactgctaaagctccagagacacgagcgtgtgtggcagcaagagccgccagttcgggaccaccgcagctggggtggcagcggcgcaggaggggtcgcggggcgggagtggtgagcgcaggcggcaggggtctgggaaagacgaagtcgctatttgctgtctgagcgcgctcgcagctcctggaagtgttgccgcctctcggtttcgctctcgctcgctgcgctcctagaaggggcggccgcctccaggactgaccagggccaagtggcgctcggcgggcactacatggcggagggtgaagggtacttcgccatgtctgaggacgagctggcctgcagcccctacatccccctaggcggcgacttcggcggcggcgacttcggcggcggcgacttcggcggcggcgacttcggcggcggcgacttcggcggtggcggcagcttcggtgggcattgcttggactattgcgaaagccctacggcgcactgcaatgtgctgaactgggagcaagtgcagcggctggacggcatcctgagtgagaccattccgattcacgggcgcggcaacttccccacgctcgagctgcagccgagcctgatcgtgaaggtggtgcggcggcgcctggccgagaagcgcattggcgtccgcgacgtgcgcctcaacggctcggcagccagccatgtcctgcaccaggacagcggcctgggctacaaggacctggacctcatcttctgcgccgacctgcgcggggaaggggagtttcagactgtgaaggacgtcgtgctggactgcctgttggacttcttacccgagggggtgaacaaagagaagatcacaccactcacgctcaaggaagcttatgtgcagaaaatggttaaagtgtgcaatgactctgaccgatggagtcttatatccctgtcaaacaacagtggcaaaaatgtggaactgaaatttgtggattccctccggaggcagtttgaattcagtgtagattcttttcaaatcaaattagactctcttctgctcttttatgaatgttcagagaacccaatgactgagacatttcaccccacaataatcggggagagcgtctatggcgatttccaggaagcctttgatcacctttgtaacaagatcattgccaccaggaacccagaggaaatccgagggggaggcctgcttaagtactgcaacctcttggtgaggggctttaggcccgcctctgatgaaatcaaggcccttcaaaggtacatgtgttccaggtttttcatcgacttctcagacattggagagcagcagagaaaactggagtcctatttgcagaaccactttgtgggattggaagaccgcaagtatgagtatctcatgacccttcatggagtggtaaatgagagcacagtgtgcctgatgggacatgaaagaagacagactttaaaccttatcaccatgctggctatccgggtgttagctgaccaaaatgtcattcctaatgtggctaatgtcacttgctattaccagccagccccctatgtagcagatgccaactttagcaattactacattgcacaggttcagccagtattcacgtgccagcaacagacctactccacttggctaccctgcaattaagaatcatttaaaaatgtcctgtggggaagccatttcagacaagacaggagagaaaaaaaaaaaaaaaaaaaa

SEQ ID NO: 3945 - protein, 447 aa, Homo sapien
MAEGEGYFAMSEDELACSPYIPLGGDFGGGDFGGGDFGGGDFGGGDFGGGGSFGGHCLDYCESPTAHCNVLNWEQVQRLDGILSETIPIHGRGNFPTLELQPSLIVKVVRRRLAEKRIGVRDVRLNGSAASHVLHQDSGLGYKDLDLIFCADLRGEGEFQTVKDVVLDCLLDFLPEGVNKEKITPLTLKEAYVQKMVKVCNDSDRWSLISLSNNSGKNVELKFVDSLRRQFEFSVDSFQIKLDSLLLFYECSENPMTETFHPTIIGESVYGDFQEAFDHLCNKIIATRNPEEIRGGGLLKYCNLLVRGFRPASDEIKALQRYMCSRFFIDFSDIGEQQRKLESYLQNHFVGLEDRKYEYLMTLHGVVNESTVCLMGHERRQTLNLITMLAIRVLADQNVIPNVANVTCYYQPAPYVADANFSNYYIAQVQPVFTCQQQTYSTWLPCN

SEQ ID NO: 3946 - DNA, 1924 bp, Homo sapien
gggcccccccwcgwkttttttttttttttttttaattaggataatgcctttattaacgagaatgaaacgttcattcctccttccactccttctcgttggttttctggacacagctcacctgatcctgctagaaacgttgtcagtctgcttgtggcttccctccttgattgactcacgctgtgtgatgtcttgagaagtatctatccacttcatgtgaatgagcactccaatatcagccaacatcaatcattcttacctaaagaataataagaaaaagttaatataaaagacaagggtataaaataaaggtttgaaaatgctagtcaacttcaaaatttaaagagtaaaaatccagagataaagattgggggtaagttacagcataaaaaaataggaagaaacttcatggtgggggggaaatctaaaattattcttacataaaataagtagacacctgaattagaatgaaaactgtattttctttaaaatgtaaaagcctgactctcagtttcaccagtctgagcacaagtttgactgcaacccaaaatatactatcccttatgtgaaggtatgtgacaacgttgacctcaccaaatgagttttaacatcagctcttttttcatatgaaagcacataccctgctccccattcaagtatgtcttccattgtcaggcaggctgaccaccttcagcaggagtcctccaagagtgcccaactccccttcccacagtacacaacgctgtagttgttgtcctgcaatcctttgtatttacctcattctttcccatctaagtcctcactgagttttaaagttagggctggaaaagctatgccttactgggacagcaaggaaccaatttttttctgagggagaagacattcaccttcactatatgcctggcagggccacagtgcacaaaacaaagatcagccttcattcaagttccaggtttttcttcctccctgaatgattactgcaaagggtatatgaagtaagagttccctgttgcacatgtaccatccataagggatactatatcgttttgcattcttccccccattctccacattgtcctatcttaagtccaagcccttttcactctcaaaaaaaaaaaaaaaatatttttttcagcactggtgttcaaaagcaacgtttttatggttaatggtttaccagcaactgttgagatttccagttgagtcttaaaaattgccaatcattatctagcagcaatgacagatgattaggagcagtcaaatcctctgaattctttccctaataggcagccatttgagaactgcactagctgacatcactaaaacattatcagctaaagccaaaaccaaataaaggcccagaccaacatcctggctctctaaaacctgtccaaaatcattaagtgaaaggcagtaaatgcaggactgtggatcatgtcactgcagctgacaatgattaacaataggagacatgcaacccccattaaggttaaaagtccaaaactagtcacacgcatctctttattggggaaaagtgagactattatgcattcttggtaggtttgcaaccttgcatgaagagcacccattgcatttctttcatctttcagaaagcaccggtatctgttccaagggcctaacagtacgaaaatacattctggcatcacacctctgaacccaagactgttctcattaaaaataattttggtttgtaacaaaattatgaaatacaatgcaagcacctcggtatagcattattactgaaaccacttaattcccagctttttgagttttttaaaaaaacccactgcactaagattcacaattcattgctacatacaaattaaagctagtaagaacacactaacgtcacaagtttctcattctaaagtgcaaaagcctaatcatctgaaagtgaacagggtaa

SEQ ID NO: 3947 - protein, 43 aa, Homo sapien
MKRSFLLPLLLVGFLDTAHLILLETLSVCLWLPSLIDSRCVMS

SEQ ID NO: 3948 - DNA, 2130 bp, Homo sapien
actcgcgggtaacttgcttttgggagccagcggtatggcgtcgggctgcaagattggcccgtccatcctcaacagcgacctggccaatttaggggccgagtgcctccggatgctagactctggggccgattatctgcacctggacgtaatggacggacatgcacatgatggtgtccaagccagaacagtgggtaaagccaatggctgtagcaggagccaatcagtacacctttcatctcgaggctactgagaacccaggggctttgattaaagacattcgggagaatgggatgaagtcttgctctgtcacccaggctgaagtgcagtggcacagtcagggcccattgcaggttggccttgccatcaaaccaggaacctcagttgagtatttggcaccatgggctaatcagatagatatggccttggttatgacagtggaaccggggtttggagggcagaaattcatggaagatatgatgccaaaggttcactggttgaggacccagttcccatctttggatatagaggtcgatggtggagtaggtcctgacactgtccataaatgtgcagaggcaggagctaacatgattgtgtctggcagtgctattatgaggagtgaagaccccagatctgtgatcaatctattaagaaatgtttgctcagaagctgctcagaaacgttctcttgatcggtgaaaccataaggagcccagtgttcctgttcatgaaatctcccttttactggaaaacaggaatattgactaccaaatcacaatgcaattgaagccgtactgcttttttgagcagttattcattccagtgattaaaactgattgtgcagaatattctaagaggtcagaaattggtgtgtataactacatttttagtgatgcaatttattgattagtgagtaagatactgtttttattgagagatttgatttttataaagtaaaaatacggctgcattagggttacaaacagaaaagtgtcttaatgtctaaggagggcatattagctacactacaaaaacaaattttgtctgtacttctgaaaagaattttgttgtttctcagctgttttccaaaagcaaaggaagtctttatggtttttttctatttcatgttattgtgatttgtttataagtttgggtggggtgcataccatattcttggttcttaaaatctatcacttttcaccttatacttgatgtgtgaaaactataaaaacaatgtgtgaaacccaggggttctaaaatacaagcatagattttatcagggtgttttgtcaaagcaggttattcagtgattcctccccaccattcttaagaacgttaaataatgctgttgtgttagctctgagtagaaaggaaaaagtaaaacctctgtttggaggtaatattgggttgaattctgactgcccctttctagctggacctttaacaaatcacccaatcttttttgtgtttctctaaagtcatttatacattaaatgtaattatagcaactgtggggttctgttgagaattaagagctaacactatatatgtaaagtttccagtactagtcccagaatttagaatatgctcaacacaaagtaaacagcattatataagtttatatttttgtgagttataaagtactttgatatattctcattaaatctgtaaatcacctctataagtaagtggtaataataaagcagatatttttgtccccatttaaaaaatgaagaaattaatgcttaatagggtggtaccctggaaaggatctgggaagtggtagaatttctggtctgtacttttacaaatggagcccttgggaggtgggttaggtaaaagaagctttttacttaacgttgtcttatttccagtctaattttacgctgtagcagaaccagatggctgagaaaattctggaactatggatcttgaccccaaggatatattattttattccaagaaagatcaggtaggcgaaaagatgacaggatacagagtcaatccataaactaaatatttataactgttctgaattatacagagtctaaaaatatgtgtcagctacttcattcctgtaaatactcttgctgtgttataaatatggcaagaaataaacatgaccaatatcaat

SEQ ID NO: 3949 - protein, 178 aa, Homo sapien
MHMMVSKPEQWVKPMAVAGANQYTFHLEATENPGALIKDIRENGMKSCSVTQAEVQWHSQGPLQVGLAIKPGTSVEYLAPWANQIDMALVMTVEPGFGGQKFMEDMMPKVHWLRTQFPSLDIEVDGGVGPDTVHKCAEAGANMIVSGSAIMRSEDPRSVINLLRNVCSEAAQKRSLDR

SEQ ID NO: 3950 - DNA, 2869 bp, Homo sapien
acgcgtccgccggagcgggccatggacgcgctcaagtcggcggggcgggcgctgatccggagccccagcttggccaagcagagctgggggggcggtggccggcaccgcaagctgcctgagaactggacagacacgcgggagacgctgctggaggggatgctgttcagcctcaagtacctgggcatgacgctagtggagcagcccaagggtgaggagctgtcggccgccgccatcaagaggatcgtggctacagctaaggccagtgggaagaagctgcagaaggtgactctgaaggtgtcgccacggggaattatcctgacagacaacctcaccaaccagctcattgagaacgtgtccatatacaggatctcctattgcacagcagacaagatgcacgacaaggtgtttgcatacatcgcccagagccagcacaaccagagcctcgagtgccacgccttcctctgcaccaagcggaagatggcacaggctgttaccctcaccgtagcccaggccttcaaagtcgcctttgagttttggcaggtgtccaaggaagagaaagagaagagggacaaagccagccaagagggaggggacgtcctgggggcccgccaagactgcaccccccccttgaagagcttggtcgccactgggaacctgctggacttagaggagacggctaaggccccgctgtccacggtcagcgccaacaccaccaacatggacgaggtgccgcggccacaagccttgagtggcagcagtgttgtctgggagctggatgatggcctggatgaagcgttttcgaggcttgcccagtctcggacaaaccctcaggtcctggacactggcctgacagcccaggacatgcattacgcccagtgcctctcgcctgtcgactgggacaagcctgacagcagcggcacagagcaggatgacctcttcagcttctgagggcccggggccagccggacacaagcggccctgacacgtgatggaccaaagccacctgctgcgggggagccagttctggggcccgcctgccacctctcccagccctcagcattgtcagcctgaagatcagagctgcagccagtcaggcaggggagagatttttcttttaagccctgctctttctctgagaaccaaaagatgccttgaatatttattcagtgacttctggcttatgctcagaagccagtctgcgtcaggcacgtctcctgctgcgtgacatgtgcagtgctgtaatcggctcccgcttgctctcctggagcaagctctgccctggctgtgggtatcaggactgtgaccaaagcatttctagtcccttctctctttctaaggacccaaatttccctgggggcatcctgcttcctgaaagctgttggatttcagtgatttttccccccaccccccagcacaggagagcacccacagccgcagaaggggaatgtgtcctcctgctctgcttcctcagggcccagcaggcgggggtttgagccctggaccccaggctcttagagactaaggggcagctcctgaccaaagacgatacagcttggcactttaaagcattaacagcaggtgtgaccctgagggctcctccatggtgctgcattgagtccagctttccttctgcccttcctccaggagaaggggcccaaggtccccgtggatggtctccacctgtgcttggaaccagtgtaactggctgctccctgctcccagggactgacacggggatcatctctgtgaccgccctccgtcgggcccctgcctgccttctcccctccacgcaaggctgtgctcttcctctggtttctgtgtgtccgtttgagtgtctgcgccccgcctccccatacttcctgggatgatgtgtgaaacctgacacctagatttatttggaaatattctatgaccactttacagatgaggaaactgaggcctcaagcgtggaggggtagagtgaagagtagaacccaggtctgatgccaaagctgctttcttctctgcctcctcctcacgcaactcacacctccttttcttctagctttgttgtcctcccaggaaccaaaaaaccccagctattttctgaccaaaatgtgtttcataacaaaccatctggtgcctttccacacagaactggcaggagcctcgtgtcctgctagctgtctctcttgttgatttccgtgaaaatgcaagtgtttgaagtctgctcattccgagggtgaaacaaaatccaaccctgtcagaatcatgctgttctctttgctgacactgtgaccctgggtcgggacagaccagcagcaatctgtctttagaatcgctttccttcctccccttttgcccccgtggggctcccggcatcctgaaagccagcaaagcctccagcatcttttccatcctgaggtgcctcccagtggcctggcttgtcggagcaagtttcatcagccctagggaaaacacggccctcctgggaacctccttacctggagtaaccggacaccttagacggaggtgcctgagggtggggtgggatttgcagggtcattatcagaacatgaggataacttccttgcccctgctctgtagccacctccttggcaccggcctctatttgtcataaggcggcgtgggcgaggcctgacacaggccagccttggcacgaggggggccaggggttctgagaagcgctgccctgtgagagccacgctggccttcgtctccatctctggttgacgggctgtccgtgtgcctcctgtgtgtctgcagacaagtcttgctgtgctttatttgtgaaactttaatgaggaaaaaacaaataataaatgttctcgttttgaaactcaaaaaaaaaaaaaaaaagggcggccgc

SEQ ID NO: 3951 - DNA, 4682 bp, Homo sapien
aaggatccaagtgtcacggggtctgggcaatgcaggacgggaggggctgcgtgagtgagtacagaagggaaatgagtgagggggcatgggatctcagagaaaatcagggacctctgagcaaagtggaaaggacgaccgccgcagctcctcgggccgtagctcgaccccgccttcccttttccgcagaatcctcgccttggctgcagcagcgcgctgcccccactggccggcgtgccgtgatcgatcgcaggctgcgtcaggacctcccggcgtataaataggggtggcagaacggcgccgagccgcacacagccatccatcctcccccttccctctctcccctgtcctctctctccgggctcccaccgccgccggggagcaccggccgccaaccaatgagttccttcagctacgagccgtactactcgacctcctacaagcggcgctacgtggagacgccccgggtgcatatcagcgtgcgcagcggctacagcaccgcacgctcagcttactcaagctactcggcgccggtgtcttcctcgctgtccgtgcgccgcagctactcctccagctctggatcgttgatgcccagtctggagaacctcgacctgagccaggtagccgccatcagcaacgacctcaagtccatccgcacgcaggagaaggcgcagctccaggacctcaatgaccgcttcgccagcttcatcgagcgcgtgcacgagctggagcagcagaacaaggtcctggaagccgagctgctggtgctgcgccagaagcactccgagccatcccgcttccgggcgctgtacgagcaggagatccgcgacctgcgcctagcggcggaagatgccaccaccaacgagaagcaagcgctccgaggcgagcgcgaagaagggctggaggagaccctgcgcaacctgcaggcgcgctatgaagaggaggtgctgagccgcgaggacgccgagggccggctgatggaacgccgcaaaggcgccgacgaggcggcgctcgctcgcgccgagctcgagaagcgcatcgacagcttgatggacgaaatctcttttctgaagaaagtgcacgaagaggagatcgccgaactgcaggcgcagatccagtacgcgcagatctccgtggagatggacgtgaccaagcccgacctttccgccgcgctcaaggacatccgcgcgcagtacgagaagctggccgccaagaacatgcagaacgctgaggaatggttcaagagccgcttcacggtgctgaccgagagcgccgccaagaacaccgacgccgtgcgcgccgccaaggacgaggtgtcggagagccgtcgtctgctcaaggccaagaccctggaaatcgaagcatgccggggcatgaatgaagcgctggagaagcagctgcaggagctggaggacaagcagaacgccgacatcagcgctatgcaggtgcggcacggccagaaacacaggggggcggggaactcgagcaagggggggagttggtgcgcccagaaagcgaaaccaggggtggtgcggctgcccagctcttagggatagggcttggctccttggccactgtgtggaggggtggggctcttgaggggcgtgagtgcgggcgccactgtagtccgggagtgactgctccgcgtgctgcaccggcgttccgcattaaagctgcccgacccttgttgggtggggaggggaagacgtgggaattgggcgttgcctccgactgcagtgagatcagctctctactgacctgcgttgaccacgagttactttgcagcgactatcggatcgtctagttaataaatagtacgagtgaactaactctcaattaattctgaaggattactgtgaccagcatgctttatgactagttttaccaaccacctcccttcctttatttagtaggtagacaggaaaatagtcaacattgttttaggtagttaactagtgatgttcatagtaaaccatttccttttaccttttttttttctttttttctttatgtgtaaaatcttctacaacatttctgtttaaacatctccatcttctggggagtagaaaaaatacaattttaaaaagatctccattttaaaacatctccgtcttctggggagtagaaatttttttcttcttctggggagtagaaaaaataatttagatacataggaaatatttcatagaaaataatttttttcttttttttgtttacatctggtattttcttctcataaagaaaggcattagtttcctggcatgtaacccagctaaagaagagtaatcagtgaatgagagacacagtttttctatcaacttagtctgtttttctatcaacttagtctgtttgcatgcattttatgatgatcattaaacagtattaagtaaagaaacagaagaacagaattttcgtccatcttttttttcatctcaggcttcatgaacttgggtattttaggcatgaaggtttttcaaaagatacaggaagttattctaggagagattttatcaaagtgtgcaccttgattttaatcgaaactaggcctttgcaactacactacagtaaaataatagaagggatttatgctcggattttttttttgttttatttttgtcttcaaacaggacacgatcaacaaattagaaaatgaattgaggaccacaaagagtgaaatggcacgatacctaaaagaataccaagacctcctcaacgtgaagatggctttggatattgagattgctgcttacaggtgaaaatagaggggcaaagacagcagccattaaaccttaggaagaaaatcagatcccatttaaagttatgttggatcagaaaccttcaataatagtccttttgaaataatgaagtgttagtttttggcttcttccaagaagagggtatttagatatataagaatttaaccctgtaattagagtcctgtttttatcttgtcattacactttaaatctaataggagtgatttatttatattttttctggtctccatcaaaagatccccaggcattaagtattgataaatcccagccctgctcctgcttgcctttgtgtttagggtactcagagcaagttgtgaaacacaggtgttttttaacctcaccttgcacctgcatccccaggaaactcttggaaggcgaggagacccgactcagtttcaccagcgtgggaagcataaccagtggctactcccagagctcccaggtctttggccgatctgcctacggcggtttacagaccagctcctatctgatgtccacccgctccttcccgtcctactacaccagccatgtccaagaggagcagaccgaagtggaggaaaccattgaggcgtctaaggctgaggaagccaaggatgagcccccctctgaaggagaagccgaggaggaggagaaggacaaggaagaggccgaggaagaggaggcagctgaagaggaagaaggtatgataagaaaaaacccctgcaacttcaagtgtaaactgggtgtggagatttgttaggaggtggataagacaaatgaagccttgctcatttattcatatatgacattagaatcataaataaattttctgtttgtttagcaaaactttcctaaggcatctactctgaatgaggtgattggtcaaaattttcattttttaatataatcatttaacacagcaggttggtgtcctaaagaacaaaaatagataccagacacataatgaaagaaatattgaggttaagtcttggagaggagcagagcttcccatacctagaagtgatctcattcgatttaaatatgtgttcagtggcaaattattcatggcaagctttgtctgttacatgtgcttttggagagagtggagctgggaggttttggtagcattctgacagttgtgtttgcaaataaaacctttgcagacatgttttgactggacttaccctggatttgcattttgtacattttctttttatgttaaagctgccaaggaagagtctgaagaagcaaaagaagaagaagaaggaggtgaaggtgaagaaggagaggaaaccaaagaagctgaagaggaggagaagaaagttgaaggtgctggggaggaacaagcagctaagaagaaagattgaacccccatttccttaattatttcaggaataattctcccgaaatcaggtcaaccccatcaccaaccaaccaaccagttgagttccagattctatgtgaattaaaaagtcaatatatgtataattctgagatgacttaggttggacattcaatgttgtgctatgaatttcctctttatgcagagtatctgtttgcttgcagagtggctttcggcttgctgccagcctgtgcatggtccacgcttatgagttcaggatctacggcaatgtgaatcattcagatgtttacaataaaaaacaccacatgagtaaatgaattcactaatgttaatgttaaacttcatggaaaagtagtcctttgaaccttcggtggttagcaattaaagaccctgagttatgtgcaataaatagtaaataaagttataccgaatgatgtattttttgccgtggttgttacctaattaaaataccttaaagatggcaccaatataaagtgtgtgccagtgaactattgacctccaattttttaaaaagccgaaattttaacaattaccaatactttttt

SEQ ID NO: 3952 - protein, 383 aa, Homo sapien
MSSFSYEPYYSTSYKRRYVETPRVHISVRSGYSTARSAYSSYSAPVSSSLSVRRSYSSSSGSLMPSLENLDLSQVAAISNDLKSIRTQEKAQLQDLNDRFASFIERVHELEQQNKVLEAELLVLRQKHSEPSRFRALYEQEIRDLRLAAEDATTNEKQALRGEREEGLEETLRNLQARYEEEVLSREDAEGRLMERRKGADEAALARAELEKRIDSLMDEISFLKKVHEEEIAELQAQIQYAQISVEMDVTKPDLSAALKDIRAQYEKLAAKNMQNAEEWFKSRFTVLTESAAKNTDAVRAAKDEVSESRRLLKAKTLEIEACRGMNEALEKQLQELEDKQNADISAMQVRHGQKHRGAGNSSKGGSWCAQKAKPGVVRLPSS

SEQ ID NO: 3953 - DNA, 1323 bp, Homo sapien
cacaaaggcaccaaaccacaaaacgtcacacgtaaacatcatacgtggcaaccacaagccaatcagttggatatttcattcattggtatacatatggactgtaaggtgtctttcaggttgcagaaaagatggaaaaaaggacatgtgcactctgccccaaagatgtcgaatataatgtcctgtactttgcacaatcagagaatatagctgctcatgagaattgtttgctgtattcttcaggacttgtggaatgtgaggatcaggatccacttaatcctgatagaagttttgatgtggaatcagtaaagaaagaaatccagagaggaaggaagttgaaatgcaaattttgtcataaaagaggagccaccgtgggatgtgatttaaaaaactgtaacaagaattaccactttttctgtgccaagaaggacgacgcagttccacagtctgatggagttcgaggaatttataaactgctttgccagcaacatgctcaattcccgatcatcgctcaaagtgctaaattttcaggagtgaaaagaaaaagaggaaggaagaaacccctctcaggcaatcatgtacagccacccgaaacaatgaaatgtaatacattcataagacaagtgaaagaagagcatggcagacacacagatgcaactgtgaaagttccttttcttaagaaatgcaagggaagcaggacttcttaattacttacttgaagaaatattagacaaagttcattcaattccagaaaaactcatggatgagacttacttcagaatcagactatgaagaaatcgggagtgcactttttgactgtagattgttcgaagacacatttgtaaattttcaagcagcaatagagaaaaaaattcatgcatctcaacaaaggtggcagcagttgaaggaagagattgagctacttcaggacttaaaacaaaccttgtgctcttttcaagaaaatagagatcttatgtcaagttctacatcaatatcatccctgtcttattagggattaccatttcctaagccaagagtcatgtcaaattgcaatcaggctcaaaaccagagaccaggctgtgaaatccacacatctttagaactagtcgtctcctcttggcctcagcagctcttccctgttcttactggttgacattttgatcactctttgcacactcttgtgttttttgctcactgtcacactcccagcacctagtatgctcagtaaatgtttgtggaataagtgcataaaatgttcttaacctttgattctacttacagcccatgatagcctcttagatataataaatttggattatactaaaa

SEQ ID NO: 3954 - protein, 191 aa, Homo sapien
MEKRTCALCPKDVEYNVLYFAQSENIAAHENCLLYSSGLVECEDQDPLNPDRSFDVESVKKEIQRGRKLKCKFCHKRGATVGCDLKNCNKNYHFFCAKKDDAVPQSDGVRGIYKLLCQQHAQFPIIAQSAKFSGVKRKRGRKKPLSGNHVQPPETMKCNTFIRQVKEEHGRHTDATVKVPFLKKCKGSRTS

SEQ ID NO: 3955 - DNA, 2930 bp, Homo sapien
ggcacgaggggcggcggagccgactcgtcgcggccgaggcgcacgcggtccgcgccggcgtcagtctgggattggccggcccgcgacttcctccgccccctgccaatcgccggggacgacttccgtgggtttttccggctctcccgcgtcgctaaggagcgacgggctgtcggccagaccccgagttctcggtgcgctcagcggccgccgacgctaggaggccgcgctccgcccccgctaccatgaggccccggaaagccttcctgctcctgctgctcttggggctggtgcagctgctggccgtggcgggtgccgagggcccggacgaggattcttctaacagagaaaatgccattgaggatgaagaggaggaggaggaggaagatgatgatgaggaagaagacgacttggaagttaaggaagaaaatggagtcttggtcctaaatgatgcaaactttgataattttgtggctgacaaagacacagtgctgctggagttttatgctccatggtgtggacattgcaagcagtttgctccggaatatgaaaaaattgccaacatattaaaggataaagatcctcccattcctgttgccaagatcgatgcaacctcagcgtctgtgctggccagcaggtttgatgtgagtggctaccccaccatcaagatccttaagaaggggcaggctgtagactacgagggctccagaacccaggaagaaattgttgccaaggtcagagaagtctcccagcccgactggacgcctccaccagaagtcacgcttgtgttgaccaaagagaactttgatgaagttgtgaatgatgcagatatcattctggtggagttttatgccccatggtgtggacactgcaagaaacttgcccccgagtatgagaaggccgccaaggagctcagcaagcgttctcctccaattcccctggcaaaggtcgacgccaccgcagaaacagacctggccaagaggtttgatgtctctggctatcccaccctgaaaattttccgcaaaggaaggccttatgactacaacggcccacgagaaaaatatggaatcgttgattacatgatcgagcagtccgggcctccctccaaggagattctgaccctgaagcaggtccaggagttcctgaaggatggagacgatgtcatcatcatcggggtctttaagggggagagtgacccagcctaccagcaataccaggatgccgctaacaacctgagagaagattacaaatttcaccacactttcagcacagaaatagcaaagttcttgaaagtctcccaggggcagttggttgtaatgcagcctgagaaattccagtccaagtatgagccccggagccacatgatggacgtccagggctccacccaggactcggccatcaaggacttcgtgctgaagtacgccctgcccctggttggccaccgcaaggtgtcaaacgatgctaagcgctacaccaggcgccccctggtggtcgtctactacagtgtggacttcagctttgattacagagctgcaactcagttttggcggagcaaagtcctagaggtggccaaggacttccctgagtacacctttgccattgcggacgaagaggactatgctggggaggtgaaggacctggggctcagcgagagtggggaggatgtcaatgccgccatcctggacgagagtgggaagaagttcgccatggagccagaggagtttgactctgacaccctccgcgagtttgtcactgctttcaaaaaaggaaaactgaagccagtcatcaaatcccagccagtgcccaagaacaacaagggacccgtcaaggtcgtggtgggaaagacctttgactccattgtgatggaccccaagaaggacgtcctcatcgagttctacgcaccatggtgcgggcactgcaagcagctagagcccgtgtacaacagcctggccaagaagtacaagggccaaaagggcctggtcatcgccaagatggacgccactgccaacgacgtccccagcgaccgctataaggtggagggcttccccaccatctacttcgcccccagtggggacaaaaagaacccagttaaatttgagggtggagacagagatctggagcatttgagcaagtttatagaagaacatgccacaaaactgagcaggaccaaggaagagctttgaaggcctgaggtctgcggaaggtgggaggaggcagacaccctgcgtggcccatggtcggggcgtccacgccgaggccggcaacaaacgacagtatctcggattccttttttttttttttttaattttttatactttggtgtttcacttcatgctctgaatactgaataaccatgaatgactgaatagtttagtccagatttttacagaggatacatctatttttatcattatttggggtttgaaaaatttttttttacaccttctaatttctttatttctcaaagcagataattcttctgtgtgaaaatgttttctttttttaatttaaggtttaaaattcctttgccaaatcatgttgattttgctctttgctttttcgttgtctgagaaattgttggcgtagatttggcttctggtatgtgtttctgattgcttcctgttgagcacaaagtgagagctgccactgagcagccctgccaggggtgctgtttcaggctgggcatcgccaggcggcctccctgcaaaccaagggctgggggcaaaggggcatgatccagggtcccccagggtgggctcagctccagggagaggccacccacgtggcagccccacctcttgagagcccccagtgccggagcagaaaggaccctggacccagaggcagatactgcggggtggtagaaaaggtagagtaggctgtggcaatggaataaaacacgattaaaaacgttaaaaaaaaaaaaaaaaaaa

SEQ ID NO: 3956 - protein, 645 aa, Homo sapien
MRPRKAFLLLLLLGLVQLLAVAGAEGPDEDSSNRENAIEDEEEEEEEDDDEEEDDLEVKEENGVLVLNDANFDNFVADKDTVLLEFYAPWCGHCKQFAPEYEKIANILKDKDPPIPVAKIDATSASVLASRFDVSGYPTIKILKKGQAVDYEGSRTQEEIVAKVREVSQPDWTPPPEVTLVLTKENFDEVVNDADIILVEFYAPWCGHCKKLAPEYEKAAKELSKRSPPIPLAKVDATAETDLAKRFDVSGYPTLKIFRKGRPYDYNGPREKYGIVDYMIEQSGPPSKEILTLKQVQEFLKDGDDVIIIGVFKGESDPAYQQYQDAANNLREDYKFHHTFSTEIAKFLKVSQGQLVVMQPEKFQSKYEPRSHMMDVQGSTQDSAIKDFVLKYALPLVGHRKVSNDAKRYTRRPLVVVYYSVDFSFDYRAATQFWRSKVLEVAKDFPEYTFAIADEEDYAGEVKDLGLSESGEDVNAAILDESGKKFAMEPEEFDSDTLREFVTAFKKGKLKPVIKSQPVPKNNKGPVKVVVGKTFDSIVMDPKKDVLIEFYAPWCGHCKQLEPVYNSLAKKYKGQKGLVIAKMDATANDVPSDRYKVEGFPTIYFAPSGDKKNPVKFEGGDRDLEHLSKFIEEHATKLSRTKEEL

SEQ ID NO: 3957 - DNA, 2048 bp, Homo sapien
gcggcggccaggggggagccggggcggccgttgcggggcgcgctctcgagaggcggcggcggccagggtgtcccgtcggtctcggcgccgggaagaggcggtggcgctgcccgcggtggcgggggttggcgacggagcgcgttggtgccaggaccggggtccgaggcgcgctctccgcccacagaaatgagccgtcagactgctacagcattacctaccggtacctcgaagtgtccaccatcccagagggtgcctgccctgactggcacaactgcatccaacaatgacttggcgagtctttttgagtgtccagtctgctttgactatgtgttaccgcccattcttcaatgtcagagtggccatcttgtttgtagcaactgtcgcccaaagctcacatgttgtccaacttgccggggccctttgggatccattcgcaacttggctatggagaaagtggctaattcagtacttttcccctgtaaatatgcgtcttctggatgtgaaataactctgccacacacagaaaaagcagaccatgaagagctctgtgagtttaggccttattcctgtccgtgccctggtgcttcctgtaaatggcaaggctctctggatgctgtaatgccccatctgatgcatcagcataagtccattacaaccctacagggagaggatatagtttttcttgctacagacattaatcttcctggtgctgttgactgggtgatgatgcagtcctgttttggctttcacttcatgttagtcttagagaaacaggaaaaatacgatggtcaccagcagttcttcgcaatcgtacagctgataggaacacgcaagcaagctgaaaattttgcttaccgacttgagctaaatggtcataggcgacgattgacttgggaagcgactcctcgatctattcatgaaggaattgcaacagccattatgaatagcgactgtctagtctttgacaccagcattgcacagctttttgcagaaaatggcaatttaggcatcaatgtaactatttccatgtgttgaaatggcaatcaaacattttctggccagtgtttaaaacttcagtttcacagaaaataaggcacccatctgtctgccaacctaaaactctttcggtaggtggaagctagacacatgaaggtaaataaaaagaaaggctgttaaatacaggaaacagttgcatgtagtaacactaatatatttaaaaataagtcaacagtaaaccactgaaaaaatatatgtatatacacccaagatgggcatcttttgtattaagaaaggaagcattgtaaaataattctgagttttgtgtttgttgtagattgattgtattgttgaaaaagtttgtttttgccgtgggagtgtgtgcctgcgtgggtgtgtgcgtgttggtttttccttaactgacaagccatcttgagtggtcatgggccactgcttttccctttgtgagtcaatacatagtgctgctgtgtgctttttttgtgtgtatttgctaatttttattaattttagtttttcattaaataaatttgacttttctgtaattcaggtttttcctttttttgtaccattttaaagttagtatcttttgatatgcatatttgtttatggtaaaaaatttataacgtgttcaatattttcttttcccccattaatcagttcattagaaatattttaaaatcagctattttgtgaagccatgagttccagaaagtaaaggtgacatcggaaaaataatcccaagctatttaaagcatctataaggtgctctctttctgtcttctacagatgagtcacacctttgagcttaatcttgaaggttagagataaattgatttttataaatactgcaaatcaggcttttgtttcctttttcagatatcttggacaaatcacatattttaaaatttgttcttgtatttattggttttgcagaagaaggcatcgtcatgcacagtatttgtaattaaaagcaaatcatttgtttaaaaaggcagtttgcaaaaaatgtttttggtcttttataattctca

SEQ ID NO: 3958 - protein, 282 aa, Homo sapien
MSRQTATALPTGTSKCPPSQRVPALTGTTASNNDLASLFECPVCFDYVLPPILQCQSGHLVCSNCRPKLTCCPTCRGPLGSIRNLAMEKVANSVLFPCKYASSGCEITLPHTEKADHEELCEFRPYSCPCPGASCKWQGSLDAVMPHLMHQHKSITTLQGEDIVFLATDINLPGAVDWVMMQSCFGFHFMLVLEKQEKYDGHQQFFAIVQLIGTRKQAENFAYRLELNGHRRRLTWEATPRSIHEGIATAIMNSDCLVFDTSIAQLFAENGNLGINVTISMC

SEQ ID NO: 3959 - DNA, 2639 bp, Homo sapien
tcgaggcgaccgcgacagtggtgggggacgctgctgagtggaagagagcgcagcccggccaccggacctacttactcgccttgctgattgtctatttttgcgtttacaacttttctaagaacttttgtatacaaaggaactttttaaaaaagacgcttccaagttatatttaatccaaagaagaaggatctcggccaatttggggttttgggttttggcttcgtttcttctcttcgttgactttggggttcaggtgccccagctgcttcgggctgccgaggaccttctgggcccccacattaatgaggcagccacctggcgagtctgacatggctgtcagcgacgcgctgctcccatctttctccacgttcgcgtctggcccggcgggaagggagaagacactgcgtcaagcaggtgccccgaataaccgctggcgggaggagctctcccacatgaagcgacttcccccagtgcttcccggccgcccctatgacctggcggcggcgaccgtggccacagacctggagagcggcggagccggtgcggcttgcggcggtagcaacctggcgcccctacctcggagagagaccgaggagttcaacgatctcctggacctggactttattctctccaattcgctgacccatcctccggagtcagtggccgccaccgtgtcctcgtcagcgtcagcctcctcttcgtcgtcgccgtcgagcagcggccctgccagcgcgccctccacctgcagcttcacctatccgatccgggccgggaacgacccgggcgtggcgccgggcggcacgggcggaggcctcctctatggcagggagtccgctccccctccgacggctcccttcaacctggcggacatcaacgacgtgagcccctcgggcggcttcgtggccgagctcctgcggccagaattggacccggtgtacattccgccgcagcagccgcagccgccaggtggcgggctgatgggcaagttcgtgctgaaggcgtcgctgagcgcccctggcagcgagtacggcagcccgtcggtcatcagcgtcagcaaaggcagccctgacggcagccacccggtggtggtggcgccctacaacggcgggccgccgcgcacgtgccccaagatcaagcaggaggcggtctcttcgtgcacccacttgggcgctggaccccctctcagcaatggccaccggccggctgcacacgacttccccctggggcggcagctccccagcaggactaccccgaccctgggtcttgaggaagtgctgagcagcagggactgtcaccctgccctgccgcttcctcccggcttccatccccacccggggcccaattacccatccttcctgcccgatcagatgcagccgcaagtcccgccgctccattaccaagagctcatgccacccggttcctgcatgccagaggagcccaagccaaagaggggaagacgatcgtggccccggaaaaggaccgccacccacacttgtgattacgcgggctgcggcaaaacctacacaaagagttcccatctcaaggcacacctgcgaacccacacaggtgagaaaccttaccactgtgactgggacggctgtggatggaaattcgcccgctcagatgaactgaccaggcactaccgtaaacacacggggcaccgcccgttccagtgccaaaaatgcgaccgagcattttccaggtcggaccacctcgccttacacatgaagaggcatttttaaatcccagacagtggatatgacccacactgccagaagagaattcagtattttttacttttcacactgtcttcccgatgagggaaggagcccagccagaaagcactacaatcatggtcaagttcccaactgagtcatcttgtgagtggataatcaggaaaaatgaggaatccaaaagacaaaaatcaaagaacagatggggtctgtgactggatcttctatcattccaattctaaatccgacttgaatattcctggacttacaaaatgccaagggggtgactggaagttgtggatatcagggtataaattatatccgtgagttgggggagggaagaccagaattcccttgaattgtgtattgatgcaatataagcataaaagatcaccttgtattctctttaccttctaaaagccattattatgatgttagaagaagaggaagaaattcaggtacagaaaacatgtttaaatagcctaaatgatggtgcttggtgagtcttggttctaaaggtaccaaacaaggaagccaaagttttcaaactgctgcatactttgacaaggaaaatctatatttgtcttccgatcaacatttatgacctaagtcaggtaatatacctggtttacttctttagcatttttatgcagacagtctgttatgcactgtggtttcagatgtgcaataatttgtacaatggtttattcccaagtatgccttaagcagaacaaatgtgtttttctatatagttccttgccttaataaatatgtaatataaatttaagcaaacgtctattttgtatatttgtaaactacaaagtaaaatgaacattttgtggagtttgtattttgcatactcaaggtgagaattaagttttaaataaacctataatattttatctg

SEQ ID NO: 3960 - protein, 470 aa, Homo sapien
MAVSDALLPSFSTFASGPAGREKTLRQAGAPNNRWREELSHMKRLPPVLPGRPYDLAAATVATDLESGGAGAACGGSNLAPLPRRETEEFNDLLDLDFILSNSLTHPPESVAATVSSSASASSSSSPSSSGPASAPSTCSFTYPIRAGNDPGVAPGGTGGGLLYGRESAPPPTAPFNLADINDVSPSGGFVAELLRPELDPVYIPPQQPQPPGGGLMGKFVLKASLSAPGSEYGSPSVISVSKGSPDGSHPVVVAPYNGGPPRTCPKIKQEAVSSCTHLGAGPPLSNGHRPAAHDFPLGRQLPSRTTPTLGLEEVLSSRDCHPALPLPPGFHPHPGPNYPSFLPDQMQPQVPPLHYQELMPPGSCMPEEPKPKRGRRSWPRKRTATHTCDYAGCGKTYTKSSHLKAHLRTHTGEKPYHCDWDGCGWKFARSDELTRHYRKHTGHRPFQCQKCDRAFSRSDHLALHMKRHF

SEQ ID NO: 3961 - DNA, 2561 bp, Homo sapien
gcggaggcggcagaggctgcccgggcggcggcgggggccggcggcgcgggacgcgggccgggtagcgccgggccgagcgcggagccatgggccgggctggcaccgggaccgggggcgaggcggtggccgcggtggtggcggggccgctgctgctgctgctgcttgcccggcccccgcctgcctccgccggctacagcgggaagagcgaggtggggctggtgtccgagcacttctcacaggccccgcagaggctgtccttctacagctggtatggcagtgccaggctcttccgcttccgcgtgcccccagatgctgtgcttctacgctggctcctgcaggtctcccgggagagcggcgctgcctgcaccgacgcggagatcaccgtgcacttccgttccggcgcccctccggtcatcaacccgctgggcaccagcttcccggacgacaccgcggtgcagccctccttccaggtcggggtgccgctgagcaccgcaccgagaagcaatgcctccgtcaacgtttcccacccggcccccggggactggttcgtggccgcccacctgcccccctcatcccagaagatcgagttgaagggcttggctcccacctgtgcctacgtcttccagcctgaactgctggtcacgcgggtggtcgagatttccatcatggagccggacgtgccccttcctcagaccctcctctcccatcccagctacctcaaggtctttgtccccgattacacgcgggagcttctgctggagctgcgggactgcgtgtccaatgggagcctgggctgccccgtgcgtctcaccgtgggcccggtcaccctgcctagcaacttccagaaggtgctcacctgcaccggtgccccctggccctgccgcctgctgctgccctcaccgccctgggaccggtggctgcaagtgacagctgagagcctggtggggcccctcgggacagtggctttcagtgctgtagctgccctcacagcttgcaggccacggagcgtgaccgtccagccccttctgcagagcagccaaaaccagagcttcaatgcctcctctggtctgctgtccccgagccccgaccaccaggacctgggcaggagtggcagggtggaccgcagccccttctgcctcacaaactacccagtcacgcgggaggacatggacgtggtgtcggtgcacttccagcccctggacagggtctcggtgagggtgtgttcggacacgccctccgtgatgcggctgcgcctgaacaccggcatggacagcgggggttccctcaccatctccctgcgggccaacaagacagagatgcggaacgagaccgtcgtagtggcctgcgtgaatgctgcctcgcccttccttggcttcaatacttcgctcaactgcaccacagccttcttccagggctaccctttgtctctgagcgcctggtctcgcagggccaacctcatcatcccctacccagagacagacaactggtacctctccctgcagctcatgtgccctgagaatgctgaggactgtgagcaggctgtggtccacgtggagaccaccttgtacctggtgccctgtttgaacgattgtggaccctatggccagtgcctcctgctccgcagacacagctacctgtatgccagctgcagctgcaaggcaggctggcgtgggtggagctgcacggacaacagcacagcccagacggtggcccagcagagggcggccacactgctgctcacgctcagcaacctcatgttcctggcccccatcgccgtctcagtgcggcgattcttcctggtggaggcctccgtctacgcctacaccatgttcttctccacgttctaccacgcctgcgaccagcccggggaggcggtgctgtgcatcctcagctacgacacgctgcagtactgcgacttcttgggctccggggcggccatctgggtcaccatcctgtgcatggcacggctcaagacagtcctgaaatacgtgctgtttcttctgggtacactggtcatcgccatgtccttgcagctggaccgcagggacatgtggaacatgctggggccctgcctctttgccttcgtgatcatggcctccatgtgggcttaccgctgcgggcaccggcgccagtgctaccccacctcgtggcagcgctgggccttctacctcctgcccggcgtctctatggcctctgtgggcatcgccatctacacctccatgatgactagcgacaactactactacacccacagcatctggcacatcctgctggccgggagcgcagccttgctgctgccgccacctgaccagcccgccgagccctgggcctgctcgcagaaattcccctgccactatcagatctgcaagaacgatcgggaggaactgtacgcagtgacgtgacactggcctggggacagctgctgctctgatgacctcttcagccaggagctgtatcgagggggaggcgcctggtccagccctggacagattgatttccagctgaataaattggcctagataccctcttaaaaaaaaaaaaaaaaaaaaaaaaaaaaaaaa

SEQ ID NO: 3962 - protein, 771 aa, Homo sapien
MGRAGTGTGGEAVAAVVAGPLLLLLLARPPPASAGYSGKSEVGLVSEHFSQAPQRLSFYSWYGSARLFRFRVPPDAVLLRWLLQVSRESGAACTDAEITVHFRSGAPPVINPLGTSFPDDTAVQPSFQVGVPLSTAPRSNASVNVSHPAPGDWFVAAHLPPSSQKIELKGLAPTCAYVFQPELLVTRVVEISIMEPDVPLPQTLLSHPSYLKVFVPDYTRELLLELRDCVSNGSLGCPVRLTVGPVTLPSNFQKVLTCTGAPWPCRLLLPSPPWDRWLQVTAESLVGPLGTVAFSAVAALTACRPRSVTVQPLLQSSQNQSFNASSGLLSPSPDHQDLGRSGRVDRSPFCLTNYPVTREDMDVVSVHFQPLDRVSVRVCSDTPSVMRLRLNTGMDSGGSLTISLRANKTEMRNETVVVACVNAASPFLGFNTSLNCTTAFFQGYPLSLSAWSRRANLIIPYPETDNWYLSLQLMCPENAEDCEQAVVHVETTLYLVPCLNDCGPYGQCLLLRRHSYLYASCSCKAGWRGWSCTDNSTAQTVAQQRAATLLLTLSNLMFLAPIAVSVRRFFLVEASVYAYTMFFSTFYHACDQPGEAVLCILSYDTLQYCDFLGSGAAIWVTILCMARLKTVLKYVLFLLGTLVIAMSLQLDRRDMWNMLGPCLFAFVIMASMWAYRCGHRRQCYPTSWQRWAFYLLPGVSMASVGIAIYTSMMTSDNYYYTHSIWHILLAGSAALLLPPPDQPAEPWACSQKFPCHYQICKNDREELYAVT

SEQ ID NO: 3963 - DNA, 3882 bp, Homo sapien
  Unsure 151: Unknown base
gacacacggttctcccactgcacatcccatttaggcccaaatgtgactctccctccctgtcccatccctaagacatgagaacaaggtacagggaactggacaatttgccctcccagagaagaagcaggcacagggccatgttttggtctgncagcaagacccaagcaccggggcttgcaagaggtgctgtttgggaataaagaacctctcctctcccttgggttaatccgctagcagggacagccttgtgacctctccatgatcccagtctggggctgccagctcacattcctggcacacagccatccatcctcccccttccctctctcccctgtcctctctctccgggctcccaccgccgccgcgggccggggagccaccggccgccaccatgagttccttcagctacgagccgtactactcgacctcctacaagcggcgctacgtggagacgccccgggtgcacatctccagcgtgcgcagcggctacagcaccgcacgctcagcttactccagctactcggcgccggtgtcttcctcgctgtccgtgcgccgcagctactcctccagctctggatcgttgatgcccagtctggagaacctcgacctgagccaggtagccgccatcagcaacgacctcaagtccatccgcacgcaggagaaggcgcagctccaggacctcaatgaccgcttcgccagcttcatcgagcgcgtgcacgagctggagcagcagaacaaggtcctggaagccgagctgctggtgctgcgccagaagcactccgagccatcccgcttccgggcgctgtacgagcaggagatccgcgacctgcgcctggcggcggaagatgccaccaacgagaagcaggcgctccagggcgagcgcgaagggctggaggagaccctgcgcaacctgcaggcgcgctatgaagaggaggtgctgagccgcgaggacgccgagggccggctgatggaagcgcgcaaaggcgccgacgaggcggcgctcgctcgcgccgagctcgagaagcgcatcgacagcttgatggacgaaatctcttttctgaagaaagtgcacgaagaggagatcgccgaactgcaggcgcagatccagtacgcgcagatctccgtggagatggacgtgaccaagcccgacctttccgccgcgctcaaggacatccgcgcgcagtacgagaagctggccgccaagaacatgcagaacgctgaggaatggttcaagagccgcttcaccgtgctgaccgagagcgccgccaagaacaccgacgccgtgcgcgccgccaaggacgaggtgtccgagagccgtcgtctgctcaaggccaagaccctggaaatcgaagcatgccggggcatgaatgaagcgctggagaagcagctgcaggagctggaggacaagcagaacgccgacatcagcgctatgcaggacacgatcaacaaattagaaaatgaattgaggaccacaaagagtgaaatggcacgatacctaaaagaataccaagacctcctcaacgtgaagatggctttggatattgagattgcagcttacaggaaactcttggaaggcgaggagacccgactcagtttcaccagcgtgggaagcataaccagtggctactcccagagctcccaggtctttggccgatctgcctacggcggtttacagaccagctcctatctgatgtccacccgctccttcccgtcctactacaccagccatgtccaagaggagcagatcgaagtggaggaaaccattgaggctgccaaggctgaggaagccaaggatgagcccccctctgaaggagaagccgaggaggaggagaaggacaaggaagaggccgaggaagaggaggcagctgaagaggaagaagctgccaaggaagagtctgaagaagcaaaagaagaagaagaaggaggtgaaggtgaagaaggagaggaaaccaaagaagctgaagaggaggagaagaaagttgaaggtgctggggaggaacaagcagctaagaagaaagattgaacccccatttccttaattatttcaggaataattctcccgaaatcaggtcaaccccatcaccaaccaaccaaccagttgagttccagattctatgtgaattaaaaagtcaatatatgtataattctgagatgacttaggttggacattcaatgttgtgctatgaatttcctctttatgcagagtatctgtttgcttgcagagtggctttctggcttgctgccagcctgtgcatggtccacgcttatgagttcaggatctacggcaatgtgaatcattcagatgtttacaataaaaaacaccacatgagtaaatgaattcactaatgttaatgttaaacttcatggaaaaatagtcctttgaaccttcggtggttagcaattaaagaccctgagttatgtgcaataaatagtaaataaagttataccgaatgatgtattttttgctgtggttgttacttaattaaaataccttaaagatggcaccaatataaagtatataccagtggactattgacctccaattttttaaaaagttgaaattttaacaattaccaatacttttttttcttccttcaattggaaattctgagggatacagttatgtcatgattacttgtgaaatctctccccacaaaaattttactgataataaacatgagtaaatgagaaagtctataaataacaatacactttgcctcataacacgtgttgtgttaggttttgggatggctttctagggagcaattctgaaattacttgacagatacactctttatggtaaacaggtcatttcagagtctagagtgctaaccattacactatggaaccatgataaataggtcatttcaaactgatatgtcacaatgcaatatggatagaatatgaatcccatacattcatccctataactgcattttaaaatatagtctaaatatcatgggaggaggttaaaacctgagaacatggtacaataagaaggaataattttttatctatatataatttcaggagaagggattaaaactaccaaaggttatttgccactccactgcaaacatgttgcctgcaatcctgagctcatgatttagtgtgttgttaagcgtaattctgttgcctcaagtaaataccacttaatgctacacatttttaaacctttaaaagctacagacacaagtaatgaaattatgagtcacttaaggggggaggtaatatgcttgtatgttacattgacattgctctgcatgtctctactgggaaatatttggatttcaatgatagcttgactggttggacattgcatcaaatacacgccccatgtatcctttctgtcgtaaagttaagaacgctcttgcatttgatgtggaataaatatagatgatattactatctgctattctgcctttgttctgaaacaattgctttgtcagctaatttcattcaatatttgttttttagacgatctctataagttattaatttaacctgaaaccaaagtggtctccatttaaagttacttaatccctttgtaccacctatttctagttaaatatatgttgctatgcaaataggtaaagtgcttccttgccatgatggtaatggattggaactatgaaggctctcagtgtattggcttctgtaaagatgaggcgtctcctcagaaacaaaacttttcacatttctgcttactagacctgggttgatgtacatggtaagtctcaaacagatgcaagctatgtgcaaaaagtaactttagccaaatggaaatagctggatgctttgagaattacttggttgaagtaagaaaactgtaccatcctctatcctgtgtgccataataaaatagtaaaaaacctaaaaaaa

SEQ ID NO: 3964 - protein, 543 aa, Homo sapien
MSSFSYEPYYSTSYKRRYVETPRVHISSVRSGYSTARSAYSSYSAPVSSSLSVRRSYSSSSGSLMPSLENLDLSQVAAISNDLKSIRTQEKAQLQDLNDRFASFIERVHELEQQNKVLEAELLVLRQKHSEPSRFRALYEQEIRDLRLAAEDATNEKQALQGEREGLEETLRNLQARYEEEVLSREDAEGRLMEARKGADEAALARAELEKRIDSLMDEISFLKKVHEEEIAELQAQIQYAQISVEMDVTKPDLSAALKDIRAQYEKLAAKNMQNAEEWFKSRFTVLTESAAKNTDAVRAAKDEVSESRRLLKAKTLEIEACRGMNEALEKQLQELEDKQNADISAMQDTINKLENELRTTKSEMARYLKEYQDLLNVKMALDIEIAAYRKLLEGEETRLSFTSVGSITSGYSQSSQVFGRSAYGGLQTSSYLMSTRSFPSYYTSHVQEEQIEVEETIEAAKAEEAKDEPPSEGEAEEEEKDKEEAEEEEAAEEEEAAKEESEEAKEEEEGGEGEEGEETKEAEEEEKKVEGAGEEQAAKKKD

SEQ ID NO: 3965 - DNA, 4218 bp, Homo sapien
attaattttaagtttcatgattttgaaacatggaagtggcgattcgaagattcctttggagtggatccatataatgtgttaatggtacttctttgtctgctctgcatcgtggttttagtggctactgagctgtggacatatgtacgttggtacactcagttgagacgtgttttaatcatcagctttctgttcagtttgggatggaattggatgtatttatataagctagcttttgcacagcatcaggctgaagtcgccaagatggagccattaaacaatgtgtgtgccaaaaagatggactggactggaagtatctgggaatggtttagaagttcatggacctataaggatgacccatgccaaaaatactatgagctcttactagtcaaccctatttggttggtcccaccaacaaaggcacttgcagttacattcaccacatttgtaacggagccattgaagcatattggaaaaggaactggggaatttattaaagcactcatgaaggaaattccagcgctgcttcatcttccagtgctgataattatggcattagccatcctgagtttctgctatggtgctggaaaatcagttcatgtgctgagacatataggcggtcctgagagcgaacctccccaggcacttcggccacgggatagaagacggcaggaggaaattgattatagacctgatggtggagcaggtgatgccgatttccattataggggccaaatgggccccactgagcaaggcccttatgccaaaacgtatgagggtagaagagagattttgagagagagagatgttgacttgagatttcagactggcaacaagagccctgaagtgctccgggcatttgatgtaccagacgcagaggcacgagagcatcccacggtggtacccagtcataaatcacctgttttggatacaaagcccaaggagacaggtggaatcctgggggaaggcacaccgaaagaaagcagtactgaaagcagccagtcggccaagcctgtctctggccaagacacatcagggaatacagaaggttcacccgcagcggaaaaggcccagctcaagtctgaagccgcaggcagcccagaccaaggcagcacatacagccccgcaagaggtgtggctggaccacgtggacaggatccggtcagcagcccctgtggctagaggaacaccagcacaaacgacagcctcaagtctccttcgagctttatatccatttggggatgaagtctactttgacagctagcaaggcgacatgcaactgttgttgaatgatgacagcaattcaggaaagacttaaatatgaaagcaaattgaacacatcgggtgtttgttatcagaaaagagatgagatgagataagacttgtttattgactagccaatatgtcattaaaattaaggtttatattgtgaagcttttttgaaattttacttttttttgagagttttgctctgtcacccaggctggagtgaggtggtacaatctcggctcactgcaacctccacctcccaggttcaagagattctcctgcctcagtctcccgagtagctaggattacagatgtgcatcaccatgcctggctaatttttgtattttttagtagagatggggtttcaccatgttggtcaggctggtctcgaactcctgacctcaagtgacccgcccttgtcggcctcccaaagtgctgggattacaggcatgagccattgtgcccagcctatatagtgtgaagcttttaggaaaatcagaacagggtagacagctgttaaaaacaatgtttaaatggaataatgttgaatgtttacaggctgtaagaactattgtatacacaaaataatacacaaagtttgtactttgtgtacaaatacaaatttgtactttgtgtacaaataatacaaaaagtttgtatacacaaactttttacgttgtggtttggtatattgtcttaactgaattttcttataagaaccccatgaaacttacctgagtttttaaaatgctatccaggacatcataccttatagtatacatgaaacataatgtaatccaggttgtaatttagaacttttttttttttttagctgagcacttaatgtaattaattccaggttatgactcttaaaaaacattggccattagagaaatagttctatttgcccatccaaatcacctgaatgactttttgaaagaataggggtccacatccccagatcccatcccagctgtgcacagtctgaagcaagcagagtgaaacaagttggcaacttgttccaagcgtgggcctttgcagtctgtgatccagtgttactccaggtcccagtctgtcccatacttgtcttttgctacagttagttagttactttgttatcatccccttgtaaactgccttcaatatctgggataaggaagacaaagcttaatgacaactaaggttctagctgacatctttctttcatatttaatttttgtgagttttcatctgttttctgtttgtttatgtgtcctaggttcttgacctaaccacatgggttttgttttttgtttttatattagaacttagaaaagtttgttttacagcagtattatggaacagaagagaccattttaaataatttttttaaacagcccaaaacacacaaaagatacttgttttctagagacagggtcttgctctgtcacccaggctggagtgcagtggcacgatcatagctcagtgcagcctccacctcctgggctcaagtggtcctcctgcctcagcctcttaagcagttgggactacaggtgtgtgccagcatgcttgctgtttttttttttttttgagacagagtcttgctctgtcactcaggctggagtccagtggcttggtctcagctcactgcaatctctgcctcccaggggttcaagtgattctcctgcctcagcctcccaagtagctgaaactacaggcgcatgccaccatgcccagctaatttttgtatttttagtagagacagggtttcactatgttggccaggctggtctcaaactcccgacctcaagtgatccgcccgcttcggcctcccaaagtgctgggattacaggtgtgagccactgcgcctggctgctgatttatttttcatagacacgggggtctatgttgcccaggttggtcttgaactcctagcctcaagcgatcctcctgcctcagcctcccaatgtgctgggattacaggaatgagccaccatgcccagcccaagaagtagagtttcttttatactgactttggcctaaaaaaacagattttcatggaggaaaaaaaaacctagatttttagtaagactattttatatacttttttacattgatcaagtacattatttttaccaaacaacattgtttcccactacatccatggttatgtataaaaaaacgccattgtcaattaagatgttaaaaaattatttccataagagtattaaattctaatctatgattcacttaacttcctactttataaacactaggtaaagtaatctcacaagctgccaaagaacacatcccaagcagtaatcacagacgatgaagcaccttacaggacccctccaccctcaaacgcgcatgtccagagaagtattaatgccttaatagactactgaaggttaactatttacatcattctaaaaatattttaagctgtattacagtgctataaattctccttttaaggaaaaaagtaatagattgtttccttaccgtgtttgaaaggaaaaaaaataaatccatagtaactaatggtctgccgattttttccctgaatttttaaactccaacaaagcattattttgcaaaaagtcctttagcccaaagtcagtgtctctgttttgatctctttgtaaaagaactctctgttcatccattctctttccctgggaccgtaaaataaggctgaaaaagtcttcatctggtactgtcggaccctttgtggtagcaggtggtggagcacatctttgatcatctaatctggatccctagaagtttatgagagagattaaaagacatactgtgggaaagaaagcaccaagctatgttaaatctctcagtcacaacaagaaaacgcagttgtaaacttttatttggggcttctcagaaattaatctttgtttttatattgttctctttagttcccagcctgatttctgaaagaaataatctttaaacctg

SEQ ID NO: 3966 - DNA, 3492 bp, Homo sapien
aagccgtgcgctcccgggctgcgaggtctggctaggctacgggccacgcgccgccgccgctgccgccgccactgtcctcttcggaggcgcgggcccgacggaaaccatgtttgtggctcgcagcatcgcggcggaccacaaggatctcatccacgatgtctctttcgacttccacgggcggcggatggcaacctgctccagcgatcagagcgttaaggtctgggataaaagtgaaagtggtgattggcattgtacagctagctggaagacacatagtggatctgtatggcgtgtgacatgggcccatcctgaatttgggcaagttttggcttcctgttcttttgaccgaacagctgctgtatgggaagaaatagtaggagaatcaaatgataaactgcgaggacagagccactgggttaaaaggacaactctggtggatagcagaacatctgttactgatgtgaagtttgctcccaagcacatgggtcttatgttagcaacctgttccgcagatggtatagtaagaatctatgaggcaccagatgttatgaatctcagccagtggtctttgcagcatgagatctcatgtaagctaagctgtagttgcatttcttggaacccttcaagctctcgtgctcattcccccatgatcgccgtaggaagtgatgacagtagccccaacgcaatggccaaggttcagatttttgaatataatgaaaacaccaggaaatatgcaaaagctgaaactcttatgacagtcactgatcctgttcatgatattgcattcgctccaaatttgggaagatctttccatattctagcaatagcgaccaaagatgtgagaatttttacattaaagcctgtgaggaaagaactgacttcctctggtgggccaacaaagtttgaaatccatatagtggctcagttcgataatcataattctcaggtctggcgagtgagttggaatataacaggaacggtgctagcatcttcaggagatgatgggtgtgtaagattgtggaaagctaattatatggacaattggaagtgtactggtattttgaaaggtaatgggagcccagtcaatgggagttctcagcagggaacctcaaatccttccctaggttcaaatattccaagtcttcagaattcattaaatggatcttctgctggcagaaagcacagctgagacaagctaactggagtaactttgctgttttgctgcttgttgcatgcacactggaatggaaagcgagctcccttttccccttccccagcgccgtttgacctctcccaaggatacaccagcagcctgcttactactaaacgcaatccaaaaggcctttaaaaatacagtgtatattttttgtactagtcagtttattgacactatttgaaacttttgaaatataaacggagaggctttctgttgagacattgtcaccaaaacaattttttgaaatgttcctgaaactaatttgggtttaaagattaaaagggttgttaccattcttatctgagtagttgggaggaggggaataccactttagttcatttggaaaatatagacatatttcttttgctttcttaaaacagcttaaaatgatgaacttttataattttaatttgaagattgaataaatattttttataaagattgttttgagtgctgatttgtttactttttgtagatttgctttatccatgatattcagtacaactctgtcatttctttgtaatatttaaaaaatattagtaaaggagtgaattaataaagtagtaatagtaaaatgaaaggaacttgactgtacagtttgtagcccaggttaaggcatttgggtattgtttcatttaaccaatttggggactaagatgggaaacactttttttattaagtttttaattcatagtcactaaagagataaatgtttcttatatacatttgtgtatttttatggtgttatttattccatggcttagcttccttcaaatcaaaatttggacacacactattaagagaagccattaaaattttactaaaattgtgcatgtaaattaattgtcagcattccatgtctcaagattttcttaatttagttcgctgtttaaattaattcatgtcctgtaaagttctgaccttgataacaaagctataaatatttaagtttgctaatatgcgtaagtattatcggtaagttacaagatggaagaagaataacagtagggcacagtcattctgtgaatccttttacttatcaaaatttggtagctattctaaggcttttgcagaaaaataagtgttcaatgtttgtagttcttcaaaagcatgttgcagtagccagccatactatgtgtattcccagtatcatgtacgcactaaaaaaaatgtgtgcttgctgctgctgtgagtgaaccattgcttaagataaaaaacttaactagatctgtaaatgtacagaatagcatcagatgtttctgagagattaggaaaatgttttgaatttataaaattaatgtttttctttgtaacatttatatatattttttaacattttaagtttaacagattgtattcctttcaagtttctatacttgcttaagcaatcttgatttgagtaagggtcttgatttgtgctattatgttctgttagttttggcatgaatatactaaagcttttttttttttttttagcatgtgttttctcctctttggttctctttgtatttactacttttctctttttcttgtgttttttttttcctgtttttgttttgtttggtgttttgttcctgtcttcattgtttcaggtatttctttacccctctggattccccacgggctggatcgagatggtccagttatgcccagctccttcctcctcctcctcctcctctggtagagcactcttgcgatgctgacactgccaacctccagtatcctcaccctcgcagacgatatctctctcggcctcttaatcccttacctgagaatgaagggatttaaaacactgatttaacattgaaaggccttattcaagtgcttgtaaatgctttcatttctggctgctttttgtttttcattttctttcagaagatttttctaacttagggtctgtcttgcatgtattacaaccagaatacagtgtttggaacctaaatctgtttgtgcgtctgcatcaaaggaacatttgcttcactgggtgataacctttgatgaaatgagatatgtccaagtaacgttaactgtgaagttacacacagtagctgacttcaaagtgcctgttcctgtaaattttattttaaactgttaccatagtcttaagttgtttatgctttatcagactggctaatgtgaaagcataatattatgaagtttattctgccttatgagaccttaaaaaatggatttcattttacaggctaatgttgtaactgactagtatgtaaaataaatcattcctgtgtataaagcagcaaaacctaaaaaaaaaa

SEQ ID NO: 3967 - protein, 360 aa, Homo sapien
MFVARSIAADHKDLIHDVSFDFHGRRMATCSSDQSVKVWDKSESGDWHCTASWKTHSGSVWRVTWAHPEFGQVLASCSFDRTAAVWEEIVGESNDKLRGQSHWVKRTTLVDSRTSVTDVKFAPKHMGLMLATCSADGIVRIYEAPDVMNLSQWSLQHEISCKLSCSCISWNPSSSRAHSPMIAVGSDDSSPNAMAKVQIFEYNENTRKYAKAETLMTVTDPVHDIAFAPNLGRSFHILAIATKDVRIFTLKPVRKELTSSGGPTKFEIHIVAQFDNHNSQVWRVSWNITGTVLASSGDDGCVRLWKANYMDNWKCTGILKGNGSPVNGSSQQGTSNPSLGSNIPSLQNSLNGSSAGRKHS

SEQ ID NO: 3968 - DNA, 1817 bp, Homo sapien
gatcaatggtattttagctgaagctatggaatgttttttgcagtatgtttatactggaaaggtgaagatcactacagagaatgtacagtatctctttgagacatcaagcctctttcagattagtgttctccgtgatgcatgtgccaagttcttggaggagcaacttgatccttgtaattgcttaggaatccagcgctttgctgatacccattcactcaaaacactcttcacaaaatgcaaaaattttgcgttacagacttttgaggatgtatcccagcacgaagaatttcttgagcttgacaaagatgaacttattgattatatttgtagtgatgaacttgttattggtaaagaggagatggtttttgaagccgtcatgcgttgggtctatcgtgccgttgatctgagaagaccactgttacacgagctcctgacacatgtgagactccctctgttgcatcccaactactttgttcaaacagttgaagtggaccaattgatccagaattctcctgagtgttatcagttgttgcatgaagcaagacggtaccacatacttgggaatgaaatgatgtccccaaggactaggccacgcaggtccactggctattctgaggtgatagttgtcgttggaggatgtgagcgagttggaggatttaatcttccatacactgagtgctacgatcctgtaacaggagaatggaagtctttggctaagcttccagaatttaccaaatcagagtatgcagtctgtgctctaaggaatgacattcttgtttcaggtggaagaatcaacagccgtgatgtctggatttataactcacagttaaatatttggatcagagttgcctctctcaataaaggcagatggcgtcacaaaatggctgtcctccttggtaaagtatatgttgtcggtggctatgatgggcaaaacagacttagcagcgtagaatgttatgattccttttcaaatcgatggactgaagttgctccccttaaggaagccgtgagttctcctgcagtgactagctgtgtaggcaaactgtttgtgattggtggaggacctgatgataatacttgttctgataaggttcaatcttatgatccagaaaccaattcttggctacttcgtgcagctatccgaattgccaaaaggtgtataacagctgtatccctaaacaacctgatctatgttgccggtggactgaccaaggcaatatactgttacgatccagttgaagattactggatgcacgtacagaatacattcagccgtcaggtaataacatgaagcagtacaaaagaaaaataaatctaagagggaccaagtacataatcattattaatacactggaatttcaattttaaaatatttcaggctgggcgtggtggctcacgcctgtggtcccagcactttgggaggccgaggtggatagatcacttgaggtcaggagttcaagaccagcctggctaatatggtgaaaccccgtctctactaaaaaattatggccaggcgtggtggttcatgcctgtaatcccagcactttgggaggctgaggcaggccaatcacctgaggtcgggagttcgagaccagcctgaccaacatggagaaaccccgtctctgctaaaaatacaaaattagctgggcgtggtggcgcattgcctgtaatcccagctactagggaggctgcggcaggagaattgcttgaacccgggaggtggaggtcgcggtgagccgagatcgagccattgcactccagcctggacagcaggagcgaaactccgtctcaaaaataaataaaaaaaaaaaaaaaaa

SEQ ID NO: 3969 - protein, 421 aa, Homo sapien
MECFLQYVYTGKVKITTENVQYLFETSSLFQISVLRDACAKFLEEQLDPCNCLGIQRFADTHSLKTLFTKCKNFALQTFEDVSQHEEFLELDKDELIDYICSDELVIGKEEMVFEAVMRWVYRAVDLRRPLLHELLTHVRLPLLHPNYFVQTVEVDQLIQNSPECYQLLHEARRYHILGNEMMSPRTRPRRSTGYSEVIVVVGGCERVGGFNLPYTECYDPVTGEWKSLAKLPEFTKSEYAVCALRNDILVSGGRINSRDVWIYNSQLNIWIRVASLNKGRWRHKMAVLLGKVYVVGGYDGQNRLSSVECYDSFSNRWTEVAPLKEAVSSPAVTSCVGKLFVIGGGPDDNTCSDKVQSYDPETNSWLLRAAIRIAKRCITAVSLNNLIYVAGGLTKAIYCYDPVEDYWMHVQNTFSRQVIT

SEQ ID NO: 3970 - DNA, 2229 bp, Homo sapien; identical to SEQ ID NO: 3639

SEQ ID NO: 3971 - protein, 656 aa, Homo sapien; identical to SEQ ID NO: 3640

SEQ ID NO: 3972 - DNA, 2188 bp, Homo sapien; identical to SEQ ID NO: 167

SEQ ID NO: 3973 - protein, 214 aa, Homo sapien; identical to SEQ ID NO: 168

SEQ ID NO: 3974 - DNA, 2569 bp, Homo sapien
gaaggagggacggccggtcccgtcagtcaggcagcgggagccgccgggagcggatggcggcggccgtagcggctccactcgccgccgggggtgaggaggcggcagccacgacctccgtgcccgggtctccaggtctgccggggagacgcagtgcagagcgggccctagaggaggccgtggccaccgggaccctgaacctgtctaaccggcgcttgaagcacttcccccggggcgcggcccgtagctacgacctgtcagacatcacccaggctgacctgtcccggaaccggtttcccgaggtgcccgaggcggcgtgccagctggtgtccctggagggcctgagcctctaccacaattgcctgagatgcctgaacccagccttggggaatctcacagccctcacctacctcaacctcagccgaaaccagctgtcgctgctgccaccctacatctgccagctgcccctgagggtcctcatcgtcagcaacaacaagctgggagccctgccccctgacatcggcaccctgggaagcctgcgacagcttgacgtgagcagcaacgagctccaatccctgccctcggaactgtgtggcctctcttccctgcgggacctcaatgtccggaggaaccagctcagtacgctgcccgaagagctgggggacctccctctggtccgcctggatttctcctgtaaccgcgtctcccgaatcccagtctccttctgccgcctgaggcacctgcaggtcattctgctggacagcaaccctctgcagagtccacctgcccaggtctgcctgaaggggaaacttcacatcttcaagtatttgtccacagaggccgggcagcgtgggtcggccctgggggacctggccccttctcggcccccgagtttcagtccctgccctgcagaggatctatttccgggacatcggtacgatggtgggctggactcaggcttccacagcgttgatagtggcagcaagaggtggtctggaaatgagtcaacagatgaattttcagagctgtcattccggatctcagagctggcccgggagccccgggggcccagagaacgcaaggaggatggctcagcggacggagaccctgtgcagattgacttcatcgacagccatgtccccggggaggatgaagagcgaggcactgtggaggagcagcgaccacccgaattaagccctggggcaggggacagggagagggcaccaagcagcaggcgggaggagccggcaggggaggagcggcggcgcccggacaccttgcagctgtggcaggagcgggaacggcggcagcagcagcagagcggggcgtggggggccccgaggaaggatagcctcttgaagccagggctcagggctgttgtgggaggggccgccgccgtgtccactcaagccatgcacaacggctcgcctaagtccagtgcctcccaagcaggggctgcagcggggcagggagcccccgcccctgcccctgcctcccaagagccccttcccatagctggaccagcgacagcacctgctccacggccacttggctccattcagagaccaaacagcttcctcttccgttcctcctctcagagtggctcaggcccttcctcaccagactctgtcctgagacctcggcggtacccccaggttccagatgagaaggacttaatgactcagctgcgccaggtccttgagtcccggctgcagcggcccctgcctgaggacctggccgaggctctggccagtggggtcatcctgtgccagctggccaaccagctacggccgcgctccgtgcccttcatccatgtgccctcccctgctgtgccaaaactcagtgccctcaaggctcggaagaatgtggagagttttctagaagcctgtcgaaaaatgggggtgcctgaggctgacctgtgctcgccctcggatctcctccagggcactgcccgggggctgcggaccgcgctggaggccgtgaagcgggtggggggcaaggccctaccgcccctctggcccccctctggtctgggcggcttcgtcgtcttctacgtggtcctcatgctgctgctctatgtcacctacactcggctcctgggttcctaggccccaaaatcggccctccctcacccctttcccttcctctctatttataaggtccctgctccacccgaccccacctgcggtgccttcagccccaaccaaagacactagtgcacccccttcacagacactgacctcagaggccccactctggtgcccccagaccctgggcccccagcctctggcctccctccagtagccccacgagtccccacctctcagtgctgacggtgccttcatgtccccgccggccctgcccctgccctctgtaccccgtgaggggtggcaggagctggagtctcccccttcctcctgtgccctccccttccccccccaacagctgctatgggggggctaaattatctctattttgtagagaggatctatatttgtaggggttcggggcccaggccgggtccctatctctgtgtataaactgtacagaccgtgaaaaaaaaaaaaaaaaa

SEQ ID NO: 3975 - protein, 683 aa, Homo sapien
MAAAVAAPLAAGGEEAAATTSVPGSPGLPGRRSAERALEEAVATGTLNLSNRRLKHFPRGAARSYDLSDITQADLSRNRFPEVPEAACQLVSLEGLSLYHNCLRCLNPALGNLTALTYLNLSRNQLSLLPPYICQLPLRVLIVSNNKLGALPPDIGTLGSLRQLDVSSNELQSLPSELCGLSSLRDLNVRRNQLSTLPEELGDLPLVRLDFSCNRVSRIPVSFCRLRHLQVILLDSNPLQSPPAQVCLKGKLHIFKYLSTEAGQRGSALGDLAPSRPPSFSPCPAEDLFPGHRYDGGLDSGFHSVDSGSKRWSGNESTDEFSELSFRISELAREPRGPRERKEDGSADGDPVQIDFIDSHVPGEDEERGTVEEQRPPELSPGAGDRERAPSSRREEPAGEERRRPDTLQLWQERERRQQQQSGAWGAPRKDSLLKPGLRAVVGGAAAVSTQAMHNGSPKSSASQAGAAAGQGAPAPAPASQEPLPIAGPATAPAPRPLGSIQRPNSFLFRSSSQSGSGPSSPDSVLRPRRYPQVPDEKDLMTQLRQVLESRLQRPLPEDLAEALASGVILCQLANQLRPRSVPFIHVPSPAVPKLSALKARKNVESFLEACRKMGVPEADLCSPSDLLQGTARGLRTALEAVKRVGGKALPPLWPPSGLGGFVVFYVVLMLLLYVTYTRLLGS

SEQ ID NO: 3976 - DNA, 775 bp, Homo sapien
  Unsure 7: Unknown base
  Unsure 11-12: Unknown base
  Unsure 26: Unknown base
  Unsure 28: Unknown base
  Unsure 567: Unknown base
  Unsure 583: Unknown base
  Unsure 586-589: Unknown base
  Unsure 591: Unknown base
  Unsure 593-594: Unknown base
  Unsure 597: Unknown base
  Unsure 599: Unknown base
  Unsure 601-602: Unknown base
  Unsure 605: Unknown base
  Unsure 609: Unknown base
  Unsure 617: Unknown base
  Unsure 619: Unknown base
  Unsure 630: Unknown base
  Unsure 634: Unknown base
  Unsure 638: Unknown base
  Unsure 640-641: Unknown base
  Unsure 646-648: Unknown base
  Unsure 651-652: Unknown base
  Unsure 656-658: Unknown base
  Unsure 660: Unknown base
  Unsure 665: Unknown base
  Unsure 667-668: Unknown base
  Unsure 671-673: Unknown base
  Unsure 678-679: Unknown base
  Unsure 683-684: Unknown base
  Unsure 687: Unknown base
  Unsure 689: Unknown base
  Unsure 692-694: Unknown base
  Unsure 697-698: Unknown base
  Unsure 702: Unknown base
  Unsure 704: Unknown base
  Unsure 711: Unknown base
  Unsure 713: Unknown base
  Unsure 716: Unknown base
  Unsure 718-719: Unknown base
  Unsure 721: Unknown base
  Unsure 723-725: Unknown base
  Unsure 728: Unknown base
  Unsure 730-731: Unknown base
  Unsure 736: Unknown base
  Unsure 740: Unknown base
  Unsure 742: Unknown base
  Unsure 744: Unknown base
  Unsure 746: Unknown base
  Unsure 748-749: Unknown base
  Unsure 757-760: Unknown base
  Unsure 763-764: Unknown base
  Unsure 767-770: Unknown base
  Unsure 774-775: Unknown base
ggttttntggnngggggttttcaacncnggctcttgttctttttgcaggacccatcgattcgaattcggcacgagcatcagtatgcttatggatttgatgacaggcatagcctgggcatatcacctcattggtaaagggctagagcctttcttttttatggcacttctttttttgagatagggtcttactctgtcaccctggctagagtacactggtacaatcacggctcaatgtaggcttaacctcctgggctcaggtgtatgtcactatgcccggctactttttgtattttttggtagagacggcttcgccacgttgcccaggctgcaagcgatatgcctaggctcaagcgatctgcccacctcaacttccggaagtgctgagattacaggtgtgagccactgcacccagcctttgctttattttttattttttgagaggtatgattctttctagagattttttctcatggctactattagatcaggaatgggtgattggagattattagattctaggttaacttctaccactttaccctaatacataaaactttttcctaaatnaatgatggaaggaatnaannnnancnnccncntnnccnctantacaaaancnctagcccttanaacntttngnnagctnnnttnncctnnntntcccntnntcnnnccccnncctnnttntnccnnnctnnctcnanccccacnanttncnntntnnnctncnnaatanattncncncntnnctcctcannnnctnntcnnnnctcnn

SEQ ID NO: 3977 - DNA, 506 bp, Homo sapien
attccttccatcatttatttaggaaaaagttttatgtattagggtaaagtggtagaagttaacctagaatctaataatctccaatcacccattcctgatctaatagtagccatgagaaaaaatctctagaaagaatcatacctctcaaaaaataaaaaataaaacaaaggctgggtgcagtggctcacacctgagcccaggaggttaagcctacattgagccgtgattgtaccagtgtactctagccagggtgacagagtaagaccctatctcaaaaaaagaagtgccataaaaaagaaaggctctagccctttaccaatgaggtgatatgcccaggctatgcctgtcatcaaatccattaaccttcctggtgatggccatgagaaagtccagcacacaaaccatgccccagactgcatctgtgcatacacagagtaaaagccctgctgctatactataaaatggcacctgaaaataatctctacggtatgtttgaaaattggcag

SEQ ID NO: 3978 - DNA, 754 bp, Homo sapien
cgtgcaggtcacatgcccatgaaagcaaacctattggtgagaaagcttaagaggtatcattttcatcccctgtattccctcatcccctctcccggtgtgtcctgccctggaggcccccaacttgctctttgtttttgtccctcttgtccctgccctgcagcatcccacaggtctgtgactgttttcctatttgctttccagctgctgatgcaaggaatcccctgggctcccgtccactccactgctgaccagcccattcgcctgtgctgagtcttcctgcaggcctttccttgcctctgtgggaccctgtgggggtccatccggctggagaagaaaagcctctcatgctaacgttgcagaccccagagggtgagagaaagggggacttcattcagtcttgaaacctgtgtgctcagcccccaaggcatcaggaattcttcctgcccagagaatcaaggcagcttcatttttttcgtaccttggtcagtggttctcaacctttttgttatcaaggcactttttgttgtacatatgtcctgttgccccctgcatttttatctgccaaactgtactgatggagtaaccattgacttttcccttcctaaattaaggaagacgtctatgatggagtgtacaataaaatcagtgtcccaatgattcgtatgatgtcatcaacaaccaatcagagcttctgatcagcatgagataatcagtgtgaccacaatgagttgataaaatttcagcatgaaaagat

SEQ ID NO: 3979 - protein, 89 aa, Homo sapien
RAGHMPMKANLLVRKLKRYHFHPLYSLIPSPGVSCPGGPQLALCFCPSCPCPAASHRSVTVFLFAFQLLMQGIPWAPVHSTADQPIRLC

SEQ ID NO: 3980 - DNA, 2700 bp, Homo sapien; identical to SEQ ID NO: 118

SEQ ID NO: 3981 - protein, 704 aa, Homo sapien; identical to SEQ ID NO: 119

SEQ ID NO: 3982 - DNA, 3258 bp, Homo sapien
aaggctgtggaccccagagaaggtggcaggtggcccccctaggagagctctgggcacattcgaatcttcccaaactccaataataaaaattcgaagactttggcagagagtgtgtgtgtgtgtgtatggttgttgggcgtaggacaggtttcggggatgcgcggtacgcggtaccacccctcggaggcccccacccccagacgcccaggccgcctccccactccccctcaagcagccccagccggggactttccgtcgcggggaaggggcggggaccctgagcgaaaggtgcggaggcggcctgccggggtggttcggcttcccgttgccgcctcgggcgctgtacccagagctcgaagaggagcagcgcggccgcgcggacccggcaaggctgggccggactcggggctcccgagggacgccatgcggggaggcaggggcgcccctttctggctgtggccgctgcccaagctggcgctgctgcctctgttgtgggtgcttttccagcggacgcgtccccagggcagcgccgggccactgcagtgctacggagttggacccttgggcgacttgaactgctcgtgggagcctcttggggacctgggagccccctccgagttacacctccagagccaaaagtaccgttccaacaaaacccagactgtggcagtggcagccggacggagctgggtggccattcctcgggaacagctcaccatgtctgacaaactccttgtctggggcactaaggcaggccagcctctctggccccccgtcttcgtgaacctagaaacccaaatgaagccaaacgccccccggctgggccctgacgtggacttttccgaggatgaccccctggaggccactgtccattgggccccacctacatggccatctcataaagttctgatctgccagttccactaccgaagatgtcaggaggcggcctggaccctgctggaaccggagctgaagaccatacccctgacccctgttgagatccaagatttggagctagccactggctacaaagtgtatggccgctgccggatggagaaagaagaggatttgtggggcgagtggagccccattttgtccttccagacaccgccttctgctccaaaagatgtgtgggtatcagggaacctctgtgggacgcctggaggagaggaacctttgcttctatggaaggccccagggccctgtgtgcaggtgagctacaaagtctggttctgggttggaggtcgtgagctgagtccagaaggaattacctgctgctgctccctaattcccagtggggcggagtgggccagggtgtccgctgtcaacgccacaagctgggagcctctcaccaacctctctttggtctgcttggattcagcctctgccccccgtagcgtggcagtcagcagcatcgctgggagcacggagctactggtgacctggcaaccggggcctggggaaccactggagcatgtagtggactgggctcgagatggggaccccctggagaaactcaactgggtccggcttccccctgggaacctcagtgctctgttaccagggaatttcactgtcggggtcccctatcgaatcactgtgaccgcagtctctgcttcaggcttggcctctgcatcctccgtctgggggttcagggaggaattagcacccctagtggggccaacgctttggcgactccaagatgcccctccagggacccccgccatagcgtggggagaggtcccaaggcaccagcttcgaggccacctcacccactacaccttgtgtgcacagagtggaaccagcccctccgtctgcatgaatgtgagtggcaacacacagagtgtcaccctgcctgaccttccttggggtccctgtgagctgtgggtgacagcatctaccatcgctggacagggccctcctggtcccatcctccggcttcatctaccagataacaccctgaggtggaaagttctgccgggcatcctattcttgtggggcttgttcctgttggggtgtggcctgagcctggccacctctggaaggtgctaccacctaaggcacaaagtgctgccccgctgggtctgggagaaagttcctgatcctgccaacagcagttcaggccagccccacatggagcaagtacctgaggcccagccccttggggacttgcccatcctggaagtggaggagatggagcccccgccggttatggagtcctcccagcccgcccaggccaccgccccgcttgactctgggtatgagaagcacttcctgcccacacctgaggagctgggccttctggggccccccaggccacaggttctggcctgaaccacacgtctggctgggggctgccagccaggctagagggatgctcatgcaggttgcaccccagtcctggattagccctcttgatggatgaagacactgaggactcagagaggctgagtcacttacctgaggacacccagccaggcagagctgggattgaaggacccctatagagaagggcttggcccccatggggaagacacggatggaaggtggagcaaaggaaaatacatgaaattgagagtggcagctgcctgccaaaatctgttccgctgtaacagaactgaatttggaccccagcacagtggctcacgcctgtaatcccagcactttggcaggccaaggtggaaggatcacttagagctaggagtttgagaccagcctgggcaatatagcaagacccctcactacaaaaataaaacatcaaaaacaaaaacaattagctgggcatgatggcacacacctgtagtccgagccacttgggaggctgaggtgggaggatcggttgagcccaggagttcgaagctgcagggacctctgattgcaccactgcactccaggctgggtaacagaatgagaccttatctcaaaaataaacaaactaataaaaagcaaaaaaaaaaaaaaaagaaaagaaaaaacactgcatttgggcaccatctcagctcccttgcatccaggtgcagcatggactgagttcttgacaacagaatgtggtcagaagtgacatatgccaacacggggtctgggtgggggctcccccacatcctttccttgcctatgagctggaacataacacatgcctatgatccagctttggtcatacccaaggggaaggtggagcaagaaatgaaaaggaacctgaatccctgaatgactgcatggatagaaccactaagaaaaataaacttttatatttttata

SEQ ID NO: 3983 - protein, 636 aa, Homo sapien
MRGGRGAPFWLWPLPKLALLPLLWVLFQRTRPQGSAGPLQCYGVGPLGDLNCSWEPLGDLGAPSELHLQSQKYRSNKTQTVAVAAGRSWVAIPREQLTMSDKLLVWGTKAGQPLWPPVFVNLETQMKPNAPRLGPDVDFSEDDPLEATVHWAPPTWPSHKVLICQFHYRRCQEAAWTLLEPELKTIPLTPVEIQDLELATGYKVYGRCRMEKEEDLWGEWSPILSFQTPPSAPKDVWVSGNLCGTPGGEEPLLLWKAPGPCVQVSYKVWFWVGGRELSPEGITCCCSLIPSGAEWARVSAVNATSWEPLTNLSLVCLDSASAPRSVAVSSIAGSTELLVTWQPGPGEPLEHVVDWARDGDPLEKLNWVRLPPGNLSALLPGNFTVGVPYRITVTAVSASGLASASSVWGFREELAPLVGPTLWRLQDAPPGTPAIAWGEVPRHQLRGHLTHYTLCAQSGTSPSVCMNVSGNTQSVTLPDLPWGPCELWVTASTIAGQGPPGPILRLHLPDNTLRWKVLPGILFLWGLFLLGCGLSLATSGRCYHLRHKVLPRWVWEKVPDPANSSSGQPHMEQVPEAQPLGDLPILEVEEMEPPPVMESSQPAQATAPLDSGYEKHFLPTPEELGLLGPPRPQVLA

SEQ ID NO: 3984 - DNA, 3237 bp, Homo sapien
gcgaagtgaagggtggcccaggtggggccaggctgactgaatgtatctcctagctatggactaaataatacatggggggaaataaacaagtattcatgagggtgaaaatgtgacccagcaggaaaattacaactattttcaattgacgttgaataggatgagtcatggaatttaagtgatttactgaagattatactactggtagatagaagagctaaagaaagatggatactatgatgctgaatgtgcggaatctgtttgagcagcttgtgcgccgggtggagattctcagtgaaggaaatgaagtccaatttatccagttggcgaaggactttgaggatttccgtaaaaagtggcagaggactgaccatgagctggggaaatacaaggatcttttgatgaaagcagagactgagcgaagtgctctggatgttaagctgaagcatgcacgtaatcaggtggatgtagagatcaaacggagacagagagctgaggctgactgcgaaaagctggaacgacagattcagctgattcgagagatgctcatgtgtgacacatctggcagcattcaactaagcgaggagcaaaaatcagctctggcttttctcaacagaggccaaccatccagcagcaatgctgggaacaaaagactatcaaccattgatgaatctggttccattttatcagatatcagctttgacaagactgatgaatcactggattgggactcttctttggtgaagactttcaaactgaagaagagagaaaagaggcgctctactagccgacagtttgttgatggtccccctggacctgtaaagaaaactcgttccattggctctgcagtagaccaggggaatgaatccatagttgcaaaaactacagtgactgttcccaatgatggcgggcccatcgaagctgtgtccactattgagactgtgccatattggaccaggagccgaaggaaaacaggtactttacaaccttggaacagtgactccaccctgaacagcaggcagctggagccaagaactgagacagacagtgtgggcacgccacagagtaatggagggatgcgcctgcatgactttgtttctaagacggttattaaacctgaatcctgtgttccatgtggaaagcggataaaatttggcaaattatctctgaagtgtcgagactgtcgtgtggtctctcatccagaatgtcgggaccgctgtccccttccctgcattcctaccctgataggaacacctgtcaagattggagagggaatgctggcagactttgtgtcccagacttctccaatgatcccctccattgttgtgcattgtgtaaatgagattgagcaaagaggtctgactgagacaggcctgtataggatctctggctgtgaccgcacagtaaaagagctgaaagagaaattcctcagagtgaaaactgtacccctcctcagcaaagtggatgatatccatgctatctgtagccttctaaaagactttcttcgaaacctcaaagaacctcttctgacctttcgccttaacagagcctttatggaagcagcagaaatcacagatgaagacaacagcatagctgccatgtaccaagctgttggtgaactgccccaggccaacagggacacattagctttcctcatgattcacttgcagagagtggctcagagtccacatactaaaatggatgttgccaatctggctaaagtctttggccctacaatagtggcccatgctgtgcccaatccagacccagtgacaatgttacaggacatcaagcgtcaacccaaggtggttgagcgcctgctttccttgcctctggagtattggagtcagttcatgatggtggagcaagagaacattgaccccctacatgtcattgaaaactcaaatgccttttcaacaccacagacaccagatattaaagtgagtttactgggacctgtgaccactcctgaacatcagcttctcaagactccttcatctagttccctgtcacagagagtccgttccaccctcaccaagaacactcctagatttgggagcaaaagcaagtctgccactaacctaggacgacaaggcaacttttttgcttctccaatgctcaagtgaagtcacatctgcctgttacttcccagcattgactgactataagaaaggacacatctgtactctgctctgcagcctcctgtactcattactacttttagcattctccaggcttttactcaagtttaattgtgcatgagggttttattaaaactatatatatctccccttccttctcctcaagtcacataatatcagcactttgtgctggtcattgttgggagcttttagatgagacatctttccaggggtagaagggttagtatggaattggttgtgattctttttggggaagggggttattgttcctttggcttaaagccaaatgctgctcatagaatgatctttctctagtttcatttagaactgatttccgtgagacaatgacagaaaccctacctatctgataagattagcttgtctcagggtgggaagtgggagggcagggcaaagaaaggattagaccagaggatttaggatgcctccttctaagaaccagaagttctcattccccattatgaactgagctataatatggagctttcataaaaatgggatgcattgaggacagaactagtgatgggagtatgcgtagctttgatttggatgattaggtctttaatagtgttgagtggcacaaccttgtaaatgtgaaagtacaactcgtatttatctctgatgtgccgctggctgaactttgggttcatttggggtcaaagccagtttttcttttaaaattgaattcattctgatgcttggcccccatacccccaaccttgtccagtggagcccaacttctaaaggtcaatatatcatcctttggcatcccaactaacaataaagagtaggctataagggaagattgtcaatattttgtggtaagaaaagctacagtcattttttctttgcactttggatgctgaaatttttcccatggaacatagccacatctagatagatgtgagctttttcttctgttaaaattattcttaatgtctgtaaaaacgattttcttctgtagaatgtttgacttcgtattgacccttatctgtaaaacacctatttgggataatatttggaaaaaaagtaaatagctttttcaaaatgaaaaaaaaaa

SEQ ID NO: 3985 - protein, 632 aa, Homo sapien
MDTMMLNVRNLFEQLVRRVEILSEGNEVQFIQLAKDFEDFRKKWQRTDHELGKYKDLLMKAETERSALDVKLKHARNQVDVEIKRRQRAEADCEKLERQIQLIREMLMCDTSGSIQLSEEQKSALAFLNRGQPSSSNAGNKRLSTIDESGSILSDISFDKTDESLDWDSSLVKTFKLKKREKRRSTSRQFVDGPPGPVKKTRSIGSAVDQGNESIVAKTTVTVPNDGGPIEAVSTIETVPYWTRSRRKTGTLQPWNSDSTLNSRQLEPRTETDSVGTPQSNGGMRLHDFVSKTVIKPESCVPCGKRIKFGKLSLKCRDCRVVSHPECRDRCPLPCIPTLIGTPVKIGEGMLADFVSQTSPMIPSIVVHCVNEIEQRGLTETGLYRISGCDRTVKELKEKFLRVKTVPLLSKVDDIHAICSLLKDFLRNLKEPLLTFRLNRAFMEAAEITDEDNSIAAMYQAVGELPQANRDTLAFLMIHLQRVAQSPHTKMDVANLAKVFGPTIVAHAVPNPDPVTMLQDIKRQPKVVERLLSLPLEYWSQFMMVEQENIDPLHVIENSNAFSTPQTPDIKVSLLGPVTTPEHQLLKTPSSSSLSQRVRSTLTKNTPRFGSKSKSATNLGRQGNFFASPMLK

SEQ ID NO: 3986 - DNA, 1236 bp, Homo sapien
ataatcttcattcctgggttctccacttcaatagtcgtggcagtgctgctgaatttgcagtttttcacatcatgaccaggattctggaagctacaaacagtttgtttttacctctgcctcctggttttcatactctgcacaccatcctcggggtccagtgtctccctttgcataacctgctgcattgcattgacagtggagtgttgcttctcactgaaacagctgtcataaggctcatgaaagatctggataatacagagaaaaatgaaaaactgaaattcagtatcattgtgcggcttcctccgcttattgggcagaagatttgtagactttgggatcatcctatgagttctaacatcatttcgcggaaccacgtgacgcgactgcttcagaactataagaaacagcctcggaattctatgattaacaagtcatcgttcagtgtagaatttctgcctctgaactacttcattgaaattctgacagatatagagtcctccaatcaagccctgtatccttttgaaggacatgacaatgtggatgcagaatttgtagaggaagcagctctgaaacacaccgcgatgcttttaggcttatgaaaaagaaaacgcaattggatctgctgctgccattttaatcttgctcattaaccttactcctctgagaattctttaacaatatttaaaattggtaacaaaaatagtttagccataattgtttagccatgtgagtttcaggttggtacacgttcagacagaactgctgtatcacattccaattttgaatagccagtgagcaatcaagtgtagagaaatgataaatggcctaagaaggcatacagtggcataaacgatgctcttcctagtagcttaataggcccacaagctagtttctgttgcactctgaaataaaatatgctttaaaaatgtagggaacagtgcttagaaaagcaaaaactaggtgtgtcattgaaataataggcataaaaattaaatgttacataagaacactatttggaaagagggtccttttaaaaactgaatttgtactaaatcagatttgccatgtccagtacagaataatttgtacttagtatttgcagcagggtttgtctttgtgaattcagatgaaacatatttatttttttttatttataaaaggttgatttaggaatattttgtcagtcattaaaaaacctgaaaacataaaaaaaaaaaaaaaaaaaaaaaaaaaaaa

SEQ ID NO: 3987 - DNA, 2355 bp, Homo sapien
gcagaggaggcggcggaacaccccgggttggtcgggtttccaagggctgacccgagctccagcactttttccgcgcctgatttttcagagctcttcagaaaccaggctgctttcaggaacattgctgtggattcccagggcctattccactagaagcaagatggctgaactcaatactcatgtgaatgtcaaggaaaagatctatgcagttagatcagttgttcccaacaaaagcaataatgaaatagtcctggtgctccaacagtttgattttaatgtggataaagccgtgcaagcctttgtggatggcagtgcaattcaagttctaaaagaatggaatatgacaggaaaaaagaagaacaataaaagaaaaagaagcaagtccaagcagcatcaaggcaacaaagatgctaaagacaaggtggagaggcctgaggcagggcccctgcagccgcagccaccacagattcaaaacggccccatgaatggctgcgagaaggacagctcgtccacagattctgctaacgaaaaaccagcccttatccctcgtgagaaaaagatctcgatacttgaggaaccttcaaaggcacttcgtggggtcacagaaggcaacagactactgcaacagaaactatccttagatgggaaccccaaacctatacatggaacaacagagaggtcagatggcctacagtggtcagctgagcagccttgtaacccaagcaagcctaaggcaaaaacatctcctgttaagtccaatacccctgcagctcatcttgaaataaagccagatgagttggcaaagaaaagaggcccaaatattgagaaatcagtgaaggatttgcaacgctgcaccgtttctctaactagatatcgcgtcatgattaaggaagaagtggatagttccgtgaagaagatcaaagctgcctttgctgaattacacaactgcatcattgacaaagaagtttcattaatggcagaaatggataaagttaaagaagaagccatggaaatcctgactgctcgtcagaagaaagcagaagaactaaagagactcactaaccttgccagtcagatggcagagatgcagctggccgaactcagggcagaaattaagcactttgtcagcgagcgtaaatatgacgaggagctcgggaaagctgcccggttttcctgtgacatcgaacagctgaaggcccaaatcatgctctgcggagaaattacacatccaaagaacaactattcctcaagaactccctgcagctccctgctgcctctgctgaatgcgcacgcagcaacctctgggaaacagagtaacttttcccgaaaatcatccactcacaataagccctctgaaggcaaagcggcaaaccccaaaatggtgagcagtctccccagcaccgccgacccctctcaccagaccatgccggccaacaagcagaatggatcttctaaccaaagacggagatttaatccacagtatcataacaacaggctaaatgggcctgccaagtcgcagggcagtgggaatgaagccgagccactgggaaagggcaacagccgccacgaacacagaagacagccgcacaacggcttccggcccaaaaacaaaggcggtgccaaaaatcaagaggcttccttggggatgaagacccccgaggccccggcccattctgaaaagccccggcgaaggcagcacgctgcagacacctcggaggccaggcccttccggggtagtgtcggtagggtttcacagtgcaatctctgccccacgagaatagaagtttccacagatgcagcagttctctcagtcccggctgtgacgttggtggcctgagctaggaggaaaaagagcagttttcactcagttttggttccctgcccgaggtgctgacccaattcgctgccaaaagagtgtcaatcagaatatacaaatcccgtatggttgtgtcatcctctcttaatcatttttactaattctaataatcagctctagcttgcttcataattttcatggctttgcttgatctgttgatgctttctctcatcaagactttgcagcattttagccaggcagtatttactcattattaggaaaatcaagatgtggctgaagatcagaggctcagttagcaacctgtgttgtagcagtgatgtcagtccatagattgtctttagagagttaatgttacaaaaaagaattcttaataatcagacaaacatgatctgctgaggacacatgcgcttttgtagaatttaacatctggtgtttttctgaaaaaatatatatacatatattgctttatttgaaacaaattaaaatatgctgcatttgaaaaaaaaaaaaaaaaaaaa

SEQ ID NO: 3988 - protein, 558 aa, Homo sapien
MAELNTHVNVKEKIYAVRSVVPNKSNNEIVLVLQQFDFNVDKAVQAFVDGSAIQVLKEWNMTGKKKNNKRKRSKSKQHQGNKDAKDKVERPEAGPLQPQPPQIQNGPMNGCEKDSSSTDSANEKPALIPREKKISILEEPSKALRGVTEGNRLLQQKLSLDGNPKPIHGTTERSDGLQWSAEQPCNPSKPKAKTSPVKSNTPAAHLEIKPDELAKKRGPNIEKSVKDLQRCTVSLTRYRVMIKEEVDSSVKKIKAAFAELHNCIIDKEVSLMAEMDKVKEEAMEILTARQKKAEELKRLTNLASQMAEMQLAELRAEIKHFVSERKYDEELGKAARFSCDIEQLKAQIMLCGEITHPKNNYSSRTPCSSLLPLLNAHAATSGKQSNFSRKSSTHNKPSEGKAANPKMVSSLPSTADPSHQTMPANKQNGSSNQRRRFNPQYHNNRLNGPAKSQGSGNEAEPLGKGNSRHEHRRQPHNGFRPKNKGGAKNQEASLGMKTPEAPAHSEKPRRRQHAADTSEARPFRGSVGRVSQCNLCPTRIEVSTDAAVLSVPAVTLVA

SEQ ID NO: 3989 - DNA, 2952 bp, Homo sapien
acaaactactccctgagatcctacaatccgcttcatttctaactgctaatggggccttgtatatggctttcttttgcattttaaggaagatacttggaaaattctactcatggactcctggctttggtgccgctctgccagcatcttatgtggccattctcattgaaagaaaaagcaggagagggctgctcacaatttatatggccaacttggtccttttgttttgcatcacagctgccatgtacatgttctttttcaggtgcaaggatggcttgaaaggatttacattttctgcacttaggttcattgtagggaaggaagaaattcccacacattctttttcaccagaggcagcatatgcaaaagtggaacaaaagagagagcaacatgaggaaaaacccagaagaatgaatatgattggtctagtcaggaaatttgtggattcaatatgcaaacatggaccaaggcatagatgttgcaaacattatgaagataattgcatctcttattgcattaaaggtttcatcagaatgtttagcgtggggtacttgatccagtgctgcctccgaatcccttctgcatttaggcatctgtttacacagccatctcggctactttctctcttctacaataaagaaaacttccagcttggagcttttcttggctcttttgttagtatatacaagggtactagttgcttcctgcgctggatcagaaacttagatgatgaactacatgctattatagctggatttttggcaggtacatcaatgatgttttataaaagcacaacaatttccatgtatttagcgtccaaattggtagagacaatgtatttcaaaggcattgaagcagggaaggttccctattttcctcatgcagatactatcatctattccatctctacagcaatttgcttccaggcagctgtcatggaagttcagactttgagaccatcttactggaagttccttttaagactcaccaagggcaaatttgctgtcatgaaccgaaaagtccttgatgtttttggtactggtgcatctaaacactttcaggatttcatccccaggttggatccaagatacacaactgtaacaccagagttgcccacagagttttcctgaagatgactgtaacttattaatgtgactaaatgtttcatcttgaagagttaattatgttgaacacaaaggagggggcccaagctcgaacttcagtgttatttcagttagagatactcttttcatttgttttgtttttcttatgaatcagaaattcagaagctttttaggaagatgttgcttaataattaagcttcctccatagccagaataagattctggatcactgtagtgactgacattatatattattgatcaaattatgtccacaagcaatattatataatctacgtagaagtgtaataacaaacaagagtacacttaaaattactttaaaagatgtctttagttcattccaatataattcttgattaaaattaggattatttctacattttaggatttacaaaggatcacgggtacatgggtttggtctatatatttttttaaagttttgaattggtatctgtagtagtggaatgttatagatttgaagtaactctccacggacagtgctgctttcgtgtagagcaatttaattggagaagtggccattcttacttcagggatgcaaagatgggtctcataccatttggataaatgtcgtggtatccatgctttttttcaactaataacatcatctctcttcatgaccagttaattgggctatttggcagcccagtgaacctatgtactaatggcaagttaggggcaaatggaaatggacacatccgttaaagttgaaatgtatgttttaatctttcacagaagtattacacttgaatatttaaaaacaaaacttttaaacttcctataggtttatgatgtttgttttcatttatatggacataatccttcatagctcagtttatatgccattgttgtattagaagggatcaaaatcctatggaacaaagtagtcttggcaagttggcagtttgtgtcctctcagctgtttaacttatgtaatggatgttttgcacctgaaaacactataaaaatccagtggttgtttaaaaagtccatttgtcactaattccattcaggttctccaaccttcttcttgaatatcattgtcaccatttatactgttagaataaagaggtgacaccataaagtcctgctgataatgagagtagttcaggacagctgtgattgaaatatggtcgctatttacagtttttcagggaaaagttatacttttctatgttaataaagagctgaagtggtctacagttaatgtgacatgtagggatgatgatatttttaaaatacattttgttgctaaaaagttgttaggccagtgcaaattatgcagtagaacttgtgttgcaaaaggaattataacccatactttaaaaatgcttaatccctcatattcaatttcatcaagccttgtatacttctgcttaaatgtaattcaatccttggttgttatggcaaacagaaacccaacaaaaagacagactctggtactatggtaacagagccactttatcatttggtcaaaatttgacattatgattagctttgtagaactgacctgtttatttggcaatgctgttaaaggatcatttcggtttcagacttcaaagttgattaataaatttaatcttaactttttattcactggaatcaaaacgatggttggtactgtgtttactgtttaaaatgaagtactaaagccctgagaactgcacctcattttctttatccagaaattgtgcttatatattttcctgtcaggtttaaaaagatgttttaattcataaattattgttttcattgacattaaaggactgtgatattgaaaaaaaaaaaaaaaaaa

SEQ ID NO: 3990 - protein, 354 aa, Homo sapien
MAFFCILRKILGKFYSWTPGFGAALPASYVAILIERKSRRGLLTIYMANLVLLFCITAAMYMFFFRCKDGLKGFTFSALRFIVGKEEIPTHSFSPEAAYAKVEQKREQHEEKPRRMNMIGLVRKFVDSICKHGPRHRCCKHYEDNCISYCIKGFIRMFSVGYLIQCCLRIPSAFRHLFTQPSRLLSLFYNKENFQLGAFLGSFVSIYKGTSCFLRWIRNLDDELHAIIAGFLAGTSMMFYKSTTISMYLASKLVETMYFKGIEAGKVPYFPHADTIIYSISTAICFQAAVMEVQTLRPSYWKFLLRLTKGKFAVMNRKVLDVFGTGASKHFQDFIPRLDPRYTTVTPELPTEFS

SEQ ID NO: 3991 - DNA, 868 bp, Homo sapien
ggcgggcagaagttggaaacatgcggctgtcggtcgctgcagcgatctcccatggccgcgtatttcgccgtatgggcctcggtcccgagtcccgcatccatctgttgcggaacttgctcacagggctggtgcggcacgaacgcatcgaggcaccatgggcgcgtgtggacgaaatgaggggctacgcggagaagctcatcgactatgggaagctgggagacactaacgaacgagccatgcgcatggctgacttctggctcacagagaaggatttgatcccaaagctgtttcaagtactggcccctcggtacaaagatcaaactgggggctacacaagaatgctgcagatcccaaatcggagtttggatcgggccaagatggcagtgatcgagtataaagggaattgcctcccacccctgcctctgcctcgcagagacagccaccttacactcctaaaccagctgctgcagggtttgcggcaggacctcaggcaaagccaggaagcaagcaaccacagctcccacacagctcaaacaccagggatttaactggatctgaagagtctgcagcccttaatcagtacccatgatcacaggcctttggagcacttttactctctgagaagaactggagctagagatgtaaaatggacagtcttgatggggttgagaaccttctggggagccagatgaccctctctttgcacaatagataaaagtctttatatgaatatatataaatttatttattttttccttcctgtgggatttctggagaatgagaattatccaaatgctcagtctacctgagatagtaaattcatggcttatgcttctggtccttaaatttgggttatttttggttagtg

SEQ ID NO: 3992 - protein, 175 aa, Homo sapien [sequence omitted]

SEQ ID NO: 3993 - DNA, 3463 bp, Homo sapien
agcgcgcggaagaaaaaccagcaagaaggcggcgggggaagatggcggtcctggggtagagtttgcaagctttctgactaggctagtcgagtaactattcgggtcatggcgtcaaactcaactaagtctttcctggcagatgccggctatggcgaacaggaactggatgccaactctgcccttatggaattggacaaaggcctaagatctggcaaacttggtgaacagtgtgaagcagttgttcgctttcccagactttttcagaagtatccattccctattcttatcaattctgcattcctaaagttagctgatgttttcagagttggaaataatttcctgaggctatgtgttcttaaagttacccaacaaagtgagaaacatttggagaagattctaaatgtggatgaatttgtgaagagaattttttctgtgattcatagtaatgatcctgtggcaagagccatcaccctccggatgttgggaagtctggcatcaataattcctgagaggaagaatgctcatcatagtattcgtcagagtttagattcacatgataatgtagaagttgaagctgctgtttttgctgctgcaaacttctctgcacagtcaaaggattttgctgtaggaatctgtaacaaaatcagtgaaatgattcaaggtttagcgacaccagtagacttgaagctaaaattgatacccattctacagcacatgcaccatgatgcaatcttggcttccagtgctcgtcagcttttacaacagctggtcacatcctatccgtccaccaaaatggtgattgtgtctttgcacactttcactctgcttgcagcgtcatctttggttgatacacctaagcagattcagcttctgttgcagtatttgaagaatgatcccaggaaggcagtaaagagacttgctattcaagatctgaaattacttgctaataaaacaccacatacttggagtagggagaatattcaggcactttgtgagtgtgccctccagactccttatgacagcttaaaactagggatgttgtctgtcctttccacactatcagggaccatcgccatcaaacattacttcagtatagttccaggaaatgtgagttcttctcccagatcttctgatttagtcaaattagcccaagagtgctgttaccataataacaggggcattgcagctcatggagttagagtcctaactaatataactgtttcttgtcaagaaaaggatcttttggcactggaacaagatgctgtctttggcctggaatccctactggtactttgtagtcaagatgatagtccaggtgctcaggccactttaaagattgctctaaactgtatggtgaagttggccaagggcaggccccatcttagccagtcagtagttgagaccttgttgactcaattgcacagtgctcaagacgctgcccggattttgatgtgccattgcctggcagccattgccatgcaactgccggtgctgggtgatgggatgcttggtgacctcatggagctgtacaaggtgattggacgatcagccacagacaagcaacaagaacttctggtgagtttggctactgtgatttttgttgcaagtcagaaggcattgtctgtggaaagtaaggcagtaattaagcagcagcttgaaagtgtctccaatggatggactgtataccgtattgccagacaggcttccagaatgggtaatcatgacatggccaaagagctttatcagagtttgctgactcaggttgcctcagaacatttctacttctggctaaatagtttgaaggagttttcacatgcagaacagtgtctcactgggttgcaagaggaaaattatagttcagcactttcttgcattgctgaatctttaaaattctatcacaaagggattgcttccttaacagcagctagtacaccactgaatcctttaagctttcagtgtgaatttgtaaaactcaggattgaccttttacaagccttctctcaacttatctgtacttgtaatagcctgaagacaagcccaccacctgcaattgccacaacaattgccatgaccttaggaaatgacctccagaggtgtggtcgcatctccaatcagatgaaacagtccatggaagaatttcgaagccttgcttctcgatatggagatctttaccaggcatcttttgatgctgactcagcaactttgaggaatgttgaactacagcagcagagctgtttactgatatctcatgcaatagaagccctgattttggatccagaatcagcaagtttccaggaatatggatctactggaacagcccatgctgatagtgaatatgaaagaagaatgatgtctgtatataatcatgtcttggaggaggtagaatcactcaatcggaaatatacccctgtttcttatatgcacacagcatgcctctgcaatgccatcattgctttgctgaaagttcccctttctttccagagatattttttccagaaactacagtctaccagcatcaagcttgctctgtcaccatcgccccggaatcctgcagagcccattgctgtccagaataaccagcagctggcgctaaaggtagagggagtggttcagcacggatctaaaccaggactcttccgcaaaattcagtctgtctgtctgaatgtttcttccacactgcagagtaaatctggacaagactacaagatacccattgacaacatgaccaatgagatggagcaaagggttgaacctcataatgattacttcagtactcaatttctgttgaactttgctatccttggaacacacaacattacagtggaatcttctgtgaaagatgccaatggtatagtatggaagactggtcccagaactaccatatttgtaaaatccctggaagacccttattcccagcaaattcgcttacaacagcagcaagcccagcagccattacagcagcagcagcaacgcaatgcctacacacggttttaaccatggaatgaatgcactgcagactctcaagagatcaatcaaattgccagaaacagtttggtttttcatatggaataagtattaaagttacagtgtagttcatttattcattgatttttgtaatgtaatattctggaaaaaattttgttttcttaaaaattttgtctgacagctgggcgtggttgctcacgcctgtaatcccagcactttgggaggctgaggtgggcggctcacgaggagatcaagaccatcctggctaacacagtgaaaccccgtctccactaaaaaatacaaaaaaattagccaagcatggtggcaggcgcctgtagtcccagctacttgggaggctgaggcaggagaatggtgtgaacctgggaggcggagcttgcagtgagccgagactgtgctccagcctgggcgacagagcgagactccgtctcaaaaaaataaataaatacattttgtctgg

SEQ ID NO: 3994 - protein, 962 aa, Homo sapien
MASNSTKSFLADAGYGEQELDANSALMELDKGLRSGKLGEQCEAVVRFPRLFQKYPFPILINSAFLKLADVFRVGNNFLRLCVLKVTQQSEKHLEKILNVDEFVKRIFSVIHSNDPVARAITLRMLGSLASIIPERKNAHHSIRQSLDSHDNVEVEAAVFAAANFSAQSKDFAVGICNKISEMIQGLATPVDLKLKLIPILQHMHHDAILASSARQLLQQLVTSYPSTKMVIVSLHTFTLLAASSLVDTPKQIQLLLQYLKNDPRKAVKRLAIQDLKLLANKTPHTWSRENIQALCECALQTPYDSLKLGMLSVLSTLSGTIAIKHYFSIVPGNVSSSPRSSDLVKLAQECCYHNNRGIAAHGVRVLTNITVSCQEKDLLALEQDAVFGLESLLVLCSQDDSPGAQATLKIALNCMVKLAKGRPHLSQSVVETLLTQLHSAQDAARILMCHCLAAIAMQLPVLGDGMLGDLMELYKVIGRSATDKQQELLVSLATVIFVASQKALSVESKAVIKQQLESVSNGWTVYRIARQASRMGNHDMAKELYQSLLTQVASEHFYFWLNSLKEFSHAEQCLTGLQEENYSSALSCIAESLKFYHKGIASLTAASTPLNPLSFQCEFVKLRIDLLQAFSQLICTCNSLKTSPPPAIATTIAMTLGNDLQRCGRISNQMKQSMEEFRSLASRYGDLYQASFDADSATLRNVELQQQSCLLISHAIEALILDPESASFQEYGSTGTAHADSEYERRMMSVYNHVLEEVESLNRKYTPVSYMHTACLCNAIIALLKVPLSFQRYFFQKLQSTSIKLALSPSPRNPAEPIAVQNNQQLALKVEGVVQHGSKPGLFRKIQSVCLNVSSTLQSKSGQDYKIPIDNMTNEMEQRVEPHNDYFSTQFLLNFAILGTHNITVESSVKDANGIVWKTGPRTTIFVKSLEDPYSQQIRLQQQQAQQPLQQQQQRNAYTRF

SEQ ID NO: 3995 - DNA, 2221 bp, Homo sapien; identical to SEQ ID NO: 3597

SEQ ID NO: 3996 - protein, 452 aa, Homo sapien; identical to SEQ ID NO: 3598

SEQ ID NO: 3997 - DNA, 973 bp, Homo sapien
gggattacaggcgtgagccactgtgcctgacccactcacctgtcattgtagtacttaagatgccttgttcatttattgtgcctgtgcaataaatacaccttgatttgagtttacaaagattctcagcagttggtggtcatcctcatctcctgggcgggggcctcctggtgtggccagtatctgaattagtctcataactcatgttcactttttaaaatcggagcttcccagacctcagttttgttttgttattttccattatctgcagctgtctcctttcccctctctcacctatactctactgatcagtgactgctggctcctttgttacccatccttctctttctccacattttttctcttctcatccctttcagttctggactgtttccttcttcctccctgtctttcatttagtcattcattgaatgtacttactaagcacatatagcataatcaggctgtgttgggtaggcatcccgagttctatgagataaagaaagaatgggatatgattaccaattttaagaagcatctaaaacaacctgttatgttttagcaaattgcccccaaaggacccattagggaggaaaacgttcatgtcctttttgcgtatcatctcaagcagtacccatgatggctgggatcccagaacccacctttgagaatgctgccgtatttgcgtgtggttgacaaggttgggccagacactcaggaaatagggttgtcgtcctacctcccccactaacttcctgtaagaacttcagcccctctcaggacctttttctttaccaataaaattcagaaattgggctcaatcagtaattcccaagttattttccaaagaacatgaattttgtggaactttaatagatatcatgcaaaaaaaaatgtgggagggattgttccatggtcaaatggtcttggaaataactcgtttaaacaaaaataaaactgtttctttacccacaaa

SEQ ID NO: 3998 - protein, 31 aa, Homo sapien
MQKKMWEGLFHGQMVLEITRLNKNKTVSLPT

SEQ ID NO: 3999 - DNA, 813 bp, Homo sapien
gcgtcgacaaaaaaaaaaattggagttttacagataaccacatcttattctgggaaaggatttgaagcaagttgggttttatatttggctgtacttgtcctcttcagcagtataataagccccttaaggctgaagtaaccttattcctattgtttagtagctaatagcatgcttttgatatgcttatgatcatactaataatttaatatttgaattgtatggaagtacaattcagtatcattttacatatggtatattgtgatgctgtatcatattttatgttacggtttataagaaaagctcctaggtataaaatgctacatagcaggaacttggtttttcaatgttattatttcctactgtttttgacgtaacggcaataaaatttgtttgaaccaaaatggacttaacaattatttgtacaactcagtattgtctaaatatcatattgttaaatctaggtttcttgaattctccatcaagcctggtcatgtcatgtagcatttggtgtctcaccatgcccaacagatattttgtgggaggatggagttgatcttcctcatgttaaaagattgaagggagtgttctgacttaattgataacagtctttcataacttcacaaatttttgagaatgacccaaggctaactgtgggaaaaattcacataaaaacatagcctatctatgaggagcaaaactatatttcagttgtgggctttacatttcatttaaccctcttaactgtcctgtgaaatgggttacagcttattttatagatgaggaagtgaagtttagataagttagggattggat

SEQ ID NO: 4000 - protein, 45 aa, Homo sapien [sequence omitted]

SEQ ID NO: 4001 - DNA, 772 bp, Homo sapien
aataccttttctggttttatttctaaaatcaatcctatttctctaacaccaaagcagttcttgctatcagcagatcaatcagccctctctttgagcagcctcatacagagcttactgcattactctgcagtggatggtcaccagacgtgattaacaagtgcctttctaacagtttctagtatgtgagtgtctgcagcacttgattttctccagctgcagttgcaacgcctttgtcagagaacaaaggagaagaattttcatccatcctagctcccagaggtgcctggaatctaactttacagaaagcattaaatactgatccttttcttctccttttatccatttgaagacagggatcttctgctgagcatttcagatataccctgctctgtgtaatgcccaacgatttttcattagctgggagctgttttagggacattttacaggttaatgactgtgggagaggagaataaaatcaaaactgcaagaacccatttttgtcttcataagcattgcattttaaaatacgagggcttgaagacttctcagaagagacactcactactggagttaaagttatatgaagtccctgagcccttaatcatccaagactggacctaagcagtcctcttcgtttgtagtctctttcaatatctgcttatcaaggacaacgagaatatcttagtctactaattaatctttttttatcaccatagtctaccaagaaagaaagctgataagataataaagatgattcattcctcagagtagg

SEQ ID NO: 4002 - protein, 56 aa, Homo sapien
MTVGEENKIKTARTHFCLHKHCILKYEGLKTSQKRHSLLELKLYEVPEPLIIQDWT

SEQ ID NO: 4003 - DNA, 2707 bp, Homo sapien
ctacgcgcggggcgggtgctgcttgctgcaggctctggggagtcgccatgcctacaacacagcagtcccctcaggatgagcaggaaaagctcttggatgaagccatacaggctgtgaaggtccagtcattccaaatgaagagatgcctggacaaaaacaagcttatggatgctctaaaacatgcttctaatatgcttggtgaactccggacttctatgttatcaccaaagagttactatgaactttatatggccatttctgatgaactgcactacttggaggtctacctgacagatgagtttgctaaaggaaggaaagtggcagatctctacgaacttgtacagtatgctggaaacattatcccaaggctttaccttttgatcacagttggagttgtatatgtcaagtcatttcctcagtccaggaaggatattttgaaagatttggtagaaatgtgccgtggtgtgcaacatcccttgaggggtctgtttcttcgaaattaccttcttcagtgtaccagaaatatcttacctgatgaaggagagccaacagatgaagaaacaactggtgacatcagtgattccatggattttgtactgctcaactttgcagaaatgaacaagctctgggtgcgaatgcagcatcagggacatagccgagatagagaaaaaagagaacgagaaagacaagaactgagaattttagtgggaacaaatttggtgcgcctcagtcagttggaaggtgtaaatgtggaacgttacaaacagattgttttgactggcatattggagcaagttgtaaactgtagggatgctttggctcaagaatatctcatggagtgtattattcaggttttccctgatgaatttcacctccagactttgaatccttttcttcgggcctgtgctgagttacaccagaatgtaaatgtgaagaacataatcattgctttaattgatagattagctttatttgctcaccgtgaagatggacctggaatcccagcggatattaaactttttgatatattttcacagcaggtggctacagtgatacagtctagacaagacatgccttcagaggatgttgtatctttacaagtctctctgattaatcttgccatgaaatgttaccctgatcgtgtggactatgttgataaagttctagaaacaacagtggagatattcaataagctcaaccttgaacatattgctaccagtagtgcagtttcaaaggaactcaccagacttttgaaaataccagttgacacttacaacaatattttaacagtcttgaaattaaaacattttcacccactctttgagtactttgactacgagtccagaaagagcatgagttgttatgtgcttagtaatgttctggattataacacagaaattgtctctcaagaccaggtggattccataatgaatttggtatccacgttgattcaagatcagccagatcaacctgtagaagaccctgatccagaagattttgctgatgagcagagccttgtgggccgcttcattcatctgctgcgctctgaggaccctgaccagcagtacttgattttgaacacagcacgaaaacattttggagctggtggaaatcagcggattcgcttcacactgccacctttggtatttgcagcttaccagctggcttttcgatataaagagaattctaaagtggatgacaaatgggaaaagaaatgccagaagattttttcatttgcccaccagactatcagtgctttgatcaaagcagagctggcagaattgcccttaagactttttcttcaaggagcactagctgctggggaaattggttttgaaaatcatgagacagtcgcatatgaattcatgtcccaggcattttctctgtatgaagatgaaatcagcgattccaaagcacagctagctgccatcaccttgatcattggcacttttgaaaggatgaagtgcttcagtgaagagaatcatgaacctctgaggactcagtgtgcccttgctgcatccaaacttctaaagaaacctgatcagggccgagctgtgagcacctgtgcacatctcttctggtctggcagaaacacggacaaaaatggggaggagcttcacggaggcaagagggtaatggagtgcctaaaaaaagctctaaaaatagcaaatcagtgcatggacccctctctacaagtgcagctttttatagaaattctgaacagatatatctatttttatgaaaaggaaaatgatgcggtaacaattcaggttttaaaccagcttatccaaaagattcgagaagacctcccgaatcttgaatccagtgaagaaacagagcagattaacaaacattttcataacacactggagcatttgcgcttgcggcgggaatcaccagaatccgaggggccaatttatgaaggtctcatcctttaaaaaggaaatagctcaccatactcctttccatgtacatccagtgagggttttattacgctaggtttcccttccatagattgtgcctttcagaaatgctgaggtaggtttcccatttcttacctgtgatgtgttttacccagcacctccggacactcaccttcaggaccttaataaaattattcacttggtaagtgttcaagtctttctgatcaccccaagtagcatgactgatctgcaatttaaaattcctgtgatctgtaaaaaaaaaa

SEQ ID NO: 4004 - protein, 796 aa, Homo sapien
MPTTQQSPQDEQEKLLDEAIQAVKVQSFQMKRCLDKNKLMDALKHASNMLGELRTSMLSPKSYYELYMAISDELHYLEVYLTDEFAKGRKVADLYELVQYAGNIIPRLYLLITVGVVYVKSFPQSRKDILKDLVEMCRGVQHPLRGLFLRNYLLQCTRNILPDEGEPTDEETTGDISDSMDFVLLNFAEMNKLWVRMQHQGHSRDREKRERERQELRILVGTNLVRLSQLEGVNVERYKQIVLTGILEQVVNCRDALAQEYLMECIIQVFPDEFHLQTLNPFLRACAELHQNVNVKNIIIALIDRLALFAHREDGPGIPADIKLFDIFSQQVATVIQSRQDMPSEDVVSLQVSLINLAMKCYPDRVDYVDKVLETTVEIFNKLNLEHIATSSAVSKELTRLLKIPVDTYNNILTVLKLKHFHPLFEYFDYESRKSMSCYVLSNVLDYNTEIVSQDQVDSIMNLVSTLIQDQPDQPVEDPDPEDFADEQSLVGRFIHLLRSEDPDQQYLILNTARKHFGAGGNQRIRFTLPPLVFAAYQLAFRYKENSKVDDKWEKKCQKIFSFAHQTISALIKAELAELPLRLFLQGALAAGEIGFENHETVAYEFMSQAFSLYEDEISDSKAQLAAITLIIGTFERMKCFSEENHEPLRTQCALAASKLLKKPDQGRAVSTCAHLFWSGRNTDKNGEELHGGKRVMECLKKALKIANQCMDPSLQVQLFIEILNRYIYFYEKENDAVTIQVLNQLIQKIREDLPNLESSEETEQINKHFHNTLEHLRLRRESPESEGPIYEGLIL

SEQ ID NO: 4005 - DNA, 3208 bp, Homo sapien
ggctatggacgcgcggggcgggtgctgcttgctgcaggctctggggagtcgccatgcctacaacacagcagtcccctcaggatgagcaggaaaagctcttggatgaagccatacaggctgtgaaggtccagtcattccaaatgaagagatgcctggacaaaaacaagcttatggatgctctaaaacatgcttctaatatgcttggtgaactccggacttctatgttatcaccaaagagttactatgaactttatatggccatttctgatgaactgcactacttggaggtctacctgacagatgagtttgctaaaggaaggaaagtggcagatctctacgaacttgtacagtatgctggaaacattatcccaaggctttaccttttgatcacagttggagttgtatatgtcaagtcatttcctcagtccaggaaggatattttgaaagatttggtagaaatgtgccgtggtgtgcaacatcccttgaggggtctgtttcttcgaaattaccttcttcagtgtaccagaaatatcttacctgatgaaggagagccaacagatgaagaaacaactggtgacatcagtgattccatggattttgtactgctcaactttgcagaaatgaacaagctctgggtgcgaatgcagcatcagggacatagccgagatagagaaaaaagagaacgagaaagacaagaactgagaattttagtgggaacaaatttggtgcgcctcagtcagttggaaggtgtaaatgtggaacgttacaaacagattgttttgactggcatattggagcaagttgtaaactgtagggatgctttggctcaagaatatctcatggagtgtattattcaggttttccctgatgaatttcacctccagactttgaatccttttcttcgggcctgtgctgagttacaccagaatgtaaatgtgaagaacataatcattgctttaattgatagattagctttatttgctcaccgtgaagatggacctggaatcccagcggatattaaactttttgatatattttcacagcaggtggctacagtgatacagtctagacaagacatgccttcagaggatgttgtatctttacaagtctctctgattaatcttgccatgaaatgttaccctgatcgtgtggactatgttgataaagttctagaaacaacagtggagatattcaataagctcaaccttgaacatattgctaccagtagtgcagtttcaaaggaactcaccagacttttgaaaataccagttgacacttacaacaatattttaacagtcttgaaattaaaacattttcacccactctttgagtactttgactacgagtccagaaagagcatgagttgttatgtgcttagtaatgttctggattataacacagaaattgtctctcaagaccaggtggattccataatgaatttggtatccacgttgattcaagatcagccagatcaacctgtagaagaccctgatccagaagattttgctgatgagcagagccttgtgggccgcttcattcatctgctgcgctctgaggaccctgaccagcagtacttgattttgaacacagcacgaaaacattttggagctggtggaaatcagcggattcgcttcacactgccacctttggtatttgcagcttaccagctggcttttcgatataaagagaattctaaagtggatgacaaatgggaaaagaaatgccagaagattttttcatttgcccaccagactatcagtgctttgatcaaagcagagctggcagaattgcccttaagactttttcttcaaggagcactagctgctggggaaattggttttgaaaatcatgagacagtcgcatatgaattcatgtcccaggcattttctctgtatgaagatgaaatcagcgattccaaagcacagctagctgccatcaccttgatcattggcacttttgaaaggatgaagtgcttcagtgaagagaatcatgaacctctgaggactcagtgtgcccttgctgcatccaaacttctaaagaaacctgatcagggccgagctgtgagcacctgtgcacatctcttctggtctggcagaaacacggacaaaaatggggaggagcttcacggaggcaagagggtaatggagtgcctaaaaaaagctctaaaaatagcaaatcagtgcatggacccctctctacaagtgcagctttttatagaaattctgaacagatatatctatttttatgaaaaggaaaatgatgcggtaacaattcaggttttaaaccagcttatccaaaagattcgagaagacctcccgaatcttgaatccagtgaagaaacagagcagattaacaaacattttcataacacactggagcatttgcgcttgcggcgggaatcaccagaatccgaggggccaatttatgaaggtctcatcctttaaaaaggaaatagctcaccatactcctttccatgtacatccagtgagggttttattacgctaggtttcccttccatagattgtgcctttcagaaatgctgaggtaggtttcccatttcttacctgtgatgtgttttacccagcactccggacactcaccttcaggaccttaataaaattattcacttggtaagtgttcaagtctttctgatcaccccaagtagcatgactgatctgcaatttaaaattcctgtgatctgtagcacttatcttggctactaatgaagctctccttttttttgtttgtttgtttgcttcattgttgattgtgtattttcttcattcctggggagtactaacccaaaagcgtctgtctcttgttttctagtccagtttgagattaatttagaagaaaggaatactgtatgtgaaattcatcttgggctttcccctaaattgcaagataaggccatgtgtaagattttccctaaaactagaatatattaatgcatgtttgagaattttaaagcaccatggtcaaaaccagaagctatattttgcatatttggactcagccatccattaagaacccatgttgtcctctggacatatttatcaatataattgggttttaaatagtataaaagaaaacttgtgatctatataatttatgtatcaccttcattgtaaatttagcaggaaatgcatcacaattatgatttttttttttgcaccagtgaaacaataaagatgctattaacaaaaaa

SEQ ID NO: 4006 - protein, 796 aa, Homo sapien; identical to SEQ ID NO: 4004

SEQ ID NO: 4007 - DNA, 1890 bp, Homo sapien
ccgctccgctccgctcggccccgcgccgcccgtcaacatgatccgctgcggcctggcctgcgagcgctgccgctggatcctgcccctgctcctactcagcgccatcgccttcgacatcatcgcgctggccggccgcggctggttgcagtctagcgaccacggccagacgtcctcgctgtggtggaaatgctcccaagagggcggcggcagcgggtcctacgaggagggctgtcagagcctcatggagtacgcgtggggtagagcagcggctgccatgctcttctgtggcttcatcatcctggtgatctgtttcatcctctccttcttcgccctctgtggaccccagatgcttgtcttcctgagagtgattggaggtctccttgccttggctgctgtgttccagatcatctccctggtaatttaccccgtgaagtacacccagaccttcacccttcatgccaaccstgctgtcacttacatctataactgggcctacggctttgggtgggcagccacgattatcctgatyggctgtgccttcttcttctgctgcctccccaactacgaagatgaccttctgggcaatgccaagcccaggtacttctacacatctgcctaacttgggaatgaatgtgggagaaaatcgctgctgctgagatggactccagaagaagaaactgtttctccaggcgactttgaacccattttttggcagtgttcatattattaaactagtcaaaaatgctaaaataatttgggagaaaatattttttaagtagtgttatagtttcatgtttatcttttattatgttttgtgaagttgtgtcttttcactaattacctatactatgccaatatttccttatatctatccataacatttatactacatttgtaagagaatatgcacgtgaaacttaacactttataaggtaaaaatgaggtttccaagatttaataatctgatcaagttcttgttatttccaaatagaatggactcggtctgttaagggctaaggagaagaggaagataaggttaaaagttgttaatgaccaaacattctaaaagaaatgcaaaaaaaaagtttattttcaagccttcgaactatttaaggaaagcaaaatcatttcctaaatgcatatcatttgtgagaatttctcattaatatcctgaatcattcatttcagctaaggcttcatgttgactcgatatgtcatctaggaaagtactatttcatggtccaaacctgttgccatagttggtaaggctttcctttaagtgtgaaatatttagatgaaattttctcttttaaagttctttatagggttagggtgtgggaaaatgctatattaataaatctgtagtgttttgtgtttatatgttcagaaccagagtagactggattgaaagatggactgggtctaatttatcatgactgatagatctggttaagttgtgtagtaaagcattaggagggtcattcttgtcacaaaagtgccactaaaacagcctcaggagaataaatgacttgcttttctaaatctcaggtttatctgggctctatcatatagacaggcttctgatagtttgcaactgtaagcagaaacctacatatagttaaaatcctggtctttcttggtaaacagattttaaatgtctgatataaaacatgccacaggagaattcggggatttgagtttctctgaatagcatatatatgatgcatcggataggtcattatgattttttaccatttcgacttacataatgaaaaccaattcattttaaatatcagattattattttgtaagttgtggaaaaagctaattgtagttttcattatgaagttttcccaataaaccaggtattctaaaaaaaaaaaaaaaaaa

SEQ ID NO: 4008 - protein, 193 aa, Homo sapien
  unsure 143: unknown amino acid
  unsure 164: unknown amino acid
MIRCGLACERCRWILPLLLLSAIAFDIIALAGRGWLQSSDHGQTSSLWWKCSQEGGGSGSYEEGCQSLMEYAWGRAAAAMLFCGFIILVICFILSFFALCGPQMLVFLRVIGGLLALAAVFQIISLVIYPVKYTQTFTLHANXAVTYIYNWAYGFGWAATIILXGCAFFFCCLPNYEDDLLGNAKPRYFYTSA

SEQ ID NO: 4009 - DNA, 3784 bp, Homo sapien
ggcggaagcacgatctccggcagcggcctgggaactcttagctgagcaggcgagagcatcatggataccgacttatatgatgagtttgggaattatattggaccagagcttgattctgatgaagatgatgatgaattgggtagagagaccaaagatcttgatgagatggatgatgatgacgacgacgatgacgtaggagatcatgacgatgaccaccctgggatggaggtggtgctgcatgaggacaagaagtactacccaacagccgaggaggtgtatggtcctgaggtggagaccatagttcaagaggaagacactcagcctctcacagaacccattattaagccagtgaaaaccaagaaattcactctgatggagcagacattacctgttacggtgtatgagatggatttcttggcggatctgatggataactcagagctcatcagaaatgtgaccctttgtggacatctccaccatggcaagacatgttttgtggattgtttaattgaacagactcacccggaaatcagaaagcgctatgaccaagatctgtgctatactgacatcctcttcacagagcaagagagaggtgtaggcatcaaaagcactcctgtgacagtggtcttgccagacaccaaaggaaaatcttatctcttcaatatcatggacactccaggacatgtgaatttctctgatgaggtcacagctggcttgcgcatctcagatggagtggtccttttcattgatgctgctgagggggtgatgctgaacacagagcggctgatcaagcatgcggtgcaggagaggctggcagtcactgtgtgcatcaacaagattgaccggctgatcctggagctgaagctgcctccaactgatgcttattacaagctgcgccacattgtggatgaggtcaatggattaataagcatgtattccactgatgagaacctgatcctttccccactcctgggtaacgtctgcttctccagctcccagtacagcatctgcttcacgctgggctcctttgccaagatctatgccgacacctttggtgacattaattaccaagaatttgctaaaagactctggggtgacatctacttcaaccctaagacgcgaaagttcaccaaaaaggccccaactagcagctcccagagaagtttcgtggagtttatcttggagcctctttataagatcctcgcccaggttgtaggtgacgtggacaccagcctcccacggaccctagacgagcttggcatccacctgacgaaggaggagctgaagctgaacatccgccccttgctcaggctggtctgcaaaaagttctttggcgagttcacaggctttgtggacatgtgtgtgcagcatatcccttctccaaaggtgggcgccaagcccaagattgagcacacctacaccggtggtgtggactccgacctcggcgaggctatgagtgactgtgaccctgatggccccctgatgtgccacactactaagatgtacagcacagatgatggagtccagtttcacgcctttggccgggtgctgagtggcaccattcatgctgggcagcctgtgaaggtactgggggagaactacaccctggaggatgaggaagactcccagatatgcaccgtgggccgcctttggatctctgtggccaggtaccacatcgaggtgaaccgtgttcctgctggcaactgggttctgattgaaggtgttgatcaaccaattgtgaagacagcaaccataaccgaaccccgaggcaatgaggaggctcagattttccgacccttgaagttcaataccacatctgttatcaagattgctgtggagccagtcaacccctcagagctgcccaagatgcttgatggcctgcgcaaggtcaacaagagctatccatccctcaccaccaaggtggaggagtctggcgagcatgtgatcctgggcactggggagctctacctggactgtgtgatgcatgatttgcggaagatgtactcagagatagacatcaaggtggctgacccagttgtcacgttttgtgagacggtggtggaaacatcctccctcaagtgctttgctgaaacgcctaataagaagaacaagatcaccatgattgctgagcctcttgagaagggcctggcagaggacatagagaatgaggtggtccagattacgtggaacaggaagaagctgggagagttcttccagaccaagtacgattgggatctgctggctgcccgttccatctgggcttttggccctgatgcgactggccccaacattctggtggatgatactctgccctctgaggtggacaaggctcttcttggttcagtgaaggacagcatcgttcaaggtttccagtggggaaccagggagggccccctctgtgatgaattgattcggaatgtcaagtttaagatcctggatgcggtggttgcccaggagcccctgcaccggggcgggggccagatcatccccacagccaggagagtcgtctactctgccttcctcatggctactcctcgtctgatggagccttactactttgtagaggtccaggcccctgcagattgcgtctctgcagtttataccgtcctggccaggcgcagggggcacgtgactcaggatgcacccatcccaggctcccctctgtacaccatcaaagcttttatcccggccatcgactcttttggctttgagactgatctccggactcacacccagggacaagccttttctctgtctgtcttccaccactggcagattgtgcctggtgatcccctggacaagagcattgtcatccgccccttggagccacagccagctcctcacctggcccgggaattcatgatcaaaacccgccgtaggaagggcctcagtgaagatgtgagcatcagcaaattcttcgatgatcctatgttgctggaacttgccaaacaggatgttgtgctcaattaccccatgtgagtgcgtggactcctgggagctcctgctccctacagtgggctgcaactcctgtacttgaagctgagacctcatatgacgtggccttcgtgttgtcagagagtgtctggaagctgctgttgccatcttgaacaactcaccaacctccaacccagagccccagtgagagaggagcatttggcctcctgcttccttctgtggcctctgccgggctccattcccaaggaaaagagaggagcttgggctcacagaaagagaaggggatgaaaccccaaggggccctatctttgggatttacatggaattttattttctacaagtttgaccttagccatggtttgcaagtgaacagaacattctgacctctgtcttgctctgctcctttcatcctcgtctcccctgccccatctggtgcttacattctgaatatatgtcatctcccaagaggcttcactgcctctgcttccagctgcagcctccttcctgcctgggtccccagggaagccgcctgccttttaattcagtgttcccatgagcgccaaggccccattattgcccccttgctcccactccatgctgcttctgggtgggacctaagatggcttgggagttgttgggttcctgcgatcagaagtctaccccaccacctcctcaggaaactgctgcctcccctaagaatcttccttgccctggagtagggggccagagcactttgatttccagccatttactccaagtcctctccccagctaccaccagtcccttactctgttctcccccagtgaaaaagagtctgttgattttcctc

SEQ ID NO: 4010 - protein, 972 aa, Homo sapien
MDTDLYDEFGNYIGPELDSDEDDDELGRETKDLDEMDDDDDDDDVGDHDDDHPGMEVVLHEDKKYYPTAEEVYGPEVETIVQEEDTQPLTEPIIKPVKTKKFTLMEQTLPVTVYEMDFLADLMDNSELIRNVTLCGHLHHGKTCFVDCLIEQTHPEIRKRYDQDLCYTDILFTEQERGVGIKSTPVTVVLPDTKGKSYLFNIMDTPGHVNFSDEVTAGLRISDGVVLFIDAAEGVMLNTERLIKHAVQERLAVTVCINKIDRLILELKLPPTDAYYKLRHIVDEVNGLISMYSTDENLILSPLLGNVCFSSSQYSICFTLGSFAKIYADTFGDINYQEFAKRLWGDIYFNPKTRKFTKKAPTSSSQRSFVEFILEPLYKILAQVVGDVDTSLPRTLDELGIHLTKEELKLNIRPLLRLVCKKFFGEFTGFVDMCVQHIPSPKVGAKPKIEHTYTGGVDSDLGEAMSDCDPDGPLMCHTTKMYSTDDGVQFHAFGRVLSGTIHAGQPVKVLGENYTLEDEEDSQICTVGRLWISVARYHIEVNRVPAGNWVLIEGVDQPIVKTATITEPRGNEEAQIFRPLKFNTTSVIKIAVEPVNPSELPKMLDGLRKVNKSYPSLTTKVEESGEHVILGTGELYLDCVMHDLRKMYSEIDIKVADPVVTFCETVVETSSLKCFAETPNKKNKITMIAEPLEKGLAEDIENEVVQITWNRKKLGEFFQTKYDWDLLAARSIWAFGPDATGPNILVDDTLPSEVDKALLGSVKDSIVQGFQWGTREGPLCDELIRNVKFKILDAVVAQEPLHRGGGQIIPTARRVVYSAFLMATPRLMEPYYFVEVQAPADCVSAVYTVLARRRGHVTQDAPIPGSPLYTIKAFIPAIDSFGFETDLRTHTQGQAFSLSVFHHWQIVPGDPLDKSIVIRPLEPQPAPHLAREFMIKTRRRKGLSEDVSISKFFDDPMLLELAKQDVVLNYPM

SEQ ID NO: 4011 - DNA, 1352 bp, Homo sapien; identical to SEQ ID NO: 3288

SEQ ID NO: 4012 - protein, 141 aa, Homo sapien; identical to SEQ ID NO: 3289

SEQ ID NO: 4013 - DNA, 1689 bp, Homo sapien; identical to SEQ ID NO: 3292

SEQ ID NO: 4014 - protein, 373 aa, Homo sapien; identical to SEQ ID NO: 3293

SEQ ID NO: 4015 - DNA, 3170 bp, Homo sapien
aggcgctcaggagcgctagggtttgaggcctgctttctgctcgcgccagcagagcactacctgaggcagcgaggcgcagcgagcctagcctccccgcgccctgggcagtgtggccatggagaatcaggtgttgacgccgcatgtctactgggctcagcgacaccgcgagctatatctgcgcgtggagctgagtgacgtacagaaccctgccatcagcatcactgaaaacgtgctgcatttcaaagctcaaggacatggtgccaaaggagacaatgtctatgaatttcacctgaagttcttagaccttgtgaaaccagagcctgtttacaaactgacccagaggcaggtaaacattacagtacagaagaaagtgagtcagtggtgggagagactcacaaagcaggaaaagcgaccactgtttttggctcctgactttgatcgttggctggatgaatctgatgcggaaatggagctcagagctaaggaagaagagcgcctaaataaactccgactggaaagcgaaggctctcctgaaactcttacaaacttaaggaaaggatacctgtttatgtataatcttgtgcaattcttgggattctcctggatctttgtcaacctgactgtgcgattctgtatcttgggaaaagagtccttttatgacacattccatactgtggctgacatgatgtatttctgccagatgctggcagttgtggaaactatcaatgcagcaattggagtcactacgtcaccggtgctgccttctctgatccagcttcttggaagaaattttattttgtttatcatctttggcaccatggaagaaatgcagaacaaagctgtggttttctttgtgttttatttgtggagtgcaattgaaattttcaggtactctttctacatgctgacgtgcattgacatggattggaaggtgctcacatggcttcgttacactctgtggattcccttatatccactgggatgtttggcggaagctgtctcagtgattcagtccattccaatattcaatgagaccggacgattcagtttcacattgccatatccagtgaaaatcaaagttagattttccttttttcttcagatttatcttataatgatatttttaggtttatacataaattttcgtcacctttataaacagcgcagacggcgctatggacaaaaaaagaaaaagatccactaaaaagaaagatttagatggcttcttgccagtttgagcctaatctgattcttacagttttaccttcttgaaccaatgtaaaagtttttttaatgttaaatgattaaattctcagtgaggctatcttccttttccccagtaacattcctgaatttactgttatcttattgtagtacttgcatgacatggattcctgatatctgatgagaggttcattcttgtgtattcagttaatgacaccaaaaggctcagcccaccccaaccctatctcatgttcagtctgtctaatacatgccagagatttttttttcaaaaagtgctttatccctacaatgtactgacagttcttacagttgagatttgttcttttcagctattgcttgtgaaaaaaagcaagactatgtcactctatagaaggctgttaaagtgactcaggcaggaattaattattctgtacctaaggggttacttgtttaatgggatggcattgactttttgaaaatcaagtggactgagtcattgataaaacatttctaagagtggggctagagaacatactttacatctgacatcctttggcctaacaacatctattattatagtgctcagcagtgtgggcattgaagaggcgcagaatgctttgaaagaaactaatcagaatcttggaacatcatgatcatgccattcttaagtaaatcaactattttcaacactgaagaaaaatgaaacattatttagaaaacaatgagattacaagttccaaactcagccaggaatgtggctcacacctgtaatcccagcactttgggacacctaggtgggagcatcgcttgaagccaggagttcaagaccagcttgggcaacgtagtgagacccctatctctacaaaaaataaaaaaattagctgggtgtgatggcacacacctgttgtcccagctactcaagaagctgagatgggaggatcctgagctcaggaggtcaaggctgcagtgagccgagattgtgccactgcactgcagctggggtgacagtgcaagaccctgtctcaaaccaaaccaaaccacacacacacaaacacacatacacacacacacacacgaggtccaaatggtagcagggatccaaagggaacacagtatgtaggtcaaactggcagtaacagtgtacagcctttgacaaactagaaatattagagtaggccaaacacacctccaaactgtaaggctgtgcacaaacataaaaaatggcagccttccatctcctgcactggctgagtccatttacttgtgtacttgttctagtgagtggtgggactgtacatttttgaatagacctcaaaaatacttcattctgctgctgttcagttggctttttaaacctgtctgcagtaggacactgaaaacagcaagaacttcggggtgaacacccgctgatcctttaacaaggatttctggcaggaaactcacaaaaaggagaactgaaaatttagacatacagttggccattgtaaaaaacatcagtttcctctcatacattccaagtaaaccaagtaaaataagtgttggagtaacacttgcataaaagaatttaaggagtgatagctctttctgttctgccattcccaacattcctgggggaaaggagactcaatgagttaatactatttcactgagcccaagatggaaacttggtttgacctaaaacatctgattaatataggctagctgatttcttaaaaattcgttgcattgaaggatattttgcatgtctgtaacacctgtcaatacttgtttgtattgatttctgatattcttgcagctgactacgtgtaattgggcagatcagctttgcagtagattatgctgcatcctcgtggcaaaattctgtattcttagtgattgttacaaacccctttattgctgtctgagaaagtgaaagattgtgtatttctattaaaacatttacaatc

SEQ ID NO: 4016 - protein, 362 aa, Homo sapien [sequence omitted]

SEQ ID NO: 4017 - DNA, 2183 bp, Homo sapien; identical to SEQ ID NO: 3294

SEQ ID NO: 4018 - protein, 121 aa, Homo sapien; identical to SEQ ID NO: 3295

SEQ ID NO: 4019 - DNA, 2058 bp, Homo sapien; identical to SEQ ID NO: 3298

SEQ ID NO: 4020 - protein, 404 aa, Homo sapien; identical to SEQ ID NO: 3299

SEQ ID NO: 4021 - DNA, 2100 bp, Homo sapien
ccgcgggtcgggctctgtgtcagcagccgggcgggcgctcgggcgggacatggcagcctgtacagcccggcgggccctggccgtgggcagccgctggtggtcccggtcgctgactggggcccggtggccaaggccgctctgtgcggcggccggagctggagccttctcgccagcgtcgaccacgacgacgcggaggcacctctcgtcccgaaaccgaccagagggcaaagtgttggagacagttggtgtgtttgaggtgccaaaacagaatggaaaatatgagaccgggcagcttttccttcatagcatttttggctaccgaggtgtcgtcctgtttccctggcaggccagactgtatgaccgggatgtggcttctgcagctccagaaaaagcagagaaccctgctggccatggctccaaggaggtgaaaggcaaaactcacacttactatcaggtgctgattgatgctcgtgactgcccacatatatctcagagatctcagacagaagctgtgaccttcttggctaaccatgatgacagtcgggccctctatgccatcccaggcttggactatgtcagccatgaagacatcctcccctacacctccactgatcaggttcccatccaacatgaactctttgaaagatttcttctgtatgaccagacaaaagcacctccttttgtggctcgggagacgctaagggcctggcaagagaagaatcacccctggctggagctctccgatgttcatcgggaaacaactgagaacatacgtgtcactgtcatccccttctacatgggcatgagggaagcccagaattcccacgtgtactggtggcgctactgtatccgtttggagaaccttgacagtgatgtggtacagctccgggagcggcactggaggatattcagtctctctggcaccttggagacagtgcgaggccgaggggtagtgggcagggaaccagtgttatccaaggagcagcctgcgttccagtatagcagccacgtctcactgcaggcttccagtgggcacatgtggggcacgttccgctttgaaagacctgatggctcccactttgatgttcggattcctcccttctccctggaaagcaataaagatgagaagacaccaccctcaggccttcactggtaggccagctgaggccccaagtgcccaggcttggtcaccgggaagaacaactctcatcccacaattgctgcagaactcttctctccccatcatgggccacagtgggtctcttaatttgattgtggggttctttttgtggggaggggtggtataacttttcttcagaagacccatgtgggacacctccaaggctggcctcctcataagccctgcctacaccatgttccagtaaacctctccaccaaggaactgtgttcagctgccacaggcctggaggagtttcctggcctgtcacgtgaggtttgatcagtaaaccagtgcacgcttggccacccttgccatttctgctcccagagtctcaggctccccttctgacccagtgtgcgcccttgactgctttctttgctgcccttccagggagctgcccccctggtagggcatgtgcctgtttccctctcagcctggaggctggctggacatctcctagggtcactgtgcctctcagctagttggcgggggtgctggactggactcttgttcactttaccttctgccaaatgcagagagggaggccagtgtcagggtcggagtggcctggctcttagcactgaccgaccattgccatttctggcctcgctaggcccaggagaggagggaggcaagccagtcgggtttcctggagcaatgggtgtgccagccctcagcatgactctgccaagcatccagaccacaaatgcaggaatttggctgaggagcagctttaggtatggattgatgactaagtcaagctacttcctgagcttctctcagatttccaagagccagagatgaattgtgctgcatcttgccccaattcttaggatttcttttcctccgccactgcagtgattgttagaggtagttttcttgaattaatattaaatcacagttccagccctgtaaaaaaa

SEQ ID NO: 4022 - protein, 368 aa, Homo sapien
MAACTARRALAVGSRWWSRSLTGARWPRPLCAAAGAGAFSPASTTTTRRHLSSRNRPEGKVLETVGVFEVPKQNGKYETGQLFLHSIFGYRGVVLFPWQARLYDRDVASAAPEKAENPAGHGSKEVKGKTHTYYQVLIDARDCPHISQRSQTEAVTFLANHDDSRALYAIPGLDYVSHEDILPYTSTDQVPIQHELFERFLLYDQTKAPPFVARETLRAWQEKNHPWLELSDVHRETTENIRVTVIPFYMGMREAQNSHVYWWRYCIRLENLDSDVVQLRERHWRIFSLSGTLETVRGRGVVGREPVLSKEQPAFQYSSHVSLQASSGHMWGTFRFERPDGSHFDVRIPPFSLESNKDEKTPPSGLHW

SEQ ID NO: 4023 - DNA, 3294 bp, Homo sapien; identical to SEQ ID NO: 3302

SEQ ID NO: 4024 - protein, 483 aa, Homo sapien; identical to SEQ ID NO: 3303

SEQ ID NO: 4025 - DNA, 3618 bp, Homo sapien
ggcacgagcgaggttcgggctggttgttccgttgcgagctgcagctgcgatctctgtggtaggcccagaagtgtatgctgacttgtaaagtgaagaagccagtggtgctgcgggtgttcttttggggtagtgtctgggatccagtacgagttgaatcattgttcaaataaggtgtaattgaaaagtgatcctctcttcagagatgtcaaaaacaaacaaatccaagtctggatctcgctcttctcgctcaagatctgcatcaagatctcgttctcgttcattttcgaagtctcggtcccgaagccgatctctctctcgttcaaggaagcgcaggctgagttctaggtctcgttccagatcatattctccagctcataacagagaaagaaaccacccaagagtatatcagaatcgggatttccgaggtcacaacagaggctatagaaggccctattatttccgtgggcgtaacagaggcttttatccatggggccaatataaccgaggaggctatggaaactaccgctcaaattggcagaattaccggcaagcatacagtcctcgtcgaggccgttcaagatcccggtccccaaagagaaggtccccttcaccaaggtccaggagccattctagaaactctgataagtcgtcttctgaccggtcaaggcgctcctcatcctcccgttcttcctccaaccatagccgagttgaatcttctaagcgcaagtctgcaaaggagaaaaagtcctcttctaaggatagccggccatctcaggctgccggggataaccagggagatgaggtcaaggagcagacattctctggaggcacctctcaagatacaaaagcatctgagagctcgaagccatggccagatgccacctacggcactggttctgcatcacgggcctcagcagtttctgagctgagtcctcgggagcgaagcccagctctcaaaagccccctccagtctgtggtggtgaggcggcggtcaccccgtcctagccccgtgccaaaacctagtcctccactttccagcacatcccagatgggctcaactctgccgagtggtgccgggtatcagtctgggacacaccaaggtcagttcgaccatggttctgggtccctgagtccatccaaaaagagccctgtgggtaagagtccaccatccactggctccacatatggctcatctcagaaggaggagagtgctgcttcaggaggagcagcctatacaaagaggtatctagaagagcagaagacagagaatggaaaagataaggaacagaaacaaacaaataccgataaagaaaaaataaaagagaaagggagcttctctgacacaggcttgggtgatggaaaaatgaaatctgattcttttgctcccaaaactgattctgagaagccttttcggggcagtcagtctcccaaaaggtataagctccgagatgactttgagaagaagatggctgacttccacaaggaggagatggatgatcaagataaggacaaagctaagggaagaaaggaatctgagtttgatgatgaacccaaatttatgtctaaagtcataggtgcaaacaaaaaccaggaggaggagaagtcaggcaaatgggagggcctggtatatgcacctccagggaaggaaaagcagagaaaaacagaggagctggaggaggagtctttcccagagagatccaaaaaggaagatcggggcaagagaagcgaaggtgggcacaggggctttgtgcctgagaagaatttccgagtgactgcttataaagcagtccaggagaaaagctcatcacctcccccaagaaagacctctgagagccgagacaagctgggagcgaaaggagattttcccacaggaaagtcttccttttccattactcgagaggcacaggtcaatgtccggatggactcttttgatgaggacctcgcacgacccagtggcttattggctcaggaacgcaagctttgccgagatctagtccatagcaacaaaaaggaacaggagtttcgttccattttccagcacatacaatcagctcagtctcagcgtagcccctcagaactgtttgcccaacatatagtgaccattgttcaccatgttaaagagcatcactttgggtcctcaggaatgacattacatgaacgctttactaaatacctaaagagaggaactgagcaggaggcagccaaaaacaagaaaagcccagagatacacaggagaatagacatttcccccagtacattcagaaaacatggtttggctcatgatgaaatgaaaagtccccgggaacctggctacaaggctgagggaaaatacaaagatgatcctgttgatctccgccttgatattgaacgtcgtaaaaaacataaggagagagatcttaaacgaggtaaatcgagagaatcagtggattcccgagactccagtcactcaagggaaaggtcagctgaaaaaacagagaaaactcataaaggatcaaagaaacagaagaagcatcggagagcaagagacaggtccagatcctcctcctcttcctcccagtcatctcactcctacaaagcagaagagtacactgaagagacagaggaaagagaggagagcaccacgggctttgacaaatcaagactggggaccaaagactttgtgggtccaagtgaaagaggaggtggcagagctcgaggaacctttcagtttcgagccagaggaagaggctggggcagaggcaactactctgggaacaataacaacaacagcaacaacgattttcaaaaaagaaaccgggaagaggagtgggacccagagtacacacccaaaagcaagaagtattacttgcatgatgaccgtgaaggcgaaggcagtgacaagtgggtgagccggggccggggccgaggagcctttcctcggggtcggggccggttcatgttccggaaatcaagtaccagccccaagtgggcccatgacaagttcagtggggaggaaggggagattgaagacgacgagagtgggacagagaaccgagaagagaaggacaatatacagcccacaaccgagtaggggccacccttgacgggattcctgcccaggggagagaggcgctgggaagatggctggtgaggagcttaacagaggaacctcaagaagattctgaaaatcctacccccaccccccaccagccgcacagattgtactaccgcgagaggcatccctggcgctgtctcccactggacagaggaggctggccatggggcccaggggtcaggcccagcttttgagcagaatacaacgcattgggctttagctgtttttctcatttgttggtgtgtggggtgggggcaggggtagggcgggagagcgatgcttggatttttgtttcctattagaaaccaacagttttgttctaatttcatttcatttggagctaagatgactaatttgatgattttcgatctcttttcccctgtcctgattttaaaagccccctccttttttttttttttttttctttttttaggcatatgtagtaatattagaaacatttaatttgggaaactttgattcttgaaagagaaaacaaaagcatgtgaataaactttgctcgtgcc

SEQ ID NO: 4026 - protein, 955 aa, Homo sapien
MSKTNKSKSGSRSSRSRSASRSRSRSFSKSRSRSRSLSRSRKRRLSSRSRSRSYSPAHNRERNHPRVYQNRDFRGHNRGYRRPYYFRGRNRGFYPWGQYNRGGYGNYRSNWQNYRQAYSPRRGRSRSRSPKRRSPSPRSRSHSRNSDKSSSDRSRRSSSSRSSSNHSRVESSKRKSAKEKKSSSKDSRPSQAAGDNQGDEVKEQTFSGGTSQDTKASESSKPWPDATYGTGSASRASAVSELSPRERSPALKSPLQSVVVRRRSPRPSPVPKPSPPLSSTSQMGSTLPSGAGYQSGTHQGQFDHGSGSLSPSKKSPVGKSPPSTGSTYGSSQKEESAASGGAAYTKRYLEEQKTENGKDKEQKQTNTDKEKIKEKGSFSDTGLGDGKMKSDSFAPKTDSEKPFRGSQSPKRYKLRDDFEKKMADFHKEEMDDQDKDKAKGRKESEFDDEPKFMSKVIGANKNQEEEKSGKWEGLVYAPPGKEKQRKTEELEEESFPERSKKEDRGKRSEGGHRGFVPEKNFRVTAYKAVQEKSSSPPPRKTSESRDKLGAKGDFPTGKSSFSITREAQVNVRMDSFDEDLARPSGLLAQERKLCRDLVHSNKKEQEFRSIFQHIQSAQSQRSPSELFAQHIVTIVHHVKEHHFGSSGMTLHERFTKYLKRGTEQEAAKNKKSPEIHRRIDISPSTFRKHGLAHDEMKSPREPGYKAEGKYKDDPVDLRLDIERRKKHKERDLKRGKSRESVDSRDSSHSRERSAEKTEKTHKGSKKQKKHRRARDRSRSSSSSSQSSHSYKAEEYTEETEEREESTTGFDKSRLGTKDFVGPSERGGGRARGTFQFRARGRGWGRGNYSGNNNNNSNNDFQKRNREEEWDPEYTPKSKKYYLHDDREGEGSDKWVSRGRGRGAFPRGRGRFMFRKSSTSPKWAHDKFSGEEGEIEDDESGTENREEKDNIQPTTE

SEQ ID NO: 4027 - DNA, 2944 bp, Homo sapien
atatgatccgctcggcttcctgggtctggctgctgccgcccgccggtgtccgcccgtgtcgcgccggggcaccaaggagccgttggagggtccgggcggaggcccgctcgtgtggaagtcgtcgacgccgccgctcgtccgtcctcccgtccgttctcgctcccggccgccatcatgctggcgctcatctcccgcctgctggactggttccgttcgctcttctggaaggaagagatggagctgacgctcgtggggctgcagtactcgggcaagaccaccttcgtcaatgtcatcgcgtcaggtcaattcagtgaagatatgatacccacagtgggcttcaacatgaggaaggtaactaaaggtaacgtcacaataaagatctgggacataggaggacaaccccgatttcgaagcatgtgggagcggtattgcagaggagtcaatgctattgtttacatgatagatgctgcagatcgtgaaaagatagaagcttcccgaaatgagctacataatcttctagataaaccacagttacaaggaattccagtgctagtgcttggaaacaagagagatcttcctaatgccttggatgagaaacagctaattgaaaaaatgaatctgtctgctattcaggatagagaaatttgctgctattcaatttcttgcaaagaaaaggataatatagatatcacacttcagtggcttattcagcattcaaaatctagaagaagctgaagcatctcttgaagtcttccagtccttcttggctataatcctagaattattgtccgttcctctgaagtaattcccagaatacggtccttcctaaaccccagaaattgcctttttcagagtctatttctcatgtgcactgctgaagatgaatatccctaatccttcataaagaatcagctagagttgtcatgataaagtcagcacacacaaaaaggcttcttacacataccaaaaaaaatgtcttaaaccatgtgtagagctttaaaaacagaaaaaaaaccccatatacttatgaccatcttaaatcaagaaaattgcatatttccattctggtctttctgggccagatttttatattggttttcagtaaatgtctatctataatatttcattatagagtccagtagcttaatactgacactgacttgatacagcacgaagtttctagtgccacacacagtatttagaaaacctttaggcgtgaatgactcatgtgggatatatgtaaacataatgtttattttatctcacaaatgcatgtgaaatgtataattacatcttaggaatccaaaatggtctgcagagagtgagcggaggcaccagatcaatgttggttctttgcactggtgagattctgcctgatgaatattaaagatatcctgctttctgagaactctatcaccagatggcagttgggatatgggaggaactaaagcatcctgttttgtatctgtccagatcattatttctgtctcttgttttttcttcctggttcaggatacttttttaaggggttgagaattgaagattttccaaaagcgttcatgaatttagagcattccacccaatataataaaacctgttaagaatgtcagtctttgttcaaacatctgtttgttctatctccagtcattaaatcagtgctgctgcatgacactcttaactcctgactttttatatccagtcataaagttgactttcagcacaaaagatacttataaacaaataaaaaatttttatttttctctcttactgatgtaagctttggcactcttttgactggtgccattagacatcttgattattgtgacaactctagacctgcctgctttatctaatgtaatcatgctcaatgtctacaggttgtttaataatcagtcacacagagaactgaggaactgatgctgtttgtttgcttctatgatacagagatgtctaaaaacttcaaatggacatgttttgtagtttagcgacttccgtatacataaagggacatattaatactggttcatttgtaaattattattcatatagaccactgtagtagataaaactctatggtacacctgcttatgtgttgcctcacactgtgtgtgattttgtttcttttgttaagcagcacttatgtagactgcatttccaaatgtgttgagcactcggagtgtagtcaacagtaagttcttttaatgaatatcagttttaatttatagactgccatggccttaaaaatattctgtacaatatactgcactgtgttgcacagacactacttgcttttctccattcatatttttatgagtagaatctgggcttttaaatttctcttcttattctttgaagcatgttgcatactaccctggtgggatggatggttctgtaaatgaagggatatttaaacttgctactgttgttcaacaccattaatggtcagtgtgaaccattacaaagaatgtggcaacttgcttgtgcctaaaaggaggaattggaactagaatgtgtgactctgtggggactgcataggtttgttaattgacctatagctaaaccttaatgtgtttgtgtgtctatacattgctttccgcatttcaagacatccagacgctattaccaacattttcctgtgcattaacctctgcatgtgaaaacttttaacagttactgaactatgtaaatatgtgaatttttttatttaggtggatgcattttttgtctgtttactgctcttctcagctttattcaataaacttgcattttaagggttgtattggcaattttaacttaaaatgtgcatcatgatggaaggtgcagacttttttggaagtttccgagaggagggtctatagaccatttgtcagaaatcagatcagccctcaaagaatggggtctgtgggctagttaaaatagaaataaacttttaaaatatccacag

SEQ ID NO: 4028 - protein, 186 aa, Homo sapien
MLALISRLLDWFRSLFWKEEMELTLVGLQYSGKTTFVNVIASGQFSEDMIPTVGFNMRKVTKGNVTIKIWDIGGQPRFRSMWERYCRGVNAIVYMIDAADREKIEASRNELHNLLDKPQLQGIPVLVLGNKRDLPNALDEKQLIEKMNLSAIQDREICCYSISCKEKDNIDITLQWLIQHSKSRRS

SEQ ID NO: 4029 - DNA, 716 bp, Homo sapien
gagcggcacagacgagatctcgatcgaaggcgagatggcggacgtgctagatcttcacgaggctgggggcgaagatttcgccatggatgaggatggggacgagagcattcacaaactgaaagaaaaagcgaagaaacggaagggtcgcggctttggctccgaggggtcccgagcgcggatgcgtgaggattatgacagcgtggagcaggatggcgatgaacccggaccacaacgctctgttgaaggctggattctctttgtaactggagtccatgaggaagccaccgaagaagacatacacgacaaattcgcagaatatggggaaattaaaaacattcatctcaacctcgacaggcgaacaggatatctgaaggggtatactctagttgaatatgaaacatacaaggaagcccaggctgctatggagggactcaatggccaggatttgatgggacagcccatcagcgttgactggtgttttgttcggggtccaccaaaaggcaagaggagaggtggccgaagacgcagcagaagtccagaccggagacgtcgctgacaggtcctctgttgtccaggtgttctcttcaagattccatttgaccatgcagccttggacaaataggactggggtggaacttgctgtgtttatatttaatctcttaccgtatatgcgtagtatttgagttgcgaataaatgttccatttttgttttctac

SEQ ID NO: 4030 - protein, 173 aa, Homo sapien
MADVLDLHEAGGEDFAMDEDGDESIHKLKEKAKKRKGRGFGSEGSRARMREDYDSVEQDGDEPGPQRSVEGWILFVTGVHEEATEEDIHDKFAEYGEIKNIHLNLDRRTGYLKGYTLVEYETYKEAQAAMEGLNGQDLMGQPISVDWCFVRGPPKGKRRGGRRRSRSPDRRRR

SEQ ID NO: 4031 - DNA, 4113 bp, Homo sapien
tgaggcgcgggaggcccgcgccccgcggctcgctgtgcgtgggagggcgcgagcgaacgcgggcgaggagcggccgagccgctgaagaggagctgggcgccggccgcccggccgcgctcggcccgcggatcgcctccgcccggtcttcgccggccccggcccctggcgagatgccgtgtggggaggattggctcagccacccgctgggaatcgtgcagggattcttcgcccaaaatggagttaatcctgactgggagaagaaagtaattgagtattttaaggaaaagctgaaggaaaataatgctcctaagtgggtaccatcactgaacgaagttccccttcattatttgaaacctaatagttttgtgaaatttcgttgcatgattcaggatatgtttgaccctgagttttacatgggagtttatgaaacggttaaccaaaacacaaaagcacatgttcttcattttggaaaatatagagatgtagcagagtgtgggcctcaacaagaacttgatttaaactctccacgaaataccactttggaaagacagactttctattgtgttccggtgcctggggaatctacgtgggtaaaagaagcctatgttaatgcaaaccaagctcgagtcagtccctcaacatcctacactcctagtcgccacaagaggagttatgaagatgatgacgatatggacctacagcccaataagcagaaagaccaacatgcaggtgccagacaagcagggagtgttggtggtcttcaatggtgtggagagccaaaacgtttagaaactgaagcttctactgggcaacagctgaactctctgaacttgtcttctccttttgatttgaattttccattgccaggagagaagggccctgcatgccttgtgaaggtttatgaagattgggattgtttcaaagtaaatgacattcttgagctatatggcatactgtctgtggatcctgtgctgagtatactgaataatgatgaaagggatgcctctgcactgctggatccgatggagtgcacagacacagcagaggagcagagagtacacagtcctcctgcttcattagtgccgagaattcatgtgatcttagcccagaagttgcaacacatcaacccattattgcctgcctgccttaacaaagaggagagcaaaacctgtaagtttgtttcaagtttcatgtccgaattgtctccagtcagagcagaacttcttgggttccttactcatgcccttctgggggatagtttggctgctgaataccttatattacatctcatctccacagtatatacaagaagagatgtccttccactaggaaaatttacagttaacttgagtggttgcccacggaatagtaccttcacagaacacttgtatcgaattattcaacatcttgttccagcatcttttcgtctgcagatgactatagagaacatgaaccatttgaaattcattccccacaaagactacacagccaatcgcttggtcagtgggctcctccagctgcccagcaatacttcccttgtaatcgatgagactctcctggaacaggggcagctggataccccaggtgttcataatgtgacagccctgagcaacctcataacgtggcagaaggtggattatgacttcagctaccatcagatggaattcccctgcaatattaacgttttcattacttcggaggggaggtcactcctcccggcagactgccagattcacttacagccccagctaattccaccaaacatggaggagtacatgaacagccttctctcagcggtgctgccttccgtgctgaacaaattccgcatttatctaactcttttgagattcttggaatatagcatatctgatgaaataaccaaggcagttgaagatgactttgtggaaatgcggaagaacgaccctcagagcatcactgctgatgatcttcaccagctgctcgtggtggctcggtgtctgtctctcagtgctggtcagacaacgctgtcaagagaacgatggctgagagcaaagcagctagagtctttaagaagaacgaggcttcagcagcaaaaatgtgtgaatggaaatgaactttaaagatgtaatacctatgaagagtaatgggcaaactgtagccacataattgtaaaattcagatattcatttataccacattgttttataggtaatttctatcacaaaccagtgacatttcctgaaatcaagcctggtaacacctgatgtttatatgatattcagtaaggacttttaccttactgatttcatggagcttttgaagtttgttttataataattatataaattagtaatgatgtaaaaaaagtatttgatattaaaagtttaatattgataatgttgctgattgtaccatttccttagcttcagctgagtcataggccagactgttgaaatgctgaaatgaagaaggttgttgcagtttcaaagtcagaggaatcgtgcttcggatttcttatgttttctagttctctgtttttccagttcacagtgggttggggtgcattcagtagtccatctttggggaacggaggcgtacttgccattgattcacatgactacatgaaattctgtactgtcatttcccagatgtttggccacagaaactttttcccacttaacatttgttaacagcctgcaaaactaaacttgtacatggcagtggttcccagacttttgtattttatggaccggtagtaatatttccaaaaatctggggtactataaggttgccaatttaccttgccaagtaatccgaataaatcactgtattatcaccatttttttcataaaaggaaaggacaatctatctctgaataagaggagtcctttaaacggaatgaatgtggcttttgggggcaaaagaaaccaagacactacattgtctttattttctcctatcccagtgcatttgagaaccatgcataagggaatgctgtgctacaaagctgtgcccaaatatgaaaacaaaataggaaacttaaaaagcaataccccctttagaaagtttttattttcttaaatgtcattgagttgctttgattctattggatttttggcattttttatgggatcatcagttggttccaagtatgttagatcagctaacatctgctactccagtaacagcctcgtacaactgcaggtaggttttctccagaccaattagttttaatagagcaaactaacaacagactgtagtagcatggttatggcaaccagaatcttcagaaaggttaggacattactttttaagctgtcagtggtatcaaataacttacctagttggaggcagataaaggatcccttacgttttttcctataaggcctaaattgaaattgttaaccaaggaaacagggtcagccttgaaaaatcaaggaattcattgtacctaataactgaagtaaaaataactagttgttcaacttttcctaaactcaaatctatttttataaacaaatgtaaataatgtttatattagagttgaactggttttcatttttataactggtagactagaccttccttaaacttttagaaataaaatgaaggcttcactggatttgtgaggataaaatacattttctttaattgtcctagagcaaagtacattagtcaccatgtgttttttgtgccaatgtaacttgtaatttaccaaagaaaaatacatacattgcttggtcttgcagaaaagttcccttgaaagaacctttccaataaataaaacgtcccaaattagcagtaccttgggctgtttttcatgagtaagaagattcaccatcccatgtgatctgtgtggaaaaagaccatgtcctcttggtggaagacatgagagagctgaactgaagtggaggaggtggtgcaagagggaccttcctgctcaaggcccgcccaggcagcggaatagagtgcagtgcttggctgcagaaaccctttgtccctcacctatatatacacggacagtcaagtttgttgctctaacgtaaggcacagcgttaatcctgtatggccaggaaactgagtagactcctgtgtaaccctgtttggaactttgccttcttaaaatgatttttc

SEQ ID NO: 4032 - protein, 642 aa, Homo sapien
MPCGEDWLSHPLGIVQGFFAQNGVNPDWEKKVIEYFKEKLKENNAPKWVPSLNEVPLHYLKPNSFVKFRCMIQDMFDPEFYMGVYETVNQNTKAHVLHFGKYRDVAECGPQQELDLNSPRNTTLERQTFYCVPVPGESTWVKEAYVNANQARVSPSTSYTPSRHKRSYEDDDDMDLQPNKQKDQHAGARQAGSVGGLQWCGEPKRLETEASTGQQLNSLNLSSPFDLNFPLPGEKGPACLVKVYEDWDCFKVNDILELYGILSVDPVLSILNNDERDASALLDPMECTDTAEEQRVHSPPASLVPRIHVILAQKLQHINPLLPACLNKEESKTCKFVSSFMSELSPVRAELLGFLTHALLGDSLAAEYLILHLISTVYTRRDVLPLGKFTVNLSGCPRNSTFTEHLYRIIQHLVPASFRLQMTIENMNHLKFIPHKDYTANRLVSGLLQLPSNTSLVIDETLLEQGQLDTPGVHNVTALSNLITWQKVDYDFSYHQMEFPCNINVFITSEGRSLLPADCQIHLQPQLIPPNMEEYMNSLLSAVLPSVLNKFRIYLTLLRFLEYSISDEITKAVEDDFVEMRKNDPQSITADDLHQLLVVARCLSLSAGQTTLSRERWLRAKQLESLRRTRLQQQKCVNGNEL

SEQ ID NO: 4033 - DNA, 6409 bp, Homo sapien; identical to SEQ ID NO: 3336

SEQ ID NO: 4034 - protein, 1371 aa, Homo sapien; identical to SEQ ID NO: 3337

SEQ ID NO: 4035 - DNA, 1706 bp, Homo sapien
tgttcttgagcccagcttcttctcgtctcccaccccagcttcccggcattggaagaagggaccgtcctcttccttgtcttggccacccaaatcctggtatcgaaagggttgaacggaccggaagtgtgcagcagcgacgggtccccagctaatcgacgccggaagtagcaattactagacaagcattccgccgccggcttcgctatggcggcaattcccccagattcctggcagccacccaacgtttacttggagaccagcatgggaatcattgtgctggagctgtactggaagcatgctccaaagacctgtaagaactttgctgagttggctcgtcgaggttactacaatggcacaaaattccacagaattatcaaagacttcatgatccaaggaggtgacccaacagggacaggtcgaggtggtgcatctatctatggcaaacagtttgaagatgaacttcatccagacttgaaattcacgggggctggaattctcgcaatggccaatgcggggccagataccaatggcagccagttctttgtgaccctcgcccccacccagtggcttgacggcaaacacaccatttttggccgagtgtgtcagggcataggaatggtgaatcgcgtgggaatggtagaaacaaactcccaggaccgccctgtggacgacgtgaagatcattaaggcatacccttctgggtagacttgctaccctcttgagcagctcttctgagatggccccagtgaaccagcttctagatgacatagaatgacatgtaatgctaaatttcattttggctttgcaagtcatgaagcttaggaggcctggcatcttgggtgagttagagatggaagtacattttaataggatgcttcttttctcttcccccagtgcctaggttgccagagcatttgcacaaatgcccctgtttatcaataggtgactacttactacacatgaaccataatgctgcttcttgtgcatgtctgctctgatatacgtcgaacaatgtagcagccactgtcatttctcagtggttttgcctaaccaaacttcttcctaaggagatttatattctggcctacacagcagtccttgatggctgacagccacagaattccaaaccaagtagtgtctgtcagccctcttaactctgtgcacgccctatttcagtcttttacatttgttcttctagggaatgtatgcatctctatatatattttccctctcaaaaccagaacatcaacagtgctgtttctgacacttcagacatcccacgcaaagccacattgaatttttgccaaatgaaaaacacatccaacaatcaagtttctaagaaggtgtcaagtggggaataataataatgtataataatcaagaaattagtttattaaaaggaagcagaagcattgaccattttttcccagagaagaggagaaatctgtagtgagcaaaggacagaccatgaatcctccttgagaagtagtactctcagaaaggagaagcgccactcaagttcttttaacccaagactttagagaaattaggtccaagatttttatatgttcagttgtttatgtataaaaataactttctggattttgtggggaggagcaggagaggaaggaagttaatacctatgtaatacatagaaacttccacaataaaatgccattgatggttgaaaaaaaaaaaaaaaaaaa

SEQ ID NO: 4036 - protein, 166 aa, Homo sapien
MAAIPPDSWQPPNVYLETSMGIIVLELYWKHAPKTCKNFAELARRGYYNGTKFHRIIKDFMIQGGDPTGTGRGGASIYGKQFEDELHPDLKFTGAGILAMANAGPDTNGSQFFVTLAPTQWLDGKHTIFGRVCQGIGMVNRVGMVETNSQDRPVDDVKIIKAYPSG

SEQ ID NO: 4037 - DNA, 3390 bp, Homo sapien
ctcggcttctccagcttcggtaggagaggatccggcgccgaatcactgactggcacaggtgttgggaaaatgatccacagtctatttctcataaactgttccggtgacatatttctagagaagcactggaagagcgttgtgagccagtctgtctgtgattatttctttgaagctcaagagaaagctgctgatgttgaaaatgtaccacctgtcatttcaacacctcaccactacctcatcagtatctaccgggataagctcttctttgtatctgtcatacagaccgaagtgccacctctctttgtaattgagttcctacatcgagttgctgacacttttcaggactactttggtgagtgttcagaggctgcaattaaggataatgtggtcatagtatatgaactcttagaagaaatgttagacaatggatttccactggctaccgaatctaacattttgaaagaattgattaaaccaccaacaattctacgctctgttgtcaactctattacaggcagtagtaatgttggggacacactccccaccgggcagctgtccaacataccatggcgtcgggcaggggtaaagtacacaaacaatgaagcctattttgatgttgttgaagaaatagacgcaattatagataaatcaggatctacagtctttgcagaaattcagggggtcattgatgcttgcattaaactatctggaatgcctgatctctccctttctttcatgaaccctaggcttctggatgatgtcagctttcacccctgcatccggttcaagcgttgggaatctgaaagagttttgtcatttattcctccagatggaaatttccgactcatatcataccgtgtcagctcacaaaatctagtggcaataccagtgtatgtgaaacatagtatcagctttaaggagaacagttcttgcggcagatttgatataacaattggaccaaagcagaatatggggaaaactattgaaggaattacagtgacagttcacatgccaaaagttgtgctgaacatgaacctgacacccacacaaggcagctatacatttgatccagtcaccaaggtactaacatgggatgtgggaaaaattactccacaaaagctcccaagtcttaaaggactggtaaatttacagtctggagcccccaaaccagaagagaatccgagcctcaacatacagtttaagatccagcagcttgctatttcaggcttaaaagtaaaccgtttggacatgtatggggagaaatataagccatttaaaggagtcaaatacgtcacgaaagctggaaagttccaagtgaggacatgagaagaggccaaaattcctcaggaccagtttgttttccaagtgtcattacgatgtatcactattaggtaccaagtgagtgggaatacatattctagttaaagcatttgtgtctagctacacaccgctaacaaagttacttagttatcaatgtaggattcttaaggagctttaagctaaggaaaccttttagtgacttagcttattttgtatcttttcacttaggaagattttggaggtgatttttttccataggaggataccatctggcggctgcacattgtaacagtaaaggcagaaagctgtagtgataacctctctcctaaaagagttaactggtctcatccagcagaagctatcttaaatctgtgatgtgtcaggtgcagccaaatatcacaccttctgatcttagccatcccaaaccagtatctgtcccaagagaggaaattccccccacccccagaagtttacagaaaactgcctcttcaagtgtttgccttattcagcttttcacttgtgccattaagcaagcactgtagcaaaagccacttccacatggccctggcagggagcactgctgctccatgctccattctcactgtacttggtattgtattttttataaataagatttttatgtaaagcttagaatttgatttacagggaccttgctgcagtaaataccatctcaattttgtgccactggttcagctgttagcacagtaaaaaaatcatttgtatcaaaggggcaaatgctttattaaggtagtaaaagggaacattacttctgcttttaggaagttactgcaagcacaagcatttgtgcttttaagcaaattaaagtagtaaaagaaaaacttaagtgaaacctttgccatcttcatgttttataatataaagcttacccaacaccagttaagccatggttaacctaaatgcctcatgccccagttcagcaaaaggaggaaaatgtgcctgcctcacagtcatcagtctttttaaatcttttttgttgttgttcttaagggtttgaatttgtctgcattccttgtctttaggggaaattcccttttcatattgtgtgcttcccaaagctatagtcatagatttcttccagaaactattgtcataattgtcactggagtgcttaaatatacgtactatactgacaaaatacatggaagtgagttataatgaggcagaaacaaaatcctcggtaacattgatgatactctaccgatcaccgtggttttggaaagtcagtcaacagttgtattattgcactcaatttcattgtgacattttatttaacttcttcatcttggtggtccttgcccagttattttgcctcattagacatcaagaaatggagaaagactgaaagttaatatcttaagtgcttgttcttcatgtttccttcttgttatttatgctattctctttgtggctccattcttctttcaatcttctcagcttataaccgtctttcccttatgctaaggatagcccttacactcatcccatctatgctgtcaagggctgctggttggtgctggtacaaggagcccactcagcagttttcttacctttgcctgccctgcctttcatggaataagaaaggcaacgttttgcagcttccaaatttctgaagaaactaatctcagattggcagttaaagtcaaaatgttgccaaatatttattccttttgcctaagtttggctacccggttcaattgctttttatttttaatgtcttgactcttcagagttcgtacctcaaaagaacaatgagaacatttgctttgctttctgctgaatccctaatctcaacaatctatacctggactgtccagttctcctcctgtgctatcttctcttctatccaagtagaatgtatgccaggagctccttccctctagcaatttctactaaaatgtccaagtagaatgtttccttttacaatcaaattactgtatttattaatttgctagaatccagtaaatcattttggtagctctggctgtgctatcaataaaaagatgaaagcaaaaaaaaaaaaaaaaaaaa

SEQ ID NO: 4038 - protein, 418 aa, Homo sapien
MIHSLFLINCSGDIFLEKHWKSVVSQSVCDYFFEAQEKAADVENVPPVISTPHHYLISIYRDKLFFVSVIQTEVPPLFVIEFLHRVADTFQDYFGECSEAAIKDNVVIVYELLEEMLDNGFPLATESNILKELIKPPTILRSVVNSITGSSNVGDTLPTGQLSNIPWRRAGVKYTNNEAYFDVVEEIDAIIDKSGSTVFAEIQGVIDACIKLSGMPDLSLSFMNPRLLDDVSFHPCIRFKRWESERVLSFIPPDGNFRLISYRVSSQNLVAIPVYVKHSISFKENSSCGRFDITIGPKQNMGKTIEGITVTVHMPKVVLNMNLTPTQGSYTFDPVTKVLTWDVGKITPQKLPSLKGLVNLQSGAPKPEENPSLNIQFKIQQLAISGLKVNRLDMYGEKYKPFKGVKYVTKAGKFQVRT

SEQ ID NO: 4039 - DNA, 1745 bp, Homo sapien
accacgcgtctcatccatggcttccgcggactcgcgccgggtggcagatggcggcggtgccgggggcaccttccagccctacctagacaccttgcggcaggagctgcagcagacggacccaacgctgttgtcagtagtggtggcggttcttgcggtgctgctgacgctagtcttctggaagttaatccggagcagaaggagcagtcagagagctgttcttcttgttggcctttgtgattccgggaaaacgttgctctttgtcaggttgttaacaggcctttatagagacactcagacgtccattactgacagctgtgctgtatacagagtcaacaataacaggggcaatagtctgaccttgattgaccttcccggccatgagagtttgaggcttcagttcttagagcggtttaagtcttcagccggggctattgtgtttgttgtggatagtgcagcattccagcgagaggtgaaagatgtggctgagtttctgtatcaagtcctcattgacagtatgggtctgaagaatacaccatcattcttaatagcctgcaataagcaagatattgcaatggcaaaatcagcaaagttaattcaacagcagctggagaaagaactcaacaccttacgagttacccgttctgctgcccccagcacactgtacagttccagcactgcccctgctcagctggggaagaaaggcaaagagtttgaattctcacagttgcccctcaaagtggagttcctggagtgcagtgccaagggtggaagaggggacgtgggctctgctgacatccaggacttggagaaatggctggctaaaattgcctgagaggcagctctaaagcacaagacctggatgtgtgacacacagttttggaaaaaggtctgtggtagtctggagttgatgaggaaggggtacaagatgtggttagaaacatttctttgttctggaaacaaagtactgttgaaaccagcttggaattttttttttttttttttttaagttcagttctcccttatggctgcctttcaaacaagtaccttttatctgatgcctgtatcttccctttgttaaggtgtaacttgatgtagggtcaaggtttttgtgacaacaggcagactccacacagagaggatatgatgagaatatggccatcacctgaaaagttttcttatcttctgtgcttttggtccctggaaacaaatccgcctatgtatgaagctagttgatttccagttgcactatttccagttgcctctgaagttcacaggcaatacattgtctagtcctttgcgaatttctctgatttgtgggcacagttatgaagtttccccacatgtgaagacaggtacaaaatagcagagccaagcagacagtgggtctattcttcattagctcagtgacttgtccacactcgtcttagcacttacgtttcaaaagcttgtcacaaacccttggagtcattcccagataatagaactggaaatgataaatcccctaatgccaagggtctagtgtgttcttagtggttatactgggaagtgtgtggagatttaggtgctgctctgctgctctggatggctgaaggctcctgggccatcttcatgtgctgcttgaagagctcctattttgtactcctggctagaatgctgtggaacaaatacaaagtgaaaaaagttctctgtagatttctgaagtgcatattcattgatgccaagaaaaaaaaaaagttgcctttttg

SEQ ID NO: 4040 - protein, 271 aa, Homo sapien
MASADSRRVADGGGAGGTFQPYLDTLRQELQQTDPTLLSVVVAVLAVLLTLVFWKLIRSRRSSQRAVLLVGLCDSGKTLLFVRLLTGLYRDTQTSITDSCAVYRVNNNRGNSLTLIDLPGHESLRLQFLERFKSSAGAIVFVVDSAAFQREVKDVAEFLYQVLIDSMGLKNTPSFLIACNKQDIAMAKSAKLIQQQLEKELNTLRVTRSAAPSTLYSSSTAPAQLGKKGKEFEFSQLPLKVEFLECSAKGGRGDVGSADIQDLEKWLAKIA

SEQ ID NO: 4041 - DNA, 3033 bp, Homo sapien
gaaggctgcctcgctggtccgaattcggtggcgccacgtccgcccgtctccgccttctgcatcgcggcttcggcggcttccacctagacacctaacagtcgcggagccggccgcgtcgtgagggggtcggcacggggagtcgggcggtcttgtgcatcttggctacctgtgggtcgaagatgtcggacatcggagactggttcaggagcatcccggcgatcacgcgctattggttcgccgccaccgtcgccgtgcccttggtcggcaaactcggcctcatcagcccggcctacctcttcctctggcccgaagccttcctttatcgctttcagatttggaggccaatcactgccaccttttatttccctgtgggtccaggaactggatttctttatttggtcaatttatatttcttatatcagtattctacgcgacttgaaacaggagcttttgatgggaggccagcagactatttattcatgctcctctttaactggatttgcatcgtgattactggcttagcaatggatatgcagttgctgatgattcctctgatcatgtcagtactttatgtctgggcccagctgaacagagacatgattgtatcattttggtttggaacacgatttaaggcctgctatttaccctgggttatccttggattcaactatatcatcggaggctcggtaatcaatgagcttattggaaatctggttggacatctttattttttcctaatgttcagatacccaatggacttgggaggaagaaattttctatccacacctcagtttttgtaccgctggctgcccagtaggagaggaggagtatcaggatttggtgtgccccctgctagcatgaggcgagctgctgatcagaatggcggaggcgggagacacaactggggccagggctttcgacttggagaccagtgaaggggcggcctcgggcagccgctcctctcaagccacatttcctcccagtgctgggtgcacttaacaactgcgttctggctaacactgttggacctgacccacactgaatgtagtctttcagtacgagacaaagtttcttaaatcccgaagaaaaatataagtgttccacaagtttcacgattctcattcaagtccttactgctgtgaagaacaaataccaactgtgcaaattgcaaaactgactacattttttggtgtcttctcttctcccctttccgtctgaataatgggttttagcgggtcctaatctgctggcattgagctggggctgggtcaccaaacccttcccaaaaggaccttatctctttcttgcacacatgcctctctcccacttttcccaacccccacatttgcaactagaaaaagttgcccataaaattgctctgcccttgacaggttctgttatttattgacttttgccaaggctggtcacaacaatcatattcacgttattttccccttttggtggcagaactgttaccaatagggggagaagacagccacggatgaagcgtttctcagcttttggaattgcttcgactgacatccgttgttaaccgtttgccactcttcagatattttttataaaaaaagtaccactgagttcatgagggccacagattggttattaatgagatacgagggttggtgctgggtgtttgtttcctgagctaagtgatcaagactgtagtggagttgcagctaacatgggttaggtttaaaccatgggggatgcacccctttgcgtttcatatgtagccctactggctttgtgtagctggagtagttgggttgctttgtgttaggaggatccagatcatgttggctacagggagatgctctctttgagaggtcctgggcattgattcccatttcaatctcattctggatatgtgttcattgagtaaaggaggagagaccctcatacgctatttaaatgtcacttttttgcctatcccccgttttttggtcatgtttcaattaattgtgaggaaggcgcagctcctctctgcacgtagatcattttttaaagctaatgtaagcacatctaagggaataacatgatttaaggttgaaatggctttagaatcatttgggtttgagggtgtgttattttgagtcatgaatgtacaagctctgtgaatcagaccagcttaaatacccacacctttttttcgtaggtgggcttttcctatcagagcttggctcataaccaaataaagttttttgaaggccatggcttttcacacagttattttattttatgacgttatctgaaagcagactgttaggagcagtattgagtggctgtcacactttgaggcaactaaaaaggcttcaaacgttttgatcagtttcttttcaggaaacattgtgctctaacagtatgactattctttcccccactcttaaacagtgtgatgtgtgttatcctaggaaatgagagttggcaaacaacttctcattttgaatagagtttgtgtgtacttctccatatttaatttatatgataaaataggtggggagagtctgaaccttaactgtcatgttttgttgttcatctgtggccacaataaagtttacttgtaaaattttagaggccattactccaattatgttgcacgtacactcattgtacaggcgtggagactcattgtatgtataagaatatttctgacagtgagtgacccggagtctctggtgtaccctcttaccagtcagctgcctgcgagcagtcattttttcctaaaggtttacaagtatttagaacttttcagttcagggcaaaatgttcatgaagttattcctcttaaacatggttaggaagctgatgacgttattgattttgtctggattatgtttctggaataattttaccaaaacaagctatttgagttttgacttgacaaggcaaaacatgacagtggattctctttacaaatggaaaaaaaaaatccttattttgtataaaggacttccctttttgtaaactaatcctttttattggtaaaaattgtaaattaaaatgtgcaacttg

SEQ ID NO: 4042 - protein, 251 aa, Homo sapien; identical to SEQ ID NO: 3680

SEQ ID NO: 4043 - DNA, 2255 bp, Homo sapien
ggcactgcagcaccagccgtctgcagctccggccgccacttgcgcctctccagcctccgcaggcccaaccgccgccagcaccatggccagcaccatttccgcctacaaggagaagatgaaggagctgtcggtgctgtcgctcatctgctcctgcttctacacacagccgcaccccaataccgtctaccagtacggggacatggaggtgaagcagctggacaagcgggcctcaggccagagcttcgaggtcatcctcaagtccccttctgacctgtccccagagagccctatgctctcctccccacccaagaagaaggacacctccctggaggagctgcaaaagcggctggaggcagccgaggagcggaggaagacgcaggaggcgcaggtgctgaagcagctggcggagcggcgcgagcacgagcgcgaggtgctgcacaaggcgctggaggagaataacaacttcagccgccaggcggaggagaagctcaactacaagatggagctcagcaaggagatccgcgaggcacacctggccgcactgcgcgagcggctgcgcgagaaggagctgcacgcggccgaggtgcgcaggaacaaggagcagcgagaagagatgtcgggctaagggcccgggacgggcggcgcccatcctgcgacagaacacgttcgggttttggttttgtttcgttcacctctgtctagatgcaacttttgttcctcctcccccacccccgcccccagcttcatgcttctcttccgcactcagccgccctgccctgtcctcgtggtgagtcgctgaccacggcttcccctgcaggagccgccgggcgtgagacgcggtccctcggtgcagacaccaggccgggcgcggctgggtcccccgggggccctgtgagagaggtggcggtgaccgtggtaaacccagggcggtggcgtgggatcacgggtccttacgctgggctgtctggtcagcacgtgcaggtcagggcaggtcctctgagccggcgcccctggccagcaggcgaggctacagtacctgctgtctttccagggggaaggggctccccatgagggaggggcgacgggggaggggggtgatggtgcctgggagcctgcgtgtgcagccggtgcttgttgaactggcaggcgggtgggtgggggctgcagctttccttaatgtggttgcacaggggtcctctgagaccacctggcgtgaggtggacaccctgggccttcctggaagcctgcagttgggggcctgccctgagtctgctggggagtgggcattctctgccagggacccatgagcaggctgcatggtctagaggttgtgggcagcatggacagtcccccactcagaagtgcaagagttccaaagagcctctggcccaggcccctccccaccagggctttgcagatgtccttgaaagacccaccctagagccctttggagtgctggcccctcctgtgccctctgccctggtggaagcggcagccacaagtcctcctcagggagccccaagggggattttgtgggaccgctgcccacagatccaggtgttggaagggcagcgggtaaggttcccaagccagccccaacacccttcccacttggcacccagagggggctgtgggtggaggcctgactccaggcctctcctgcccacaccctctgggctgagttccttctttcccttggacgcccagtgctggccttggaggacggtcagctggaggatggcggtgggggaggctgtctttgtaccactgcagcatcccccacttctccacggaagccccatcccaaagctgctgcctggccccttgctgtaaagtgtgaagggggcggctgagttctcttaggacccagagccagggccctcaacttccatcctgcgggaggccttggccgggcactgccagtgtcttccagagtcacacccagggaccacgggaggatcctgacccctgcagggctcaggggtcagcagggacccactgccccatctccctctccccaccaagacagccccagaaggagcagccagctgggatgggaacccaaggctgtccacatctggcttttgtgggactcagaaagggaagcagaactgagggctgggatattcctcatggtggcagcgctcatagcgaaagcctactgtaatatgcacccatctcatccacgtagtaaagtgaacttaaaaattcaatcaaatgaacaattaaataaacacctgtgtgtttaagacatg

SEQ ID NO: 4044 - protein, 180 aa, Homo sapien
MASTISAYKEKMKELSVLSLICSCFYTQPHPNTVYQYGDMEVKQLDKRASGQSFEVILKSPSDLSPESPMLSSPPKKKDTSLEELQKRLEAAEERRKTQEAQVLKQLAERREHEREVLHKALEENNNFSRQAEEKLNYKMELSKEIREAHLAALRERLREKELHAAEVRRNKEQREEMSG

SEQ ID NO: 4045 - DNA, 4323 bp, Homo sapien
gccgggggtgagggctcgcgctccgggagctgcacggggctgcgtggaaagagcgccgagcggtggcgtcgttgtcgccccctcctcgtcgggaagaatcgtttggtctcctgccgtgcccggttcgtattccctactccctgccacgagccgccccgtccgggatcctccacccgtccaaagttgtgagggggcgccgggcgtgctcgcggatcggcggccgcgggcgtgcggagggctggacgagccctggagcgccaggaatcccagtcagaagttccagcctgccactgttctctgatgccatgccagcaccaactcaactgttttttcctctcatccgtaactgtgaactgagcaggatctatggcactgcatgttactgccaccacaaacatctctgttgttcctcatcgtacattcctcagagtcgactgagatacacacctcatccagcatatgctaccttttgcaggccaaaggagaactggtggcagtacacccaaggaaggagatatgcttccacaccacagaaattttacctcacacctccacaagtcaatagcatccttaaagctaatgaatacagtttcaaagtgccagaatttgacggcaaaaatgtcagttctatccttggatttgacagcaatcagctgcctgcaaatgcacccattgaggaccggagaagtgcagcaacctgcttgcagaccagagggatgcttttgggggtttttgatggccatgcaggttgtgcttgttcccaggcagtcagtgaaagactcttttattatattgctgtctctttgttaccccatgagactttgctagagattgaaaatgcagtggagagcggccgggcactgctacccattctccagtggcacaagcaccccaatgattactttagtaaggaggcatccaaattgtactttaacagcttgaggacttactggcaagagcttatagacctcaacactggtgagtcgactgatattgatgttaaggaggctctaattaatgccttcaagaggcttgataatgacatctccttggaggcgcaagttggtgatcctaattcttttctcaactacctggtgcttcgagtggcattttctggagccactgcttgtgtggcccatgtggatggtgttgaccttcatgtggccaatactggcgatagcagagccatgctgggtgtgcaggaagaggacggctcatggtcagcagtcacgctgtctaatgaccacaatgctcaaaatgaaagagaactagaacggctgaaattggaacatccaaagagtgaggccaagagtgtcgtgaaacaggatcggctgcttggcttgctgatgccatttagggcatttggagatgtaaagttcaaatggagcattgaccttcaaaagagagtgatagaatctggcccagaccagttgaatgacaatgaatataccaagtttattcctcctaattatcacacacctccttatctcactgctgagccagaggtaacttaccaccgattaaggccacaggataagtttctggtgttggctactgatgggttgtgggagactatgcataggcaggatgtggttaggattgtgggtgagtacctaactggcatgcatcaccaacagccaatagctgttggtggctacaaggtgactctgggacagatgcatggccttttaacagaaaggagaaccaaaatgtcctcggtatttgaggatcagaacgcagcaacccatctcattcgccacgctgtgggcaacaacgagtttgggactgttgatcatgagcgcctctctaaaatgcttagtcttcctgaagagcttgctcgaatgtacagagatgacattacaatcattgtagttcagttcaattctcatgttgtaggggcgtatcaaaaccaagaatagtgagtggctctttcactggcaattctcaaatgatacacatttaaagggcagattttttaaaaagatactactataataaacatttccagttggtcattctaagcatttacccttttgatactctagctagtcaggtactccaaattgactttgcagcagggtggcagggtcaggagagtctggtcctgcctagctcagatttcatggcacctgcacttgaagcaagtcacttctttatcacaggtgtcttgaaacattagcttcttttaccaacctgagaaaattaggatgacctggcaaataagatcttgaataggccaaaagcaagtatcttgctgtgtgtagtctcttggttaaagtgaagaaacagtactgttcacacctttcttcactgagattccagtgtacatgagaacatatatttattgcatgattttctagatacacagtctatgcattattcatatacatttattttagcctaaagtggttttcaaatccagttcttcaagccataaatgaccaagatccaagcaatctgaatttgtttttgtgattatttgactggaatgcttcttaagtggaataactatactccgttatccacccgatttcctaatgtaattgaaacattttctattttgccacacacttggagacaataagggtttttagttttatctactcttctattgaagttaaagaaagaaaaaaagatttttttatttgtattaatgaaaagctttagtttaaaataaggagatccagaataaaaagaagagactgatctcttcaattattgtcatctgtagccaccagcacatcactcttatgtaatccccaaaggcttggcatgccgtaagtgtgtggtgggtagactgctgccggggaatcgtacttcttatttagtaatgataagacttttcattatttttggaattttaaagatgacataaataagtttaaatatcaatttggggagtaaggtttaatattgccatcgggtattgagacaggaggaagtttctgtttttctccatttagacataggtcaattaaaatatttgggtttaaaatgactaaatgctttaaacatattgtagcttaagatatatgtgttaagatatatacatgagaaactttaaaaggtaactactgtgcatgcctgatgcttaatagaatacttagtggcatcaaatgtttgcagcagtctccataattatattcagtcccttctaatactgtatcaatgtaaatgaaataaatatattcaaattggctttttgatatgcatcaagtggcattttgttcctgtgtttaatagtgatctgtatacagctgtgcacatattgtcatcacttattctagcatcactgttaaggctgtgattatgtttgatattcacctggattttaatacaagccaatatcagcttcccattgtgtaataacttgggtgtttaggagtcttttcacattttttggggatatgaactagatgttcaagaactccttctggactgtggatactgaatcagtgtactattggctgcagaatttgtttcaattgaaaatagactcaggaagattgctgctcagaatatcatataatgtttattttttgaggtgtttttgtttttatttgtgtgttttttttttaagtcagcttggaacttttttcctgggtagtatttgggagagggaaaggctgtactatatatttatttctaaatgttttgactgggcatttttcttttaatgaaatatgtggactgctctagcaaaccctattttcagctactatttgaatattcttgaacaccaccactgaagagtttcatatacaccaaataatgtctcatctctatagtacagggaatataaaattggtttcctgtggtcatgatcaagatagtagtattattacacaagaaacttggtctgcagtctggaagcttgtctgctctatagaaatgaaaatgcagcatgaagttgacattgtggaaatgaaagtaattgggtattagaaatctgaaagtactgtcatctaaaagcaattgtgattttattgtaattggttgtcactgttgtacggtgtctagaattaaagaatacatgtaaactttcatggtatttagcctttcttaaatttttttaaaatttaaactttctaacctatgtattcaacttctgtatttatatttaatcagtggttcatgttatataatacacccttaactagttaaatggaatgttggtatggtacagagtaccatattgctaagaaaactgtcttataaaagatgtatatgtgtgaagacatgaaagtttaatgtacagaatggttggagaaatgcctatggtgaattaaagcttcatatctgctttcctagtctcgagtctag

SEQ ID NO: 4046 - protein, 537 aa, Homo sapien
MPAPTQLFFPLIRNCELSRIYGTACYCHHKHLCCSSSYIPQSRLRYTPHPAYATFCRPKENWWQYTQGRRYASTPQKFYLTPPQVNSILKANEYSFKVPEFDGKNVSSILGFDSNQLPANAPIEDRRSAATCLQTRGMLLGVFDGHAGCACSQAVSERLFYYIAVSLLPHETLLEIENAVESGRALLPILQWHKHPNDYFSKEASKLYFNSLRTYWQELIDLNTGESTDIDVKEALINAFKRLDNDISLEAQVGDPNSFLNYLVLRVAFSGATACVAHVDGVDLHVANTGDSRAMLGVQEEDGSWSAVTLSNDHNAQNERELERLKLEHPKSEAKSVVKQDRLLGLLMPFRAFGDVKFKWSIDLQKRVIESGPDQLNDNEYTKFIPPNYHTPPYLTAEPEVTYHRLRPQDKFLVLATDGLWETMHRQDVVRIVGEYLTGMHHQQPIAVGGYKVTLGQMHGLLTERRTKMSSVFEDQNAATHLIRHAVGNNEFGTVDHERLSKMLSLPEELARMYRDDITIIVVQFNSHVVGAYQNQE

SEQ ID NO: 4047 - DNA, 3159 bp, Homo sapien
atggaaggatccgagcctgtggccgcccatcagggggaagaggcgtcctgttcttcctgggggactggcagcacaaataaaaatttgcccattatgtcaacagcatctgtggaaatcgatgatgcattgtatagtcgacagaggtacgttcttggagacacagcaatgcagaagatggccaagtcccatgttttcttaagtgggatgggtggtcttggtttggaaattgcaaagaatcttgttcttgcagggattaaggcagttacaattcatgatacagaaaaatgccaagcatgggatctaggaaccaacttctttctcagtgaagatgatgttgttaataagagaaacagggctgaagctgtacttaaacatattgcagaactaaatccatacgttcatgtcacatcatcttctgttcctttcaatgagaccacagatctctcctttttagataaataccagtgtgtagtattgactgagatgaaacttccattgcagaagaagatcaatgacttttgccgttctcagtgccctccaattaagtttatcagtgcagatgtacatggaatttggtcaaggttattttgtgatttcggtgatgaatttgaagttttagatacaacaggagaagaaccaaaagaaattttcatttcaaacataacgcaagcaaatcctggcattgttacttgccttgaaaatcatcctcacaaactggagacaggacaattcctaacatttcgagaaattaatggaatgacaggtttaaatggatctatacaacaaataacggtgatatcgccattttcttttagtattggtgacaccacagaactggaaccatatttacatggaggcatagctgtccaagttaagactcctaaaacagttttttttgaatcactggagaggcagttaaaacatccaaagtgccttattgtggattttagcaaccctgaggcacctttagagattcacacagctatgcttgccttggaccagtttcaggagaaatacagtcgcaagccaaatgttggatgccaacaagattcagaagaactgttgaaactagcaacatctataagtgaaaccttggaagagaagcctgatgtaaatgctgacattgtgcattggctctcttggactgcccaaggctttttatctccacttgctgcagcagtaggaggtgttgccagccaagaagtattgaaagctgtaacaggaaaattttctcctttgtgccagtggttatatcttgaagcagcagatattgttgaatcactaggcaaacctgaatgtgaagaatttctcccacgaggagatagatatgatgccttaagagcttgcattggagacactttgtgtcagaaactgcaaaatttaaacatcttcttagtagggtgtggagccataggctgtgaaatgttgaaaaattttgctttacttggtgttggcacaagcaaagagaaaggaatgattacagttacagatcctgacttgatagagaaatccaacttaaatagacagttcctatttcgtcctcatcacatacagaaacctaaaagctacactgctgctgatgctactctgaaaataaattctcaaataaagatagatgcacacctgaacaaagtatgtccaaccactgagaccatttacaatgatgagttctatactaaacaagatgtaattattacagcattagataatgtggaagccaggagatacgtagacagtcgttgcttagcaaatctaaggcctcttttagattctggaacaatgggcactaagggacacactgaagttattgtaccgcatttgactgagtcttacaatagtcatcgggatcccccagaagaggaaataccattttgtactctaaaatcctttccagctgctattgaacataccatacagtgggcaagagataagtttgaaagttccttttcccacaaaccttcattgtttaacaaattttggcaaacctattcatctgcagaagaagtcttacagaagatacagagtggacacagtttagaaggctgttttcaagttataaagttacttagcagaagacctagaaattggtcccagtgtgtagaattagcaagattaaagtttgaaaaatattttaaccataaggctcttcagcttcttcactgtttccctctggacatacgattaaaagatggcagtttattttggcagtcaccaaagaggccaccctctccaataaaatttgatttaaatgagcctttgcacctcagtttccttcagaatgctgcaaaactatatgctacagtatattgtattccatttgcagaagaggacttatcagcagatgccctcttgaatattctttcagaagtaaagattcaggaattcaagccttccaataaggttgttcaaacagatgaaactgcaaggaaaccagaccatgttcctattagcagtgaagatgagaggaatgcaattttccaactagaaaaggctattttatctaatgaagccaccaaaagtgaccttcagatggcagtgctttcatttgaaaaagatgatgatcataatggacacatagatttcatcacagctgcatcaaatcttcgtgccaaaatgtacagcattgaaccagctgaccgtttcaaaacaaagcgcatagctggtaaaattatacctgctatagcaacaaccactgctacagtttctggcttggttgccttggagatgatcaaagtaactggtggctatccatttgaagtttacaaaaattgttttcttaacttagccattccaattgtagtatttacagagacaactgaagtaaggaaaactaaaatcagaaatggaatatcatttacaatttgggatcgatggaccgtacatggaaaagaagatttcaccctcttggatttcataaatgcagtcaaagagaagtatggaattgagccaacaatggtggtacagggagtcaaaatgctttatgttcctgtaatgcctggtcatgcaaaaagattgaagttaacaatgcataaacttgtaaaacctactactgaaaagaaatatgtggatcttactgtgtcatttgctccagacattgatggagatgaagatttgccgggacctccagtaagatactacttcagtcatgacactgattaa

SEQ ID NO: 4048 - protein, 1052 aa, Homo sapien
MEGSEPVAAHQGEEASCSSWGTGSTNKNLPIMSTASVEIDDALYSRQRYVLGDTAMQKMAKSHVFLSGMGGLGLEIAKNLVLAGIKAVTIHDTEKCQAWDLGTNFFLSEDDVVNKRNRAEAVLKHIAELNPYVHVTSSSVPFNETTDLSFLDKYQCVVLTEMKLPLQKKINDFCRSQCPPIKFISADVHGIWSRLFCDFGDEFEVLDTTGEEPKEIFISNITQANPGIVTCLENHPHKLETGQFLTFREINGMTGLNGSIQQITVISPFSFSIGDTTELEPYLHGGIAVQVKTPKTVFFESLERQLKHPKCLIVDFSNPEAPLEIHTAMLALDQFQEKYSRKPNVGCQQDSEELLKLATSISETLEEKPDVNADIVHWLSWTAQGFLSPLAAAVGGVASQEVLKAVTGKFSPLCQWLYLEAADIVESLGKPECEEFLPRGDRYDALRACIGDTLCQKLQNLNIFLVGCGAIGCEMLKNFALLGVGTSKEKGMITVTDPDLIEKSNLNRQFLFRPHHIQKPKSYTAADATLKINSQIKIDAHLNKVCPTTETIYNDEFYTKQDVIITALDNVEARRYVDSRCLANLRPLLDSGTMGTKGHTEVIVPHLTESYNSHRDPPEEEIPFCTLKSFPAAIEHTIQWARDKFESSFSHKPSLFNKFWQTYSSAEEVLQKIQSGHSLEGCFQVIKLLSRRPRNWSQCVELARLKFEKYFNHKALQLLHCFPLDIRLKDGSLFWQSPKRPPSPIKFDLNEPLHLSFLQNAAKLYATVYCIPFAEEDLSADALLNILSEVKIQEFKPSNKVVQTDETARKPDHVPISSEDERNAIFQLEKAILSNEATKSDLQMAVLSFEKDDDHNGHIDFITAASNLRAKMYSIEPADRFKTKRIAGKIIPAIATTTATVSGLVALEMIKVTGGYPFEVYKNCFLNLAIPIVVFTETTEVRKTKIRNGISFTIWDRWTVHGKEDFTLLDFINAVKEKYGIEPTMVVQGVKMLYVPVMPGHAKRLKLTMHKLVKPTTEKKYVDLTVSFAPDIDGDEDLPGPPVRYYFSHDTD

SEQ ID NO: 4049 - DNA, 4343 bp, Homo sapien
ctcaggaggtttttcagagtggaatcattccttcagatactgactttcgtatctacagggattttgggaacattccaggaatagacttagcttttattgagaatggatacatttatcacaccaagtatgacacagcggacagaattctaacagattccattcagagagcaggtgacaacattttagcagttcttaagcatctagctacatctgatatgctggctgctgcttctaagtatcgacatggaaacatggtcttctttgatgtgctgggcctgtttgtcattgcctacccctctcgtattggctcaatcataaactacatggtggtaatgggtgttgttttgtacctgggcaaaaaatttttgcagcccaaacataagactggtaactacaagaaggacttcttgtgtggacttggcatcactttgatcagctggttcactagccttgttaccgttctcattatagcagtgttcatctctcttattggacagtctctctcatggtataaccacttctatgtctccgtttgtctgtatggaactgcaactgtagccaaaataatacttatacatactcttgcgaaaagattttattacatgaatgccagtgcccagtatctgggagaagtattttttgacatttcgctgtttgtccattgctgttttcttgttaccctcacttaccaaggactttgctcggcgtttattagtgctgtctgggtagcattcccattgctcacaaagctctgtgtgcataaggacttcaagcagcatggtgcccaaggaaaatttattgctttttaccttttggggatgtttattccttatctttatgcattgtacctcatctgggcagtatttgagatgtttacccctatcctcgggagaagtggttctgaaatcccacctgatgttgtgctggcatccattttggctggctgtacaatgattctctcgtcctattttattaacttcatctaccttgccaagagcacaaaaaaaaccatgctaactttaactttggtatgtgcaattacattcctccttgtttgcagtggaacattttttccatatagctccaatcctgctaatccgaagccaaagagagtgtttcttcagcatatgactagaacattccatgacttggaaggaaatgcagttaaacgggactctggaatatggatcaatgggtttgattatactggaatttctcacataacccctcacattcctgagatcaatgatagtatccgagctcactgtgaggagaatgcacctctttgtggttttccttggtatcttccagtgcactttctgatcaggaaaaactggtatcttcctgccccagaagtttctccaagaaatcctcctcatttccgactcatatccaaagaacagacaccttgggattctataaaattgacttttgaagcaacaggaccaagccatatgtccttctatgttcgagcccacaaagggtcaacactttctcagtggtctcttggcaatggcaccccagtcacaagtaaaggaggagactactttgtcttttactcccatggactccaggcctctgcatggcagttctggatagaagtgcaggtttcagaagaacatcctgaaggaatggtcaccgtggccattgctgcccactatctgtctggggaagacaagagatcccctcaactggatgctctgaaggaaaagttcccagattggacatttccctctgcctgggtgtgcacctacgatctctttgtattttaatcttgtggatgagctctaagtacatgcccagtggatactccatgtgacatggtttctccctatgttacgtggatgtttgtaacgtaagtcaatgaattttaatgatcatatgttcaaagagctttctgggttaacgcttttcagggccaagcactataagggtttagctgtggcgcagtgatgcatggcctgttgacacttgaaaatgccagtcttttggcacttcagcacatgtgggtactgccactacacacacgtcattttatatgaccttaaggacaaagccaacaatctacttcaatagctgcccctttaggatcaagaaagatgtacactgtcagagcattgttaatgagacaaaagttgtttccaatttaagccccaaaaccatttgttgtattagtggatggtgggtaaaatatcattcactgaggtaatgattccccttgagaatataactctgtgtaggtcactggaaagtgattgccatagggctgggagagaagcattgcactcttgaggctgtagcctgtgtcaagctgtttcttcaggcagcctctcaaatgtgctttgtctctctgtgctgaggcctggaccctgtgctgagctggtgactcactgtcctgacaagtggacacacagatgcactgctgtgctgctttcctgaggtggttttctatgcctgttttcctctgaaacatgtctgttacccctctccatcttaccaagttgaaaaggggaatatttggccacatacccctctggttttcgtaggttcttttggttcagaatattgtttgtgccagtacatgaccttaacttccttcctcagagcactgagctgccatctgggctattctggggtaaaaggaaggctgggagtggtgggaattttataaatatttattctcttttctttgtttcataggagtcttgtgttatacaaggttagtccttcatggtataatcttactgatgcactgggcctatctttttgttttccagccagttgaatagattagtttttctcagtaacttactatccagcagactggctttcctgagacttgaggttgtggcttatactggaatgagaccactgtacgtgtaggtggttcagatcctgcgtaatggcagcatgaggacttaaaaggtggttttcattttgaagatggctatgtagcttgtaaggtgtatcacagcagtacctctcatggctttttggttccagcagtgagggcattggtgagatcaatggtaaactgtgcaagctttctttttatcattaggaaatgtgaaacgttggacaaattttgagttttaacaaggacaaaaagttgaaagaaaaggcacagttaacaaaaaagggtggctagatttatcttgggtgatggaggaaatgagagaggaatgctcttgaaaggtggtctgtggatctgtctgaatagaaagagcacagtaagtatgcattgccggagaaaacgtccttgaagctgcttgtctcatgtgtatgatgtgctttttaaatcatgcccctcgttgcctgcctaatctgtgactccctaaaaactaactgggcccatgtagatggggctgcaaccagagctgaataacatgttaggctcacacatgcatcagcactgcacactggaatcattgctcttcctggactttgtagaaatcagtctcaagtgcttcaagagtctggctcctgctacttttatctgtcaggtagcacataaggtttgcagggtttatattttgtatagaatcacagttgtggagaaaaagtaataatttctcaatgaattttaaaaatgggcctattttctatccccgtggttcatctgatataattagtgttccctgtgaattccccccctctatgggaaggatgcctttactctttatcagtaataaattatgactgttttcatattgccttagggttatttccctgtgtaaaccattgtcttttgttttggttttctttagcattatgaagctttggtattgtacaaggtcagtagtaagatgctcactagtctcagggcttgtgtaatattctgggaggtcatttaaatgccagaaatggtcaagcaattatacacagtatttatgactctgttaagcataccgtttgtctgtcacattagtagattctgagattaaaaaaaatttttaaagagtgatcatttaaataatttctaaaagggtcttttcaagctctaacaaagtcactaacaaatgcattattttctacagaattagatgttagtagtacagtactgcatattcagggaaaaagtgtgaggaattgatttcaaaatagttcgttcttgtgtttgacctaagaatgattgtcgcatgaagtgtttgtttttacagtttagcatatataaacaaacatgataggattccttaagatgttaccacccagggggccacaagccagcctgctgtctcaggaagctgtagaaggagtgtttgtcaatttcttgtcactggtttgctgacttactgaggattaattgttgccttacaatgttactgaaataaactgtttaatat

SEQ ID NO: 4050 - DNA, 2005 bp, Homo sapien
tggatttggtgattctacaaaaaaagacactgaggttgagaccttgaagcatgacactgctgcagtcgatcgttccgtcaagcgtcttttcaaagttcggagtgatcttgattttgctgagcaactgtggtgcaaaatgagcagtagtgtgatttcataccaagacttggtgaagtgtttcacattgatcatccagagtctacaacgtggtgatatacagccatggctccatagtggaagtaacagtttactaagtaagctcattcatcagtcttatcatggaaccatggacacagtttctctcagtgggactattccagttcaaatgcttttggaaattggtttggacaaactaaagaaagattatatcagttttttcataggtcaggaacttgcatctttgaatcatttggaatacttcattgctccatcagtagatatacaagaacaggtttatcgtgtccaaaaactccaccatattctagaaatattagtcagttgcatgcctttcattaaatctcaacatgaactcctcttttctttaacacagatctgcataaagtattacaaacaaaatcctcttgatgagcaacacatttttcagctgccagtcagaccaactgctgtaaagaacttatatcaaagtgagaagccacagaaatggagagtggaaatatatagtggtcaaaagaagattaagacagtttggcaactgagtgacagctcacccatagaccatctgaattttcacaaacctgatttttcggaattaacactaaacggtagcctggaagaaaggatattctttactaacatggttacctgcagccaggtgcatttcaagtgaagtgtgctgatgaagtcctctataagcacaagccaaaaagagaaagagaaaaaaaggtaattattgtagaacctgaaaacagcaatgtatggaaaccctcaaagcagaaaagggaggaagatcctgaagattctcttatgaagctccaaaattgataatcctgtctcagctctgcctcctcaggaggagcattagtagaacagcagtgatgaggacacagagggagcagacagtgggtaccacgatctccgtaaccatttgcatgtgacttagcaagggctctgaaatgacaaagagaacgagcaccacaaatgagaacaggatcattttagtaaatacagctttatcccaaaagctttaactgtattgggaaaacttaaaaaatagcatcctcaaattttctgattcttatttgccatgaaatagaacttagtaaattaaatgttatttgaaaatgttataagagctttgtaaatatttcagaaaatatgggataaatgcctgaatttggttcttctacaggtgctataataaagtccatctctcaatacttatactttctaaattcatctcagaatattagcagccatattccacagttcctataatttttactgggggggatttgtgataggaaagtccttgggaaacatttccaatctttcaaaatattattgtgtatcttaagaagtataggaacttgtatgttgaaatgttgtatggtagttcttgtatagttaaataataatctttttaagagttaatgataagcatatgttatgtgcattattaataaaatagtggccacttaggtaatacccacttttatcttgtgtgctgggtactctggttactgagataaataaggcactggacatcctcacgtggagttcacaggctcatcagtgaattctgtaccacatttcaaccttgtttattttagtttaatggaatatacattcttagtattgcctgattatttaaatttgttgagggggattgcatgttgctttattggcctgtaaaaatagctagtttggtaagatttggtctcgcaccttccatctttgctaccacattaaagatgagcttgttaaaaaggaaagcatatttctctgattgcccttatggagaaataaagataaaattcaaagaaac

SEQ ID NO: 4051 - protein, 236 aa, Homo sapien
MSSSVISYQDLVKCFTLIIQSLQRGDIQPWLHSGSNSLLSKLIHQSYHGTMDTVSLSGTIPVQMLLEIGLDKLKKDYISFFIGQELASLNHLEYFIAPSVDIQEQVYRVQKLHHILEILVSCMPFIKSQHELLFSLTQICIKYYKQNPLDEQHIFQLPVRPTAVKNLYQSEKPQKWRVEIYSGQKKIKTVWQLSDSSPIDHLNFHKPDFSELTLNGSLEERIFFTNMVTCSQVHFK

SEQ ID NO: 4052 - DNA, 3455 bp, Homo sapien
tgtgaagtcaactttatcccagacagttccatccaagggagaattaagtagagaaatttgtctgcaatctcaatctaaagacaaatctacgacaccaggaggaacaggaattaagcctttcctggaacgctttggagagcgttgtcaagaacatagcaaagaaagtccagctcgtagcacaccccacagaacccccattattactccaaatacaaaggccatccaagaaagattattcaagcaagacacatcttcatctactacccatttagcacaacagctcaagcaggaacgtcaaaaagaactagcatgtcttcgtggccgatttgacaagggcaatatatggagtgcagaaaaaggcggaaactcaaaaagcaaacaactagaaaccaaacaggaaactcactgtcagagcactcccctcaaaaaacaccaaggtgtttcaaaaactcagtcacttccagtaacagaaaaggtgaccgaaaaccagataccagccaaaaattctagtacagaacctaaagaagtgatacgtgaaattgagatgagtgtggatgatgatgatatcaatagttcgaaagtaattaatgacctcttcagtgatgtcctagaggaaggtgaactagatatggagaagagccaagaggagatggatcaagcattagcagaaagcagcgaagaacaggaagatgcactgaatatctcctcaatgtctttacttgcaccattggcacaaacagttggtgtggtaagtccagagagttcagtgtccacacctagactggaattgaaagacaccagcagaagtgatgaaagtccaaaaccaggaaaattccaaagaactcgtgtccctcgagctgaatctggtgatagccttggttctgaagatcgtgatcttctttacagcattgatgcatatagatctcaaagattcaaagaaacagaacgtccatcaataaagcaggtgattgttcggaaggaagatgttacttcaaaactggatgaaaaaaataatgcctttccttgtcaagttaatatcaaacagaaaatgcaggaactcaataacgaaataaatatgcaacagacagtgatctatcaagctagccaggctcttaactgctgtgttgatgaagaacatggaaaagggtccctagaagaagctgaagcagaaagacttcttctaattgcaactgggaagagaacacttttgattgatgaattgaataaattgaagaacgaaggacctcagaggaagaataaggctagtccccaaagtgaatttatgccatccaaaggatcagttactttgtcagaaatccgcttgcctctaaaagcagattttgtctgcagtacggttcagaaaccagatgcagcaaattactattacttaattatactaaaagcaggagctgaaaatatggtagccacaccattagcaagtacttcaaactctcttaacggtgatgctctgacattcactactacatttactctgcaagatgtatccaatgactttgaaataaatattgaagtttacagcttggtgcaaaagaaagatccctcaggccttgataagaagaaaaaaacatccaagtccaaggctattactccaaagcgactcctcacatctataaccacaaaaagcaacattcattcttcagtcatggccagtccaggaggtcttagtgctgtgcgaaccagcaacttcgcccttgttggatcttacacattatcattgtcttcagtaggaaatactaagtttgttctggacaaggtcccctttttatcttctttggaaggtcatatttatttaaaaataaaatgtcaagtgaattccagtgttgaagaaagaggttttctaaccatatttgaagatgttagtggttttggtgcctggcatcgaagatggtgtgttctttctggaaactgtatatcttattggacttatccagatgatgagaaacgcaagaatcccataggaaggataaatctggctaattgtaccagtcgtcagatagaaccagccaacagagaattttgtgcaagacgcaacacttttgaattaattactgtccgaccacaaagagaagatgaccgggagactcttgtcagccaatgcagggacacactctgtgttaccaagaactggctgtctgcagatactaaagaagagcgggatctctggatgcaaaaactcaatcaagttcttgttgatattcgcctctggcaacctgatgcttgctacaaacctattggaaagccttaaaccgggaaatttccatgctatctagaggtttttgatgtcatcttaagaaacacacttaagagcatcagatttactgattgcattttatgctttaagtacgaaagggtttgtgccaatattcactacgtattatgcagtatttatatcttttgtatgtaaaactttaactgatttctgtcattcatcaatgagtagaagtaaatacattatagttgattttgctaaatcttaatttaaaagcctcattttcctagaaatctaattattcagttattcatgacaatatttttttaaaagtaagaaattctgagttgtcttcttggagctgtaggtcttgaagcagcaacgtctttcaggggttggagacagaaacccattctccaatctcagtagttttttcgaaaggctgtgatcatttattgatcgtgatatgacttgttactagggtactgaaaaaaatgtctaaggcctttacagaaacatttttagtaatgaggatgagaactttttcaaatagcaaatatatattggcttaaagcatgaggctgtcttcagaaaagtgatgtggacataggaggcaatgtgtgagacttgggggttcaatattttatatagaagagttaataagcacatggtttacatttactcagctactatatatgcagtgtggtgcacattttcacagaattctggcttcattaagatcattatttttgctgcgtagcttacagacttagcatattagttttttctactcctacaagtgtaaattgaaaaatctttatattaaaaaagtaaactgttatgaagctgctatgtactaataatactttgcttgccaaagtgtttgggttttgttgttgtttgtttgtttgtttgtttttggttcatgaacaacagtgtctagaaacccattttgaaagtggaaaattattaagtcacctatcacctttaaacgcctttttttaaaattataaaatattgtaaagcagggtctcaacttttaaatacactttgaacttcttctctgaattattaaagttctttatgacctcatttataaacactaaattctgtcacctcctgtcattttattttttattcattcaaatgtattttttcttgtgcatattataaaaatatattttatgagctcttactcaaataaatacctgtaaatgtctaaagg

SEQ ID NO: 4053 - protein, 573 aa, Homo sapien [sequence omitted]

SEQ ID NO: 4054 - DNA, 1510 bp, Homo sapien
gcggcaatcatggcgccacctgtgagatactgcatccccggcgaacgtctgtgtaacttggaggagggcagcccgggcagcggcacctacacccgccacggctacatcttttcgtcgcttgccggctgtctgatgaagagcagcgagaatggcgcgcttccagtggtgtctgtagtgagagaaacagagtcccagttactgccagatgtgggagctattgtaacctgtaaggtctctagcatcaattcacgctttgccaaagtacacatcctgtatgtggggtccatgcctcttaagaactcttttcgaggaactatccgcaaggaagatgtccgagcaactgaaaaagacaaggttgaaatttataagagtttccgcccaggtgacattgtcttggccaaagtgatctccttaggtgatgcacagtccaactacctgctaaccaccgccgagaacgagctgggagtggtggtagcccacagtgagtcaggtatccagatggttcccatcagctggtgtgagatgcagtgccctaagacccacactaaagaattccggaaagtagcccgagtacaacccgaattcttgcagacctaagaagccactttttaccctatggaagggggtaagctgttcctgagtataacaccaagatgctgctgtctttattcaaacacctggcgtcggccaacagccacttccagaaaaatcttccagtttacgctgtagatggaacatgtttctgtgaacctatcagtggatttcattctcttgagtaataaatcttatcttttcaaggcaccaacaaacaaaactgtgatattggaaatagcctatccctcctgacagtccttataaatacatattttttgctatgataaaacttttttactaaaaggatgttatagagtctgttgtcttaagcagagaaagacatctaaatggtgtcaggacatttcagtacttctgcttattgagtacttactgtgctaggcactgagtcaggtgctttacatacgtccccttcatttaggtacattgtgatttaatgaaaatttgaggacacgtggtgatacagatagcatgtgaggcaggcatggtggctcatgtttgtaaatcccagcactttgggaaggccgagttggttttgaactcctggcctcccaaggtgctgatagtacaggcatgaaccactgtgcttggccttttaaaattttgtagagatgcagtcttactatgttgcccaggctgtctcaaactcctggcctcaagtggtcctcctgccttggcctcccaaaatgttgcaattacaggcatgagcactgtgcttggcaagctaaggaggattttcactagcagtttcatttgacaataccaatctagaggtgagcttctcaatctttaatgtgtatccaaatcacctggggaatagatgccgattctgaaacaggtctggagtgagacctgaggttctgcatgtataacaagctcccagggggtccagctgtca

SEQ ID NO: 4055 - protein, 195 aa, Homo sapien
MAPPVRYCIPGERLCNLEEGSPGSGTYTRHGYIFSSLAGCLMKSSENGALPVVSVVRETESQLLPDVGAIVTCKVSSINSRFAKVHILYVGSMPLKNSFRGTIRKEDVRATEKDKVEIYKSFRPGDIVLAKVISLGDAQSNYLLTTAENELGVVVAHSESGIQMVPISWCEMQCPKTHTKEFRKVARVQPEFLQT

SEQ ID NO: 4056 - DNA, 3872 bp, Homo sapien
ggaaaaagtatgtcggcaagtcagctggtttcccagtgcaggacgcgctgacagctcgagtgagcggactgcccaggacttcggaactagacgagttctgtagaaatcctgtcaaagaatatgaagaaaaacagagaaagattctgcaatagagagagagaatttgtatataaatttaaagtaggaagtcagtgcttagaactgagagtgccactcaaatttcctgttcaagagaatgccagtcatttgcatggacgtctgatgctgctgcacagtttaccgtgctttatagaaaaagacttaaaagaagctctgactcagtttatagaagaagaatccctcagcgattatgatagagatgctgaagcatccctggcagctgtgaaatcaggtgaagtagatttacatcagctggcgagtacatgggccaaagcttatgctgagaccacgttagagcatgcaaggcctgaagaacccagctgggatgaagattttgcagatgtgtaccatgacttaattcattctcctgcctctgaaactctcttaaatttggaacataattactttgttagtatctcataactgattggtgaaagagatgtggagctgaaaaaattacgagagagacaaggtattgaaatggaaaaagtcatgcaggaattgggaaaatcactgacagatcaagatgtaaattcactggctgctcagcattttgaatcccagcaagacctagaaaataaatggtcgaatgaattaaaacaatcaactgccatccaaaaacaagagtatcaagaatgggtaataaaacttcaccaagacctaaaaaaccccaacaacagctcccttagtgaggaaattaaagttcagccaagtcagttcagagaatctgtagaagcaattggaaggatttatgaggaacagagaaagttagaagaaagttttaccattcacttaggagcccagttgaagaccatgcataatttgagattgctgagagcagatatgctggacttctgtaagcataaaagaaatcatcgaagtggtgtgaaacttcatcggctccaaacagctctgtcactttattctacatctctctgtggcctggttttactagtagataatcgaattaattcatatagtggtattaaaagagattttgccacagtttgccaagaatgcactgacttccatttcccccgaattgaagagcaattagaagttgtccaacaggtggtactttatgctagaacccagcgcaggagtaaattgaaagaatcacttgattctggaaaccaaaatggaggaaatgatgataagactaagaatgctgagaggaactatttaaatgttttacctggggaattttatattacacggcattctaatctctcagaaatccatgttgctttccatctctgtgtggatgaccatgtgaaatcgggaaacatcactgctcgtgatcctgccattatgggactccgaaatatactcaaagtttgctgtacccatgacatcacaacaataagcattcctctcttgctggtacatgatatgtcagaggaaatgactataccctggtgcttaaggagagcggaacttgtgttcaagtgtgtcaaaggtttcatgatggaaatggcttcatgggatggaggaatttctaggacagtgcaatttctagtaccacagagtatttctgaagaaatgttttatcaacttagtaacatgcttccccagatcttccgagtatcatcaacactcactctgacatccaagcactaaacccttatagattgacatgctggcagaagatgattgttaaactctccaggaacttgtgctatgctgggaatctgtcaagcaaaagatgcccagaaagagaacttgcagctcaatccacaaatcaagatacatgtgtgtgaaaccattccaaaaatttatatactgcacaaactggtgatcaacccctaacttaaacacttaaagtctctttatgaatttctctttttttcttctctgtgttacctgtgaatattagtaatctaaaactttttatttatcacacatggacacttgggaaaggaaacttgattatatttacatggaggcatttgactttttcaagaggcttgactcgtctcaggtgcaatccttaattaaacatacaaacaaaattttccttttactttctttgccaaaacaaaatgtaaaagcactgaaatatacattgcaagtacaaatttcctgtgaaaatctttttatagaaacacaaatgtataagacaaatgtgcttgttcttttaaattctcctgtttcagaatctctttttaatctactcctaaggatgtacaagttagagtcagaagacgttttggattttttccctctctctcatcctcccgctgtgcccttgcacttgcatattaataacatttcatggactgggaaatagtgttcttttttgcaagcttgatgtcaagttagtctaaaccagcacctggcagtattttagtgctcatcaacattgtgacaatcacacaaggaagatcatttctacatttctgtcctccctgcgttctcagcttgcttaaccattcctctacctcttgcatttttttgcggataaatgtatccccatttctgcttctctgtttcccctccttttccattgtttttccttatggtactactttctcaggtgctacatatcatatatttgtcccatctataacatatttaaatgctataagtagtaactccattaaacaaaggcatttacaaaagcacacaggtgtttagaaaagcaatagtttcatcaattccaagttatgtggatattgtaactggccacaagaatgaaatggagggcatttggtgtcataagatggcatgtcttgatgacaagaaacaaaacgcccttcattaatatgcctcagtgtaataactattatagaaactgttggcaagcagagtgctttcctataacagaatgtgtcttaattttctactcgagggaaaggtttgtccaggtaacaacactaaagacaaccctaagaacacccactccagcagtatgtccattagacactaaaactctccaaattatttgtcagggagcctggcgattctgccaagaaggcaggtgttttgcccttagagcctatacagttctcttggagaaattgtctttcaggcaccactgttaatcactgagactgattctaatgcaaagcagggaagacagaggcagaaaccaggagagtggtagatcagtgcagcccagatatcggaatggaggagcaaagtttcattcacggatgtttgttgaatgctgctgcccaactcttcctttgtcacctctaggctattccactaagttacttataaactggtggctttaactgagggctgtgtaaaggtactatttggcatgtgaagtcaggataaatttatcgaatgtccgttttccacatgcaactgtgttacagaagtagtaaaattggaagaatcatgtttatggtgttaccactgatggaaacacacaaacaccaagctaataataaatatataacttaaaaagctaattatatgcactgaaatggtgggaattttagtgatgcagtaattgaggagtctggagttttgtatttggaccaagaattatgagatgaggatctttttctgagtgttctaaagggcttcttgagggggagtggtttaaagcacttcatgaatgatgtgaagaaggtaccttgggctgagacagcattctaggtacagatggcactctgttcaaccaactgtggatggaaaatattctgaaaaaaaatacaataaaaattttaaaaatacaatataacatctgtttacatggc

SEQ ID NO: 4057 - protein, 592 aa, Homo sapien
  unsure 194: unknown amino acid
KKYVGKSAGFPVQDALTARVSGLPRTSELDEFCRNPVKEYEEKQRKIFCNREREFVYKFKVGSQCLELRVPLKFPVQENASHLHGRLMLLHSLPCFIEKDLKEALTQFIEEESLSDYDRDAEASLAAVKSGEVDLHQLASTWAKAYAETTLEHARPEEPSWDEDFADVYHDLIHSPASETLLNLEHNYFVSISXLIGERDVELKKLRERQGIEMEKVMQELGKSLTDQDVNSLAAQHFESQQDLENKWSNELKQSTAIQKQEYQEWVIKLHQDLKNPNNSSLSEEIKVQPSQFRESVEAIGRIYEEQRKLEESFTIHLGAQLKTMHNLRLLRADMLDFCKHKRNHRSGVKLHRLQTALSLYSTSLCGLVLLVDNRINSYSGIKRDFATVCQECTDFHFPRIEEQLEVVQQVVLYARTQRRSKLKESLDSGNQNGGNDDKTKNAERNYLNVLPGEFYITRHSNLSEIHVAFHLCVDDHVKSGNITARDPAIMGLRNILKVCCTHDITTISIPLLLVHDMSEEMTIPWCLRRAELVFKCVKGFMMEMASWDGGISRTVQFLVPQSISEEMFYQLSNMLPQIFRVSSTLTLTSKH

SEQ ID NO: 4058 - DNA, 3013 bp, Homo sapien
caacgagttgtagccgcggagagcaggcgtcgatgctggcgcccaaagcctccagcctgagagtcgcctcactcgtgtgacgacagagtttcactcctgttacccaggctggaggacagtgatgtgatctcgggtcaccacaacctccgcctcccggattcaggcgattctcatgcctcagcctcccgagtagctcagattacaggcatgtgccaccacgcccggctaattttgtattttcagtcgagacggggtttccccatgttggtcaggctggtcttgaattcccgacctcaggtgatctgttcgcctcggcctcccaaagtgctgggattacaggcgtgaaccactgcacccggcgaggcattttttactgtctacagaaacttattgtaattcatttttcctcactccagtagtaagaattataccaaattgaaaagatatgaatgagtatcctaaaaaaagaaaaaggaagactctacacccttctcgttattcagattcctctggaataagcagaattgcagatggattcaatggaattttctctgatcattgttacagtgtctgttctatgagacagccagatttaaaatattttgacaacaaagatgatgattctgataccgagacgtcaaatgacttgccaaaatttgcagatggaatcaaggccagaaacagaaatcagaactacctggttcccagtcctgtacttagaattctagaccacactgccttttctacagaaaaatctgctgatattgtaatttgtgatgaagagtgtgactcacctgaatcagtcaaccagcaaacccaagaggagagtcctatagaagttcacactgctgaagatgttccaattgctgtagaagtgcatgcgatttctgaggattatgatatagagacagaaaacaattcctctgagagtctccaagaccaaactgatgaagaaccgccagctaaactttgtaaaattcttgacaagagccaagctttgaatgtgactgcccagcagaaatggcctttactgagagctaatagcagtggcctctataaatgtgaactttgtgagtttaacagcaaatatttttctgacttaaagcagcatatgatcctgaagcataaacgtactgattcaaatgtgtgtcgagtatgcaaggaaagtttctctaccaatatgcttctgatagaacatgccaaactgcatgaagaggatccctacatttgtaaatactgtgattataagacagtaatttttgagaacctcagccagcacattgcagacacccattttagtgatcacctctattggtgtgaacagtgtgatgtacagttctcctcaagcagtgaactctacctacatttccaggagcacagctgtgatgaacagtacttgtgtcagttctgtgaacatgaaactaatgatccagaagacttgcatagccatgtggtaaatgagcatgcatgtaaattaatagagttaagtgataagtataacaatggtgaacatggacaatatagcctcttaagcaaaattacctttgacaaatgtaaaaacttctttgtatgtcaagtatgtggttttcggagtagacttcacacaaatgttaacaggcatgttgctattgaacatacaaaaatttttcctcatgtttgtgatgactgtgggaaaggcttttcaagtatgctagaatattgcaagcatttaaattcacatttatctgaagggatttatttatgtcaatattgtgaatattcaacaggacaaattgaagatcttaaaattcatctagatttcaagcattcagctgacttgcctcataaatgtagtgactgcttgatgaggtttggaaatgaaagggaattaataagtcaccttccagtccatgagacaacttgattattctctttaacttacagaatgttagtttaaaataataaattcatcctttttttggagatgattaaatggatgattgtaaacacaacttatgaaatctgcctttaacaagtaacttttttaaattataaaattttattggcattgctccattttctgtatataaatatatctttaatgtggtattttcaattgcgtgatagtttgtagtttcaaccactcttggtgactgtcatcctgtttcttccatattctctgatttcatgaattgaaaagaaacaaatgtattgaagaagtgagctacagttttccttccttaaccatgggtgctagtaactttttaaaactcaagacaagattagttttttatgtgtgaagtcattaaattattacacgaccagaactaaaatgcaatatacagttaagtccacggatactcccattaatgagaaataacactaggaagccactattacaggaagaaaagatttggttttcatggcagtctgtttttttaaaaaaaaatttttgagccactatctattgttgaatattttaagatgggatgagggaggaactaataagggcttacacaataaaaaataactatatcataactcattcataacttgatgtttcattttctgttgaggaaccataaattcattcacagacttaatatttttttcttagagatggtctcgttctgttgtccaggatggagtgcagtggttgatcatagctcccgggccgtagtctcccaggctcgagcaatcctcccacttcaccctcctgcatagctaggactacaggcatgtggcaccatgcccgctaagtttttaaatttcttgtagagatgagatctcgctatgttgcccaggccagtctcaaactcctggactcaagcaatcctcccaccttggccttccaaatcactgggattataggcatgagccattatgcctgactcttgcccaaatttctgatgtcaaattgttcattgacagaaaacccactgaagtatttaaagttaggaagatctgggagataggggttgctggcatgaaaatgtataacttacaacatttattaataaaatgataaattagc

SEQ ID NO: 4059 - protein, 485 aa, Homo sapien
MNEYPKKRKRKTLHPSRYSDSSGISRIADGFNGIFSDHCYSVCSMRQPDLKYFDNKDDDSDTETSNDLPKFADGIKARNRNQNYLVPSPVLRILDHTAFSTEKSADIVICDEECDSPESVNQQTQEESPIEVHTAEDVPIAVEVHAISEDYDIETENNSSESLQDQTDEEPPAKLCKILDKSQALNVTAQQKWPLLRANSSGLYKCELCEFNSKYFSDLKQHMILKHKRTDSNVCRVCKESFSTNMLLIEHAKLHEEDPYICKYCDYKTVIFENLSQHIADTHFSDHLYWCEQCDVQFSSSSELYLHFQEHSCDEQYLCQFCEHETNDPEDLHSHVVNEHACKLIELSDKYNNGEHGQYSLLSKITFDKCKNFFVCQVCGFRSRLHTNVNRHVAIEHTKIFPHVCDDCGKGFSSMLEYCKHLNSHLSEGIYLCQYCEYSTGQIEDLKIHLDFKHSADLPHKCSDCLMRFGNERELISHLPVHETT

SEQ ID NO: 4060 - DNA, 2684 bp, Homo sapien
aataacctggagccggcggcgtaggttggctctttagggcttcaccccgaagctccaccttcgctcccgtctttctggaaacaccgctttgatctcggcggtgcgggacaggtacctcccggctgctgcgggtgccctggatccagtcggctgcaccaggcgagcgagacccttccctggtggaggctcagagttccggcagggtgcatccggcctgtgtgtggcgcgaggcagggaagccggtacccgggtcctggccccagcgctgacgttttctctcccctttcttctctcttcgcggttgcggcgtcgcagacgctagtgtgagcccccatggcagatacgaccccgagcggcccccaaggggcgggcgctgtgcaattcatgatgaccaataaactggacacggcaatgtggctttctcgcttgttcacagtttactgctctgctctgtttgttctgcctcttcttgggttgcatgaagcagcaagcttttaccaacgtgctttgctggcaaatgctcttaccagtgctctgaggctgcatcaaagattaccacacttccagttaagcagagcattcctggcccaggctttgttagaggacagctgccactacctgttgtattcactcatctttgtaaattcctatccagttacaatgagtatcttcccagtcttgttattctctttgcttcatgctgccacatatacgaaaaaggtccttgacgcaaggggctcaaatagtttacctctgctgagatctgtcttggacaaattaagtgctaatcaacaaaatattctgaaattcattgcttgcaatgaaatattcctgatgcctgcgacagtttttatgctttttagtggtcaaggaagtttgctccaaccttttatatactatagatttcttacccttcgatattcgtctcgaagaaacccatattgtcggaccttatttaatgaactgaggattgttgttgaacacataataatgaaacctgcttgcccactgtttgtgagaagactttgtctccagagcattgcctttataagcagattggcaccaacagttccatagtttaacatctagttaagctacaaatatagtataagcattattagcagctggtacttctgctaggggttgtaaattccaggtgttacactgacctcaatccaatttacataatttacataaatgcatctcggtggaaaaataatcattttcttggcatgttaaatcaagcttaaaaagttttgagaaaattttactgtgctgtgttgctaatggttaaagaagtctgtatctagtgataaatataccagtttttttaaaaagatgctgttgtgcctatatcatgaagtacattaatttctcatgtaaaaaaaatagctctaaaatttgtttcaacctaattggtaacctgagtttatatctggcatgaattcattatggtgatacacatatgtgaattcagtacattttgagacagtattctaccattcagtaattttggttaatgattttaacacttctcagtgtatttaatttcaaattgtttttttaattggttttatgctgctttgttaggacagatgtgttttgaatgtaccattataagaagaattctatgtatcttaaactatgatcttctaaaattttatttccgtaagtacttctgtggccttgagtattttttaaaaggctcaactgtaagcctcttagccagttggataaatatttggggtcacctagccattgaaagcagaaagcagtagtgacacagctttcccttcaaagagccattgagaaacatttctcaaacaggaaatccttcttttactaatgtggacatatagattattcgtattatagtttgtagaactacctagttcagaatcttgactgccagttttcttggtttcttaggcttgaattttcatagacaattgcaacagtttagatgccttttgaaaggaatgtaatgaagattcagcatctgactatatgtgtgtctatcctgaaataataatggagagtatactgtagattacatgtttacccatcaaatctgacttaaaaggttaaatggaaggttttataggtaaggtaattgattgggaatggggtagggggaggagttgtgggggaataatgtgcatttcagtctcaacgcatagataaatttaggggaattggatgcattattcaactttgatttgggttgtaaaatgtgttaaatcctgttcattgaactcccatcaactcttatgaaattcatgctgatcttcattaccgttgcatgattggaaatgtttaaaacattgtacagttttagtatagagaaatgtaatggtttttgtgaccagtttctgtctgcatgtaatttggatttctcaaatacattcattagtaatttatcagtaacattagttttatttttgttcatctccttatctataaaaaggggatattcttaggataaatacatgaaaaattatacttgatagcttaactataatcagctatttttgtatttttgtaatatttgtccactaagctggagaagcagcctcatacagttgattttgtgtatgtggctagtcttattgtcactatgtaagtaatccaatggttttagaaactaaactttctagagcaataaaatgactataatgttaagt

SEQ ID NO: 4061 - protein, 247 aa, Homo sapien
MADTTPSGPQGAGAVQFMMTNKLDTAMWLSRLFTVYCSALFVLPLLGLHEAASFYQRALLANALTSALRLHQRLPHFQLSRAFLAQALLEDSCHYLLYSLIFVNSYPVTMSIFPVLLFSLLHAATYTKKVLDARGSNSLPLLRSVLDKLSANQQNILKFIACNEIFLMPATVFMLFSGQGSLLQPFIYYRFLTLRYSSRRNPYCRTLFNELRIVVEHIIMKPACPLFVRRLCLQSIAFISRLAPTVP

SEQ ID NO: 4062 - DNA, 3334 bp, Homo sapien
gcacgagccccgggctgccggcgcgggcgccgcggcacgtccacaggctgggtcgcgaggtggcgatcgctgagaggcaggagggccgaggcgggcctgggaggcggcccggaggtggggcgccgctggggccggcccgcacgggcttcatctgagggcgcacggcccgcgaccgagcgtgcggactggcctcccaagcgtggggcgacaagctgccggagctgcaatgggccgcggctggggattcttgtttggcctcctgggcgccgtgtggctgctcagctcgggccacggagaggagcagcccccggagacagcggcacagaggtgcttctgccaggttagtggttacttggatgattgtacctgtgatgttgaaaccattgatagatttaataactacaggcttttcccaagactacaaaaacttcttgaaagtgactactttaggtattacaaggtaaacctgaagaggccgtgtcctttctggaatgacatcagccagtgtggaagaagggactgtgctgtcaaaccatgtcaatctgatgaagttcctgatggaattaaatctgcgagctacaagtattctgaagaagccaataatctcattgaagaatgtgaacaagctgaacgacttggagcagtggatgaatctctgagtgaggaaacacagaaggctgttcttcagtggaccaagcatgatgattcttcagataacttctgtgaagctgatgacattcagtcccctgaagctgaatatgtagatttgcttcttaatcctgagcgctacactggttacaagggaccagatgcttggaaaatatggaatgtcatctacgaagaaaactgttttaagccacagacaattaaaagacctttaaatcctttggcttctggtcaagggacaagtgaagagaacactttttacagttggctagaaggtctctgtgtagaaaaaagagcattctacagacttatatctggcctacatgcaagcattaatgtgcatttgagtgcaagatatcttttacaagagacctggttagaaaagaaatggggacacaacattacagaatttcaacagcgatttgatggaattttgactgaaggagaaggtccaagaaggcttaagaacttgtattttctctacttaatagaactaagggctttatccaaagtgttaccattcttcgagcgcccagattttcaactctttactggaaataaaattcaggatgaggaaaacaaaatgttacttctggaaatacttcatgaaatcaagtcatttcctttgcattttgatgagaattcattttttgctggggataaaaaagaagcacacaaactaaaggaggactttcgactgcattttagaaatatttcaagaattatggattgtgttggttgttttaaatgtcgtctgtggggaaagcttcagactcagggtttgggcactgctctgaagatcttattttctgagaaattgatagcaaatatgccagaaagtggacctagttatgaattccatctaaccagacaagaaatagtatcattattcaacgcatttggaagaatttctacaagtgtgaaagaattagaaaacttcaggaacttgttacagaatattcattaaagaaaacaagctgatatgtgcctgtttctggacaatggaggcgaaagagtggaatttcattcaaaggcataatagcaatgacagtcttaagccaaacattttatataaagttgcttttgtaaaggagaattatattgttttaagtaaacacatttttaaaaattgtgttaagtctatgtataatactactgtgagtaaaagtaatactttaataatgtggtacaaattttaaagtttaatattgaataaaaggaggattatcaaattcatatatgataaaagtgaatgttctaagtctctcaaactagcgttttatgtaataatatgtaatataaataaaactatggtaaatgtgacaagcatttaataggaaaatgctaaggaggcctcataaatgacccataattaccaacgtagaatttttcagtacatttagggttgctggatttagcaaataaaaataaagattgcccagttagatttgaatttcagataaacaattagttttttaatattttacatggaatatttggaaaatacttatactaaaaaattatttgtttgaaattcacatttaactgggagtcttgtattttatctggcaatcctaaaatacattggtatgaaacaaatcacttttagaagtatattgctattttgattgggttgtttttgtgtgtagaaacgtacaataacaactcaaaggcacaggagatttctaaacattgtgaaaagttgaatagattatatatttattctcataatactttcactaatactaaataaaatttggggaacactttttatttttatataatttccaatttacagaaaagtttcaaaaatagtacaaagagctctcttacccagattcactaattgttcatacgtgctttatctttcatgctttctctgtacacacacacacacacacaaatttttcctcaatcatttgaaagtcagttataggcatcatgccccttaaaccctaaatacttcagtgtgtaatactgaataattactaaaaatgattttctcagaaaaaaaaactcccacaattctggaactataatactgtaagccttagaataaataatactttcaagttccaatctaaagttctttttgagttttgttgcccgttttatgcttgatgtgtatagtaatagggtaggctatttattttattaaaattttttttagagacaaggttttgctgtgttgcccaagctggaacttgaacgactgggctgaagtgatcttcccacctcagcctcccaagtagctgggaatacaggtgtctgccaccatacccagtttcatttttgttttttatacccgaagttcatttcctttgtctccctaaaactgaactgtaattttgggaggttttcattagtggaagctcttcatttataaagctatttgaaggggtttaggaatttatatcacatggtaattgtagagaaaaagaagctatatacctcaaaatcgtgccctctttacatatgtcttatcaggtataacatgttgaaatgtcacattagtagtaaagtggggtttatttatatagtggttaagaaatgtcagtttacactgctgtatacttcttcttctgtgtccctaaggcctggtacagtgccaagcacatacttggtatccaataaatatttgttggatgaaaaaaaaaaaaaaaaaaaa

SEQ ID NO: 4063 - protein, 468 aa, Homo sapien
MGRGWGFLFGLLGAVWLLSSGHGEEQPPETAAQRCFCQVSGYLDDCTCDVETIDRFNNYRLFPRLQKLLESDYFRYYKVNLKRPCPFWNDISQCGRRDCAVKPCQSDEVPDGIKSASYKYSEEANNLIEECEQAERLGAVDESLSEETQKAVLQWTKHDDSSDNFCEADDIQSPEAEYVDLLLNPERYTGYKGPDAWKIWNVIYEENCFKPQTIKRPLNPLASGQGTSEENTFYSWLEGLCVEKRAFYRLISGLHASINVHLSARYLLQETWLEKKWGHNITEFQQRFDGILTEGEGPRRLKNLYFLYLIELRALSKVLPFFERPDFQLFTGNKIQDEENKMLLLEILHEIKSFPLHFDENSFFAGDKKEAHKLKEDFRLHFRNISRIMDCVGCFKCRLWGKLQTQGLGTALKILFSEKLIANMPESGPSYEFHLTRQEIVSLFNAFGRISTSVKELENFRNLLQNIH

SEQ ID NO: 4064 - DNA, 4221 bp, Homo sapien; identical to SEQ ID NO: 3503

SEQ ID NO: 4065 - protein, 730 aa, Homo sapien; identical to SEQ ID NO: 3504

SEQ ID NO: 4066 - DNA, 2832 bp, Homo sapien
gtgcaccgtcggcaacctgcttcctggaaccgtgtatcgcttccgggtgagggctctgaatgatggagggtatggtccctattctgatgtctcagaaattaccactgctgcagggcctcctggacaatgcaaagcaccttgtatttcttgtacacctgatggatgtgtcttagtgggttgggagagtcctgatagttctggtgctgacatctcagagtacaggttggaatggggagaagatgaagaatccttagaactcatttatcatgggacagacacccgttttgaaataagagacctgttgcctgctgcacagtattgctgtagactacaggccttcaatcaagcaggggcagggccgtacagtgaacttgtcctttgccagacgccagcgtctgcccctgaccccgtctccactctctgtgtcctggaggaggagccccttgatgcctaccctgattcaccttctgcgtgccttgtactgaactgggaagagccgtgcaataacggatctgaaatccttgcttacaccattgatctaggagacactagcattaccgtgggcaacaccaccatgcatgttatgaaagatctccttccagaaaccacctaccggatcagaattcaggctataaatgaaattggagctggaccatttagtcagttcattaaagcaaaaactcggccattaccacccttgcctcctaggctagaatgtgctgctgctggtcctcagagcctgaagctaaaatggggagacagtaactccaagacacatgctgctgaggacattgtgtacacactacagctggaggacagaaacaagaggtttatttcaatctacagaggacccagccacacctacaaggtccagagactgacggaattcacatgctactccttcagaatccaggcagcaagcgaggctggagaagggcccttctcagaaacctataccttcagcacaaccaaaagtgtcccccccaccatcaaagcacctcgagtaacacagttagaaggaaattcatgtgaaattttatgggagacggtaccatcaatgaaaggtgaccctgttaactacattctgcaggtattggttggaagagaatctgagtacaaacaggtgtacaagggagaagaagccacattccaaatctcaggcctccagaccaacacagactacaggttccgcgtatgtgcgtgtcgtcgctgtttagacacctctcaggagctaagcggagccttcagcccctctgcggcttttgtattacaacgaagtgaggtcatgcttacaggggacatggggagcttagatgatcccaaaatgaagagcatgatgcctactgatgaacagtttgcagccatcattgtgcttggctttgcaactttgtccattttatttgcctttatattacagtacttcttaatgaagtaaacccaacaaaactagaggtatgaattaatgctacacattttaatacacacatttattcagatactcccctttttaaagcccttttgttttttgatttatatactctgttttacagatttagctagaaaaaaaatgtcagtgttttggtgcacctttttgaaatgcaaaactaggaaaaggttaaactggatttttttttttaaaaaaaagaaaaaaaaagaagaaaagtataccagataccaaaagccagctttcttatgttttcctttaaattttcagatttaccttcattctgttttcactgatgtcttttgcaagcctttgattttttttttttttgttacagtttagtaatttatattcaccagtcacttcatatgtcttgaacatctgtatctgtaaacatgaatcaccgtgtgtgtacttacagggctaggatttcagtgttgtcagagtattaccacacagcaacagcaacatacagaagatatgttcactcagataagactgccctaaacaaccattttgtcactcagttatttaactgtgtttagctcatttaaatcaaaatgtgtactttaatctaaaatgttttaataatctgtatttcttataattttaacactatgagctgcctgtataagaaatcaagtaaccagaatgcacctataaattatggagcattgtagattttaccacatcaattcatagcagtaactttaagagggcattgtgcaatagttagttgttttcttgttcagctattttaaaggctgctttaacttgtttgtttgtctttgtatataactacttctaatctaatcactagagttattatattctgttatgtttgaccagaattatatgacaagaactggtgacagtttagtgcctctgcccattgtccatgatttacactaattgtgagcagtcttcttatgtgtcagctcattatttttgaaacatttgcctttaggctgttctttgaggtatcaatgaagtgattgaatttcaataccttaattcagtgcacataatactaatgtaacagcagatgaaaattgataaaacccaaaagagagtcatctaaatttgtagttcctatttctgtgggtttgcctggccatggttggagagggaatggtgtttgatggtaaacacagggtgtttggggatcaaggagcctagattctctccctggatctgtcactaacttgctgcgtgacctgaacacgtcactttacctctctgtgcctcagttttcccatgcatgaaaaataaaataaaataaaacggggattctaatgttaaaaaaaaaaaaaaaaaaaaaaaaaaaaaaaaaaaaaaaaaaaaaaaaaaaaaaaaaaaaaaaaaaaaaacaaaaaaaaaaaaaaaaa

SEQ ID NO: 4067 - DNA, 1863 bp, Homo sapien
agctggaggaggcctgtcgcaggctagctgaggtgtcgaagcccccaaagcagcggtgctgtgtggccagtcagcagagggacaggaatcattcggccactgttcagacgggagccacacccttctccaatccaagcctggctccagaagatcacaaagagccaaagaaactggcaggtgtccacgcgctccaggccagtgagttggttgtcacttactttttctgtggggaagaaattccataccggaggatgctgaaggctcagagcttgaccctgggccactttaaagagcagctcagcaaaaagggaaattataggtattacttcaaaaaagcaagcgatgagtttgcctgtggagcggtgtttgaggagatctgggaggatgagacggtgctcccgatgtatgaaggccggattctgggcaaagtggagcggatcgattgagccctggggtctggctttggtgaactgttggagcccgaagctcttgtgaactgtcttggctgtgagcaactgcgacaaaacattttgaaggaaaattaaaccaatgaagaagacaaagtctaaggaagaatcggccagtgggccttcgggagggcggggggaggttgattttcatgattcatgagctgggtactgactgagataagaaaagcctgaactatttattaaaaacatgaccactcttggctattgaagatgctgcctgtatttgagagactgccatacataatatatgacttcctagggatctgaaatccataaactaagagaaactgtgtatagcttacctgaacaggaatccttactgatatttatagaacagttgatttcccccatccccagtttatggatatgctgctttaaacttggaagggggagacaggaagttttaattgttctgactaaacttaggagttgagctaggagtgcgttcatggtttcttcactaacagaggaattatgctttgcactacgtccctccaagtgaagacagactgttttagacagactttttaaaatggtgccctaccattgacacatgcagaaattggtgcgttttgttttttttttttcctatgctgctctgttttgtcttaaaggtctgagggttgaccatgttgcgtcatcatcaacatttggggggttgtgttggatgggatgatctgttgcagagggagaggcagggaaccctgctccttcgggccccaggttgatcctgtgactgaggctccccctcatgtagcctccccaggcccagggccctgaggcctgctagaatcactgccgctgtgctttcgtggaaatgacagttccttgttttttttgtttctgtttttgttttacattagtcattggaccacagccattcaggaactaccccctgccccacaaagaaatgaacagttgtagggagacccagcagcacctttcctccacacaccttcattttgagttcgggtttttgtgttaagttaatctgtacattctgtttgccattgttacttgtactatacatctgtatatagtgtacggcaaaagagtattaatccactatctctagtgcttgactttaaatcagtacagtacctgtacctgcacggtcacccgctccgtgtgtcgccctatattgagggctcaagctttcccttgttttttgaaaggggtttatgtataaatatattttatgcctttttattacaagtcttgtactcaatgacttttgtcatgacattttgttctacttatactgtaaattatgcattataaagagttcatttaaggaaaattacttggtacaataattattgtaattaagagatgtagcctttattaaaattttatatttttcaaaaaaaaa

SEQ ID NO: 4068 - DNA, 2839 bp, Homo sapien
ctgtctggcgtcctgacatctactttgcatcagtgtcagaaacatttgaaacaaaggttgatgactacagtcaagagtgggcagctcaaacagagaagagttatgagaaatcagagctttctctcgacaggttgaggaccttgctgcagctgaagtggcagcgctcactgtgtgagccgggcgaggctgtgggcctgctggctgcccagagcatcggagagccctccacccagatgaccctcaacaccttccactttgcaggcagaggcgagatgaacgtcaccctgggcattccaaggttgcgggagattctcatggtggccagcgccaacatcaagacacccatgatgagcgtgcccgtgctcaacaccaagaaagccctgaagagagtgaaaagcctgaagaagcaactcaccagggtgtgcttgggggaggtgttgcagaaaattgacgtccaggagtccttctgtatggaagaaaaacagaacaaattccaggtgtaccagctgcggtttcagttcctgccacatgcatattaccagcaggagaagtgcctgagacccgaggacatcctgcgcttcatggaaacaagattctttaaacttctgatggaatccatcaaaaagaagaataataaagcatcagctttcaggaacgtaaacactcgaagagctacacagcgggatctggacaacgctggggagttggggaggagtcggggagagcaggagggtgatgaggaagaggaggggcacattgtggatgctgaagctgaggagggggacgccgatgcctctgatgccaaacgcaaggagaagcaggaggaggaggttgattatgagagtgaggaagaggaggagagggagggcgaggagaacgacgatgaagacatgcaggaggaacgaaatccccacagggaaggtgctcgaaagacccaagagcaagatgaagaggtgggcttaggcactgaggaggacccgtcccttcccgccctcctgacgcagccccggaaacccacccacagccaggagccccaggggcccgaggccatgaagcgccgggtccaggctgtgcgtgagatccacccgttcatagatgactaccagtacgacaccgaggagagcctgtggtgccaggtgacagtgaagctccctctgatgaagatcaactttgacatgagctccctggtagtatctttggcccatggtgccgtcatctatgcgaccaagggcatcactcggtgcctcctgaatgaaacaaccaacaataagaacgagaaggagcttgtgctaaacacagaaggaatcaacctcccagagctattcaagtatgcagaggtcctggatctgcgccgcctctactccaacgacatccacgccatagccaacacgtatggcattgaggccgcgctgcgggtgatcgagaaggagatcaaggatgtgtttgccgtgtatggcatcgcggtcgaccctcgccatctctccctggttgctgattatatgtgcttcgagggtgtttacaagccactgaatcgctttgggatccggtcaaactcttccccgctacagcagatgacatttgaaaccagcttccagtttctgaagcaagccaccatgctgggatcccacgatgagctgaggtctccttctgcctgccttgtggtcgggaaggtcgtcaggggcgggacaggcctgttcgagctcaagcagcctctgagatagcagctaccccggcaccatctgcccagctccaaggacccttggtgagggcgtggcccagcctgccttctgcatgagaggaccaggagactggaatccagggcagttccaagtgacagtacagagcacagcagcgaccttgggcctgaaagcagtgggcctctgagctgggccagcttcacctggaaagtgacagagttgctcatccttgcccctccctgtctctggatttttatcaaggtttaccaagtcttctgagtccccctgagatggctggggcctcacatgtgctgcaggaggcctctgtggcataacccctaaggagaagtcctgattcacgattcactgagaagaccaaggggaagccatgctttgctgctggggaccccaggcacctccagagtagggaagcggggttcttttgctgtgagtggccagggacaacagacaagattcctgggggctcccgatgagcaggaacgtggagcctgctgcccaaggcctgctccttccggctgctccagcccctgggggcagagtccacaaagagtccccatcaagacttcttccctgagtcaagtacagcgtagcatagtcctccacccacccaacctctctgcctggccagggtcctggccctgccactgtgtggcgaggtgtccttctagaccacatcagccccaaggctgggagcagtcgctccagggccgcagcagttcactcccacacatagaacccaggtcactgctggggcgattgaacaggttgcctggcttttctctgctgtcagtttggtgtggaggcctatgttctgccccatacaccccacaggccctgcttatgggaaggaacacaggcctccagcccagaggactgtgccgccctgttcttggccgtccacgtttcctctccctctagcaccagcaatacatttccctggcatggacagaaaagacagagaggacttatacaaaggctttgtaaaaccagaggctagcttctatctttgtctactgttatttcagctcagggcgggtaattaacatcattggaactagctattaggaaagaaaaaaaacttggttttttttacaaaaaaaaaaaaaaaaaaaaaaaaaaaa

SEQ ID NO: 4069 - protein, 495 aa, Homo sapien [sequence omitted]

SEQ ID NO: 4070 - DNA, 1506 bp, Homo sapien
cagataggcgacacgcggcgggcgctgaggcgggaatggctgctgtactgcagcgcgtcgagcggctgtccaatcgagtcgtgcgtgtgttgggctgtaacccgggtcccatgaccctccaaggcaccaacacctacctagtggggaccggccccaggagaatcctcattgacactggagaaccagcaattccagaatacatcagctgtttaaagcaggctctaactgaatttaacacagcaatccaggaaattgtagtgactcactggcaccgagatcattctggaggcataggagatatttgtaaaagcatcaataatgacactacctattgcattaaaaaactcccacggaatcctcagagagaagaaattataggaaatggagagcaacaatatgtttatctgaaagatggagatgtgattaagactgagggagccactctaagagttctatatacccctggccacactgatgatcacatggctctactcttagaagaggaaaatgctatcttttctggagattgcatcctaggggaaggaacaacggtatttgaagacctctatgattatatgaactctttaaaagagttattgaaaatcaaagctgatattatatatccaggacatggcccagtaattcataatgctgaagctaaaattcaacaatacatttctcacagaaatattcgagagcagcaaattcttacattatttcgtgagaactttgagaaatcatttacagtaatggagcttgtaaaaattatttacaagaatactcctgagaatttacatgaaatggctaaacataatctcttacttcatttgaaaaaactagaaaaagaaggaaaaatatttagcaacacagatcctgacaagaaatggaaagctcatctttagtttcagattaaagaaagctttgttttattttgctttgagagaatggtatgttttcttaactataggttattttatagagaatataaaagtataaaacattaaaaataaccctagatatactttaaaataatgttatatttatgctaaaatatgtaaattacactatacaaccatatgataggttatttctctaaccttgtcttctaacgttttaccaaaaattcataatctaatagtttatcagttttcaatagattaaataaaatgattactttaaaaataataaaatttatctaatttaaagttgatattatttttggccgttagttatctattactagtgatcagttatactgttttctatagctactttatttaacagcacagatttctatgcacctttactctttcctcaacccttgtctctatctgtacataattgctttgtcttgatgtttctatcaactatatcatgactatctattggttccataactctgtatcatgtgtattttcttattctggtataccacaaatgattcatgcaaatgaatttttggtgattgaaaaatattaaattcccaatttaaagtattatatgata

SEQ ID NO: 4071 - protein, 288 aa, Homo sapien
MAAVLQRVERLSNRVVRVLGCNPGPMTLQGTNTYLVGTGPRRILIDTGEPAIPEYISCLKQALTEFNTAIQEIVVTHWHRDHSGGIGDICKSINNDTTYCIKKLPRNPQREEIIGNGEQQYVYLKDGDVIKTEGATLRVLYTPGHTDDHMALLLEEENAIFSGDCILGEGTTVFEDLYDYMNSLKELLKIKADIIYPGHGPVIHNAEAKIQQYISHRNIREQQILTLFRENFEKSFTVMELVKIIYKNTPENLHEMAKHNLLLHLKKLEKEGKIFSNTDPDKKWKAHL

SEQ ID NO: 4072 - DNA, 441 bp, Homo sapien
  Unsure 403: Unknown base
  Unsure 426: Unknown base
tttgcaaaggctgtttgcttttcatgtctataggtctgtcattgtcctttttcaaagcatttctgaagttattcctacttggatatagttaatggaattggcttaatttgatgacataataaatcacttataaaattttaaatatcaagtgaaaatttagaaaggccattactattctataaaccttataaacttgctctgggagaatgcattctaaattatatatagtgtttcagctcccattgtgggtgttcatagtcttctagggaacagataaacttaagtattcaattcactcttgggcattttttctttaatatagggctttttagcctatttttgggaaaactgcttttcttctgaggaaccttattctggaatgtcatccactttacccaaaccnttctaaggtccagaggctaaccnaggtactggtttagg

SEQ ID NO: 4073 - DNA, 1786 bp, Homo sapien
gacaaaccccattccgctttgccagaagaggtgcaagaattgtttatccgtgattatggagagatttttaatgtccagttaccggataaagaagaacggacaaaattttttgaagatttaattctaaaacaagctgctaagcctcctatatcaaaaaagaaagcagttttgcaggctttggaggtactcccagtagcaccaccacctgagccaagatcactgacagcagaagaagtgaaacgactagaagaacaagaagaagatacatttagagaactgaggattttcttaagaaatgttacacataggcttgctattgacaagcgattccgagtgtttactaagcctgttgaccctgatgaggttcctgattatgtcactgtaataaagcaaccaatggacctttcatctgtaatcagtaaaattgatctacacaagtatctgactgtgaaagactatttgagagatattgatctaatctgtagtaatgccttagaatacaatccagatagagatcctggagatcgtcttattaggcatagagcctgtgctttaagagatactgcctatgccataattaaagaagaacttgatgaagactttgagcagctctgtgaagaaattcaggaatctagaaagaaaagaggttgtagctcctccaaatatgccccgtcttactaccatgtgatgccaaagcaaaattccactcttgttggtgataaaagatcagacccagagcagaatgaaaagctaaagacaccgagtactcctgtggcttgcagcactcctgctcagttgaagaggaaaattcgcaaaaagtcaaactggtacttaggcaccataaaaaagcgaaggaagatttcacaggcaaaggatgatagccagaatgccatagatcacaaaattgagagtgatacagaggaaactcaagacacaagtgtagatcataatgagaccggaaacacaggagagtcttcggtggaagaaaatgaaaaacagcaaaatgcctctgaaagcaaactggaattgagaaataattcaaatacttgtaatatagagaatgagcttgaagactctaggaagactacagcatgtacagaattgagagacaagattgcttgtaatggagatgcttctagctctcagataatacatatttctgatgaaaatgaaggaaaagaaatgtgtgttctgcgaatgactcgagctagacgttcccaggtagaacagcagcagctcatcactgttgaaaaggctttggcaattctttctcagcctacaccctcacttgttgtggatcatgagcgattaaaaaatcttttgaagactgttgttaaaaaaagtcaaaactacaacatatttcagttggaaaatttgtatgcagtaatcagccaatgtatttatcggcatcgcaaggaccatgataaaacatcacttattcagaaaatggagcaagaggtagaaaacttcagttgttccagatgatgatgtcatggtatcgagtattctttatattcagttcctatttaagtcatttttgtcatgtccgcctaattgatgtagtatgaaaccctgcatctttaaggaaaagattaaaatagtaaaataaaagtatttaaactttcctgatatttatgtacatattaagataaatgtcatgtgtaagataactgataaatattggaactttgctagaacaagaccctgtagtaatagtaataatagttgaagtttggccaactcttaataaagttattttggtaactaaaaaaaaaaaaaaaaaaaa

SEQ ID NO: 4074 - protein, 362 aa, Homo sapien; identical to SEQ ID NO: 3546

SEQ ID NO: 4075 - DNA, 1420 bp, Homo sapien
tttatagttaaaaataggaaagatttaattaaagcaacagatagttcagacccattgaaaccctatcaagacttcattatagatgtaagtatatgctaggcttggtcagaaatatgaagtatcgtcacgaatttagaattaatttattaaaactaagatctacaaatctgtgaattttacttattttaaatgaaaaaatttatgttgagtatttaaattttaggataagattggaagtggatgttttcatgtgtgacgaaactaaatgtttgattttgacacgtagtctagggaacctgatgcaactactcgtgtatgtgaactactgaagtaccaaggagagcactgtctcctaaaggaaatgcagcagtggtccattcctccatttcctgtaagtggccatgacatcagaaaagtgggcatttcttcaggaaaagaaattggggctctattacaacagttgcgagaacagtggaaaaaaagtggttaccaaatggaaaaagatgaacttctgagttacataaagaagacctaaaactgatggctactaaaaagcagagcatttctggtaagactaaattttctcccctccctcttaatgaggttttagagactacaccagaataaaagacagtttaggggacctctatagaacaacaagggtcttattttgtgaattatatatttcaagaactaaacagagatccacctttctggatctgatttatatcactgaaatgtacagttcttttggaatagtttcacctgagaaaacatagttggctattatctatcttaacctgttcaggcttttaaaaaaaactgtttttgcatagggtagtactaagatcttaaaaagtggtaactgtcttgaagaaaaaacgtttattgtttgtttgcaattgaaataacagggttaccttaacaatgactgtccatgatgtgtcagttcttatctgaattccaaaataaacctgtgcttaaaaaagaaataattgaccaagtaagtttgcataaaatgtgaatactaaatgtgtccccagttgctggcattcatatgtacaggatttgttctagcaagctatgcttcagtatgtggttgatatttttctgtcacaatgatttctttatgcatgcagagcctgggaaagtcatgggattaacttgagggtcactattgagcctattaattaattattgttttaataaaacaaacattggtattggaagataaatatgtttatgtggtatctgacaatgtgtattaggtgtcatatacaatggtaatatgcctgtctttaaagtgttattttattaattaaaaggatatggctattattatatattctctaaagaaagatttattctctaaagatttgagtcctaaatgctttcatcaggtaaataaaatgtataatac

SEQ ID NO: 4076 - protein, 30 aa, Homo sapien
MAIIIYSLKKDLFSKDLSPKCFHQVNKMYN

SEQ ID NO: 4077 - DNA, 2667 bp, Homo sapien
ggcacgaggattatttttggtgattaattttctgggggggactgggacgcggggcccggcggcgcggccccgcatcgcagcggccgggcagcggggcctgggacgcgccccgaggaggagcggggcggcgcaggcggagagaacattgaaagtattctctaagctatttgaagagagtgactaaatgcacctgggtcaggctgtctgtgggtatgaagtggttgggagaatccaagaacatggtggtgaatggcaggagaaatggaggcaagttgtctaatgaccatcagcagaatcaatcaaaattacagcacacggggaaggacaccctgaaggctggcaaaaatgcagtcgagaggaggtcgaacagatgtaatggtaactcgggatttgaaggacagagtcgctatgtaccatcctctggaatgtccgccaaggaactctgtgaaaatgatgacctagcaaccagtttggttcttgatccctatttaggttttcaaacacacaaaatgaatactagcgcctttccttcgaggagctcaaggcatttttcaaaatctgacagtttttctcacaacaaccctgtgagatttaggcctattaaaggaaggcaggaagaactaaaggaagtaattgaacgttttaagaaagatgaacacttggagaaagccttcaaatgtttgacttcaggcgaatgggcacggcactattttctcaacaagaataaaatgcaggagaaattattcaaagaacatgtatttatttatttgcgaatgtttgcaactgacagtggatttgaaatattgccatgtaatagatactcatcagaacaaaatggagccaaaatagttgcaacaaaagagtggaaacgaaatgacaaaatagaattactggtgggttgtattgccgaactttcagaaattgaggagaacatgctacttagacatggagaaaacgacttcagtgtcatgtactccacaaggaaaaactgtgctcaactctggctgggtcctgctgcgtttataaaccatgattgcagacctaattgtaagtttgtgtcaactggtcgagatacagcatgtgtgaaggctctaagagacattgaacctggagaagaaatttcttgttattatggagatgggttctttggagaaaataatgagttctgcgagtgttacacttgcgaaagacggggcactggtgcttttaaatccagagtgggactgcctgcgcctgctcctgttatcaatagcaaatatggactcagagaaacagataaacgtttaaataggcttaaaaagttaggtgacagcagcaaaaattcagacagtcaatctgtcagctctaacactgatgcagataccactcaggaaaaaaacaatgcaagtaagtaagggagatttgataagcatatcttttaaaagtattttcacacaatttgctttataaagtgtgcttcagtagttttaaacttttaaatactcagagagactgggacttgtgagctttggctgcacttcaaggctctagacgtgatttgagtagaggcacagtctgtatcccatctctaacttcagtaccgtcctctagactatttttcttgaataccttggtaactggatatgagttcttcatcatatgttccaaggtcatcatatgttttaaacattttcaaggtgttagagactgtgatgatgtcgctaagtcctgcaagaagacaaaaggactgagtagaattaaattagactctatacattccagtgcctagccagtttgttagaaaagatgatggacttggggaattcatagcttctggccttaaggcttccaccttttcattgcttgctgacctttttcaaaacgaactgactcagttcagcagaccaccagtaccagactcagaattgtgatagaggagcattttgaacagtgccgtattgtgacatgctgtattggctactccagaaagtaggagtaaagatggaaaggagaaagaagcaacctctgagattccagtggtgtgtgggggcaagatctgatggaaactgaaaaagagaacgaagactaaacaaagagaaaggaaagagaagaaaccctaaatgggcaaaggaaagcacatcctgtttgcggagctttgaaatattggaaccatttctaattgctcctgtttttctgggtaacaccagttttctgtagttgccactaaagcagtagactcttgagtctcacttgtctctgagagagacagaagttagaaagttttgacttggcgattccgaaagtatgcctttgttggcacttaaatgtccagtgagacttcttggcaccttagagccctctgagatactgattattttaggttcttctccctactttcagatgttttcagcccaacactgggtgctctcttccactacagagaatcctgaagaaaagggaaggtgtttcccatgatggtgaatgtcactgccatgaattcctgaatctacctgctgctgggagtcagagtccaagcataacccgtgtagcataaaagcagcgctgtagccctattccagtctttttcgttaatgtccagagtgaacaacaagagttagtcaatcattaactgttgactgttgattctcataataaatgcagcataacgacaaaaaaaaaaaaaaaaaa

SEQ ID NO: 4078 - protein, 384 aa, Homo sapien
MVVNGRRNGGKLSNDHQQNQSKLQHTGKDTLKAGKNAVERRSNRCNGNSGFEGQSRYVPSSGMSAKELCENDDLATSLVLDPYLGFQTHKMNTSAFPSRSSRHFSKSDSFSHNNPVRFRPIKGRQEELKEVIERFKKDEHLEKAFKCLTSGEWARHYFLNKNKMQEKLFKEHVFIYLRMFATDSGFEILPCNRYSSEQNGAKIVATKEWKRNDKIELLVGCIAELSEIEENMLLRHGENDFSVMYSTRKNCAQLWLGPAAFINHDCRPNCKFVSTGRDTACVKALRDIEPGEEISCYYGDGFFGENNEFCECYTCERRGTGAFKSRVGLPAPAPVINSKYGLRETDKRLNRLKKLGDSSKNSDSQSVSSNTDADTTQEKNNASK

SEQ ID NO: 4079 - DNA, 4602 bp, Homo sapien
ggggaagatggcggctgctcctttggaggagcgggattgagaggatcggggtggggagaccaaacaagagagacatttctggctctgaaggcgaacgcttcgctggccatttaggagctctgctcaaagccagacgtatcctagaaggaaaacatcaccatggctacagaaattggttctcctcctcgttttttccatatgccaaggttccagcaccaggcacctcgacagctgttttataagcgacctgattttgcacaacagcaagcaatgcaacagcttacttttgatggaaaacgaatgagaaaagctgtgaaccgaaaaaccatagactacaatccatctgtaattaagtatttggagaacagaatatggcaaagagaccagagagatatgcgggcaattcagcctgatgcaggttattacaatgatctggtcccacctataggaatgttgaataatcctatgaatgcagtaacaacaaaatttgttcggacatcaacaaataaagtaaagtgtcctgtatttgttgttaggtggactccagaaggaagacgcttggtcactggagcttctagtggggagtttaccctgtggaatggactcactttcaattttgaaacaatattacaggctcacgacagcccagtgagggccatgacgtggtcacataatgacatgtggatgttgacagcagaccacggaggatatgtgaaatattggcagtcgaacatgaacaacgtcaagatgttccaggcacataaggaggcgattagagaggccagtttctcacccacggataataaatttgctacatgctctgatgacggcactgttagaatctgggactttcttcgttgccatgaggaaagaattctccgagggcatggtgctgatgtgaaatgtgtagactggcatccaaccaaagggttagttgtttcaggaagtaaagatagtcaacagccaatcaagttctgggatcccaagactgggcagagtcttgcaacacttcatgcccataaaaacacagtaatggaagtgaaattaaacctcaatggcaattggctactcacagcatcacgtgatcatctctgtaaactttttgatatcagaaacctaaaagaagagcttcaagtcttccgaggtcataagaaagaagccacagctgtggcctggcatcctgttcatgaaggactttttgccagtggagggtctgatggttctttgttattctggcatgttggggtagagaaggaagtgggtgggatggagatggctcacgaagggatgatctggagtctggcttggcatcctcttgggcatattctctgctcaggctcaaatgaccatactagcaaattctggactcgaaaccgaccaggtgataaaatgcgagatcgatataatctaaaccttttacctggaatgtctgaagatggagtagaatatgatgacctcgaacctaatagcctggcagtaattccaggaatgggaataccagaacaactaaaattagctatggaacaagaacagatggggaaagatgaatcaaatgaaattgaaatgacaattccaggtttagattggggaatggaggaagtgatgcaaaaggatcagaaaaaagtacctcagaagaaagttccttatgcaaaacccattcctgctcagttccagcaggcttggatgcaaaataaagttccaattcctgctccaaatgaggtgctgaatgacagaaaagaagacattaaattggaagagaagaaaaaaacacaagcagaaattgagcaagaaatggctacattacaatatactaacccacaacttctggagcaacttaaaattgaaagacttgcacagaaacaagttgagcaaattcagcctcctccctcatctggcacccctctcctcggaccccagccttttccaggacaaggtccaatgtctcagattcctcaaggttttcaacagccccatccatctcagcagatgccaatgaacatggctcaaatggggcctccaggtccacagggacagtttaggcctcctggaccccagggacaaatgggaccacaaggtcctccactgcatcagggaggtggggggccacaaggattcatgggaccacaggggccccagggcccgccccaggggttgccacggcctcaggacatgcatgggccccaaggaatgcagaggcatcctggacctcatggccctttgggacctcaagggccacctggaccacaaggtagttctggtcctcaaggtcatatgggtcctcagggtccacctggcccacagagtcacataggcccccaaggcccgcctggccctcagggtcacttgggcccacaggggcctccgggtactcaaggtatgcagggaccacctggtcccagaggaatgcaagggcctcctcatcctcatgggatccaaggcggaccagggtctcaagggatccaaggtcctgtgtctcagggacctctgatgggattgaatccaagaggaatgcaggggcctccaggcccccgggagaaccagggtcctgctccccaagggatgattatgggccacccgcctcaagagatgagaggacctcaccctccaggtggactactgggacacggccctcaggaaatgagaggtcctcaggagatccgaggcatgcaggggcctccaccccaaggatcaatgctgggacctccccaggaattgcgagggcctccaggctcacaaagtcagcaggggccgccccagggctctttaggacctccaccccagggtggcatgcaaggaccccccggacctcagggacagcagaacccagcaagagggccacatccatctcaagggccaataccattccagcaacagaaaacgcctctgctaggtgatgggccccgggcccccttcaaccaggaaggacagagcacaggccccccacccctgataccaggcctagggcagcagggagcacaaggtcgcattccccctctgaaccccggacaaggacctggccccaacaaaggtgactcccgcggccctccaaaccatcacatgggcccgatgtcagagaggcggcatgagcagagcggcgggcctgagcatgggcccgagagggggcctttccggggtggccaggactgcaggggtccccctgataggcgtggccctcacccagacttccccgatgacttcagcagaccagatgacttccaccctgacaagcgctttggccaccggttacgtgaatttgaggggcgaggaggacctttaccgcaagaagagaagtggaggcgagggggccctgggcctccgtttccccctgatcacagggaattcagcgagggggatggccggggtgcagcccgaggccctccgggggcatgggaaggccgcaggcccggagatgaacgtttcccccgggatcccgaggacccacgttttcgagggcgcagagaagaaagtttcagaagaggagccccgccgaggcatgagggccgtgctccccccagaggaagggatggttttcctggtcctgaagactttggtccagaggagaattttgatgcttctgaggaagcggcccgaggacgagatctcagaggtcgaggtcggggtaccccacgaggaggaaggaagggtttacttcccactcctgacgagttccctcgctttgaaggagggcggaagccagattcctgggatggaaacagagagcctgggccaggtcatgaacattttcgtgatactccccgccctgatcatccccctcacgacggtcattccccagccagcagagaacgctcctcttctctccaaggcatggacatggcatccctacctccccgaaagcgcccctggcatgatggcccaggcacttctgagcacagagagatggaggccccaggaggcccttctgaagaccgaggaggcaaaggccgagggggcccaggacctgctcagagagtgcccaaatctgggcgttccagctccttagacggagagcaccacgatggataccacagagatgaaccttttgggggccctccaggcagtggcaccccttctcgagggggccggagtggcagtaactggggtagagggagtaacatgaactctggcccgccgaggcgaggagcttcacggggtggtggaaggggtcggtagaagctggaactgagtaccctgaggcctttttggacagtatgtaagaactttttgtggactcaccaagagaaacaaaaggaagcctgcaccattgtagccctgaacttttttttgggcacctgaatcccaggaaccctcaatgaggttttcaagatgaagagactgctgccagctaccagcctggctggccctgtcctgtccaccctcattgccccaactcccatgttgttttgtgaagataaaagctgggatctttttctttttttttaagtctcacaagacatggggcatttccacaaatttaagttcctgtccatttggaaatttgtttttatgtgtacagtttgtcagagaaaaacaaagtttttgtatgaatacagaatgtgatttacgcaagaaaaaaaaaaaaaaaaaaaaaaaaaaaaaaaaaaa

SEQ ID NO: 4080 - protein, 1336 aa, Homo sapien
MATEIGSPPRFFHMPRFQHQAPRQLFYKRPDFAQQQAMQQLTFDGKRMRKAVNRKTIDYNPSVIKYLENRIWQRDQRDMRAIQPDAGYYNDLVPPIGMLNNPMNAVTTKFVRTSTNKVKCPVFVVRWTPEGRRLVTGASSGEFTLWNGLTFNFETILQAHDSPVRAMTWSHNDMWMLTADHGGYVKYWQSNMNNVKMFQAHKEAIREASFSPTDNKFATCSDDGTVRIWDFLRCHEERILRGHGADVKCVDWHPTKGLVVSGSKDSQQPIKFWDPKTGQSLATLHAHKNTVMEVKLNLNGNWLLTASRDHLCKLFDIRNLKEELQVFRGHKKEATAVAWHPVHEGLFASGGSDGSLLFWHVGVEKEVGGMEMAHEGMIWSLAWHPLGHILCSGSNDHTSKFWTRNRPGDKMRDRYNLNLLPGMSEDGVEYDDLEPNSLAVIPGMGIPEQLKLAMEQEQMGKDESNEIEMTIPGLDWGMEEVMQKDQKKVPQKKVPYAKPIPAQFQQAWMQNKVPIPAPNEVLNDRKEDIKLEEKKKTQAEIEQEMATLQYTNPQLLEQLKIERLAQKQVEQIQPPPSSGTPLLGPQPFPGQGPMSQIPQGFQQPHPSQQMPMNMAQMGPPGPQGQFRPPGPQGQMGPQGPPLHQGGGGPQGFMGPQGPQGPPQGLPRPQDMHGPQGMQRHPGPHGPLGPQGPPGPQGSSGPQGHMGPQGPPGPQSHIGPQGPPGPQGHLGPQGPPGTQGMQGPPGPRGMQGPPHPHGIQGGPGSQGIQGPVSQGPLMGLNPRGMQGPPGPRENQGPAPQGMIMGHPPQEMRGPHPPGGLLGHGPQEMRGPQEIRGMQGPPPQGSMLGPPQELRGPPGSQSQQGPPQGSLGPPPQGGMQGPPGPQGQQNPARGPHPSQGPIPFQQQKTPLLGDGPRAPFNQEGQSTGPPPLIPGLGQQGAQGRIPPLNPGQGPGPNKGDSRGPPNHHMGPMSERRHEQSGGPEHGPERGPFRGGQDCRGPPDRRGPHPDFPDDFSRPDDFHPDKRFGHRLREFEGRGGPLPQEEKWRRGGPGPPFPPDHREFSEGDGRGAARGPPGAWEGRRPGDERFPRDPEDPRFRGRREESFRRGAPPRHEGRAPPRGRDGFPGPEDFGPEENFDASEEAARGRDLRGRGRGTPRGGRKGLLPTPDEFPRFEGGRKPDSWDGNREPGPGHEHFRDTPRPDHPPHDGHSPASRERSSSLQGMDMASLPPRKRPWHDGPGTSEHREMEAPGGPSEDRGGKGRGGPGPAQRVPKSGRSSSLDGEHHDGYHRDEPFGGPPGSGTPSRGGRSGSNWGRGSNMNSGPPRRGASRGGGRGR

SEQ ID NO: 4081 - DNA, 2272 bp, Homo sapien
gtgaggctggcggtggcgacaaccgaggaggaggggcgggacgccgtggagcacggcgaccggctgagcgtcatggagggctcaggggagcagccgggcccacaaccacagcatcccggagaccaccgcatccgcgacggcgacttcgtggtgctgaaacgtgaagatgtgtttaaagcagtacaagtccagcggagaaaaaaagtaactttcgaaaaacagtggttctacctggataacgtcattggccatagttatggaactgcatttgaagtgaccagtggaggaagtctacagcccaagaagaagagggaagagcctactgcagagactaaagaagcgggcactgataatcgaaatatagttgatgatgggaaatctcagaaacttactcaagatgacataaaagctttgaaggacaagggcattaaaggagaggaaatagttcagcagttaattgaaaatagtacaacattccgagacaagacagaatttgcccaagataaatatattaaaaagaagaaaaaaaaatatgaagccatcattactgttgtgaagccatccacccgtattctttcaattatgtattatgcaagagaacctggaaaaattaaccacatgagatacgatacactagcccagatgttgacgttgggaaatatccgtgctggcaacaaaatgattgtgatggaaacgtgtgcaggcttggtgctgggtgcaatgatggaacgaatgggaggttttggctccattattcagctataccctggaggaggacctgttcgggcagcaacagcatgttttggatttcccaaatcttttctcagtggtctttatgaattccctctcaacaaagtggacagtcttctacatggaacattttctgccaagatgttatcttcagagccaaaagacagtgctttggttgaagaaagtaatggcacactggaggaaaaacaggcttctgaacaagagaatgaagacagcatggcagaggccccagagagcaaccacccagaagaccaggaaacaatggaaacaatttctcaagatccagaacataaggggcctaaagagagaggaagcaaaaaagattatattcaggaaaaacagaggagacaagaagagcagaggaaaagacatttagaggctgccgctctgctgagtgaaagaaacgcagatggtttaattgtagctagtcgtttccaccccactcccctgctgctgtctttgctggactttgtggccccttcaaggccgtttgtggtctactgtcagtacaaagagcctctgttggaatgctacacaaaactgcgggagaggggaggggtcatcaacctcaggctgtctgaaacctggctcagaaattatcaggttttgccagatcgaagtcatcctaaactgctgatgagtggaggtgggggttatcttctctccggcttcaccgttgccatggacaaccttaaagcagacaccagcctcaaatctaatgcaagcactttagaatcacacgagactgaggagcctgcagctaaaaaacgaaaatgcccagagtctgactcttaacccttttgagaattgctctgaattttgttctcaggcattatacagttagtaattaaactttaaatgccattactacttgttttttcatatcccaagaataagaacatgtctatgtacccgtttctaggaaggaggagtatatgccttttgtctatttctgacacagatgcatttggtctgtcaaaactgcaaccatggggtatgtagtatgaccaactgcatttaacaaaactcctctaagtacttctaaatattctgtgcaaatatcttgagaacttcaacatcctaaaaatgtgtttctacaagactttatattttaagctaagtggaataatacaacgtaactaaaacatggcgggtaccgaaaggagggcaattcatggaagaaatttcctctgttcattccgttctcttcaacctaagcaatatggatgtgtgagtgtgtgatttattatggtaccaaaaatgtccaccttctttcctgcagcggaataagcttttttgaaatgctgaggttttattttaatagttgacaacctgggaaagttctgagtatttattttactgctcttttttgtgcatagaaaggtttagtagggtacttttttgcattaatttgccaatactcttattctttgttctaaataaagtgactagaatttttgtgtactattcaattaaaggaaaaaaaaaaaaaaaaaaaaaa

SEQ ID NO: 4082 - protein, 497 aa, Homo sapien
MEGSGEQPGPQPQHPGDHRIRDGDFVVLKREDVFKAVQVQRRKKVTFEKQWFYLDNVIGHSYGTAFEVTSGGSLQPKKKREEPTAETKEAGTDNRNIVDDGKSQKLTQDDIKALKDKGIKGEEIVQQLIENSTTFRDKTEFAQDKYIKKKKKKYEAIITVVKPSTRILSIMYYAREPGKINHMRYDTLAQMLTLGNIRAGNKMIVMETCAGLVLGAMMERMGGFGSIIQLYPGGGPVRAATACFGFPKSFLSGLYEFPLNKVDSLLHGTFSAKMLSSEPKDSALVEESNGTLEEKQASEQENEDSMAEAPESNHPEDQETMETISQDPEHKGPKERGSKKDYIQEKQRRQEEQRKRHLEAAALLSERNADGLIVASRFHPTPLLLSLLDFVAPSRPFVVYCQYKEPLLECYTKLRERGGVINLRLSETWLRNYQVLPDRSHPKLLMSGGGGYLLSGFTVAMDNLKADTSLKSNASTLESHETEEPAAKKRKCPESDS

SEQ ID NO: 4083 - DNA, 3013 bp, Homo sapien
tttacataagcaaccagtggagcccttgcctgggtttaaatcagcgaaaccaatggtatttgcaggaatgtatcctctagaccaatctgaatataacaatctgaagagtgctatagaaaaactgactttaaatgattccagtgtgaccgttcatcgggatagtagccttgctctgggtgctggctggaggctaggatttcttggacttttgcacatggaagttttcaaccagcgactggagcaagaatataatgcttctgttattttaacaacccctactgttccatataaagctgtactgtcatcatcaaaattgataaaggaacatagagaaaaagaaattacaattatcaatcctgcacaattccccgataaatcaaaagtaacagaatatttggagccagttgttttgggcactattatcacaccagatgaatacactggaaaaataatgatgctttgcgaggctcgaagagcagttcagaagaatatgatatttattgatcaaaatagagttatgcttaaatatctctttcctttgaatgaaattgtggtagatttttatgactctttgaaatccctatcttctggatatgctagttttgattacgaagatgcaggctaccagactgcagaacttgtaaaaatggatattctactgaatggaaatactgtagaggagctagtaactgttgtacacaaagacaaagctcattcaattggcaaagccatatgtgaacggctgaaggattctcttcctaggcaactgtttgagatagcaattcaagctgctattggaagtaaaatcattgcaagagaaactgtgaaagcctataggaaaaacgttttggcaaaatgttatggtggtgatattacccgaaaaatgaagcttttgaagagacaagcagaagggaaaaaaaaagctgaggaaaattggcaacgttgaagttccaaaagatgcttttataaaagttctgaaaacacaatcttctaaataattggtgggaaaacaaagaattttcattgcaatttgtaatatgctgacaacagaaagaaaattataaaatttgcttgttactttcagggtattcaggttcaaataacctactagtctttcgttgaaagggagtagttagtgggtaggcaagagcttagattttgaagccatgttgcctgttctcaaatatctgttccaaccactcactagtaaggtgaccgtggccagattaacctttgtttcctcttcagtaaaatcgagattatactactacctacataagttgttgttgtgaagattaaatgaggtaatacgttaaatattcagaggtgcaagacacatagtaagcactcaattgtaactacagttaagtccttaaatgccatcgaaaggttcttagaaactgactttaagcaaaatgacacgtagcacaatgttcttgaatgatgtcatttccttaagtggtttgtaacatcgatgaggaaaaaaaattggtttatgcgtcatttcattttatttttatttattttttgagacagagtcttgccctgtcgcccaggctggagtgcaatggcacaatctcgactcactgcaacctctgcctcctgggttcaagagattctcctgcctcagcctccattacaggcgtgcaccaccatgctcggctaattttttgtatctttagtagagtcggggtttcaccatgttggccaggctggtcttgaactcctgacctcgtgatccacccaccgtggcctcccaaagtgctgattacaggtgtgagccaccatgcccagccatgtcatttcatttaaagtcacaatttccatgaatctcaacaagtgaggacctgctatattttgttgcatgcagtttttctttacggacactaaaaggccccatacttaagattccatctactttaagtttaaaggattttcagaatcaccttaagtgtcaaatttgttagcaggattaattgatatgaattcacttattaaacagtaaactcaaataacatagacatcaaataacagacatctgctctagttaatgataaaatgtttatagattttatcaggtggttagtttgaaactaaatggtttacatctaaattaagggcaggagctgtctttcagacattcaaaacgcatttgtgtaaaatgacaggtgtttggtattaccaggaactcataatgacattttaataattattgtctaaatttcataatcgaagcgattttagagtagttaacttgagatttcacagccagtaaatggctgtatttctccagagctctcagctcccatgtttattcagccaacgaacaaaccagactgcagactgtattagagcaagacaacatcatttagccattgatttttatcttctaccttgaatgaattgaatgaagaaaatgtcttttagggataaacactatcaaggatgaattttatactaaggttatatgaaagaaaaatctcaaaaccactaagccaaagggaagtcaagctgggaactgattgaggcaaacctgcctcccattttattcctaaataagacagccacaaagataaaatttgctcacaagggaattccttatggacaaagaactcaaagtcttcacatgaaacaaatgcataaatgattgctttctctgtttcatgtttcactaagccagattaaggtataactgactattcctctactctcctctcacatgtaaattgtatattcagtgaaaggctaatcagaaactcaaaaaaatgcaaccctttctctcttacctgcctatgcttgaagcccccgcccctcttcaagttgtcctgcctttcaagaccaatgtacaccttacacatactgattgatgtctcatgtctctctaaaatgtgtaaaaccaagctgtgccccaaccaccttgggcacatgtggtgaggacctcctgaggctgtgtcatgggcacaccttaaccctgggaaaataaactttctaaactgaaaaaaaaaaaaaaaaa

SEQ ID NO: 4084 - protein, 297 aa, Homo sapien
MVFAGMYPLDQSEYNNLKSAIEKLTLNDSSVTVHRDSSLALGAGWRLGFLGLLHMEVFNQRLEQEYNASVILTTPTVPYKAVLSSSKLIKEHREKEITIINPAQFPDKSKVTEYLEPVVLGTIITPDEYTGKIMMLCEARRAVQKNMIFIDQNRVMLKYLFPLNEIVVDFYDSLKSLSSGYASFDYEDAGYQTAELVKMDILLNGNTVEELVTVVHKDKAHSIGKAICERLKDSLPRQLFEIAIQAAIGSKIIARETVKAYRKNVLAKCYGGDITRKMKLLKRQAEGKKKAEENWQR

SEQ ID NO: 4085 - DNA, 2308 bp, Homo sapien; identical to SEQ ID NO: 3565

SEQ ID NO: 4086 - protein, 201 aa, Homo sapien; identical to SEQ ID NO: 3566

SEQ ID NO: 4087 - DNA, 994 bp, Homo sapien
aaacccaaagcggccgccgtaggcgaaggtgaagatggctgcctctgcctttgctggtgcagtgagagcagcttcaggaatcctacggtccctgaatattttgacatcttcaacctaccgcaactgtgtcaagaatgcctctcttatttctgcattgtccactggacgttttagtcatattcagacaccagttgtttcctccactcccagacttaccacatctgagagaaacctgacatgtgggcatacctcagtgatccttaatagaatggcccccgtgcttccaagtgtcctgaagctgccagtcagatctctaacatacttcagtgcaagaaaaggcaagagaaagaccgtgaaagctgtcatcgataggtttcttcgacttcattgtggcctttgggtgaggagaaaggctggctataagaaaaaattatggaaaaagacacctgcaaggaagaagcgattgagggaatttgtattctgcaataaaacccagagtaaactcttagataaaatgacgacgtccttctggaagaggcgaaactgacggcaaagccaaccacttagaagccttccacatctttgtcacctgcctggctcctgctctctgatgtacctctgggtagtgagatggaaatggtgcctgcagaagttggggagaaggatacttttgcacagcctccatgatgtctttattgcaaatatggatgacaagggtctctgttacaggggcctcagagcaccttcgtttctcctctagaccagggacaggtgtagagataaggactggcaaccagagcctcagcatccaaagatggactgaagtgggatggctgacaggcacataacttacgggaaagggaatttcatacatacgatttttgttttgtgggtaggagggcttatcatcaacactgattttataatctgacaataaatgtctttcattaaagagtttaaaaacaaaaaaaaaaaaaaaaaaaaaaaaaaaaaa

SEQ ID NO: 4088 - protein, 170 aa, Homo sapien
MAASAFAGAVRAASGILRSLNILTSSTYRNCVKNASLISALSTGRFSHIQTPVVSSTPRLTTSERNLTCGHTSVILNRMAPVLPSVLKLPVRSLTYFSARKGKRKTVKAVIDRFLRLHCGLWVRRKAGYKKKLWKKTPARKKRLREFVFCNKTQSKLLDKMTTSFWKRRN

SEQ ID NO: 4089 - DNA, 1946 bp, Homo sapien
aggttcgaatctccgccgcttcgcggttgcttctcaacgtccgggccgcatctcggcggcggcgagggctgagcgcgggagctgcctccgagccggagccccagccctaggccctgcgcgagctgccccgccctaccccctccagcgtcctgtcgcctcctcgcccgacttcggcctgtccctctctcgcgcgctcagtcctcgctcttcgccccccgcagctatcggcactcggtctcccgcgcctggcgggctccgcccgagcctctgggcccatggccaagcggcgtgcggccgagccggtgacgttccacgtgccttggaagcggctcctgctttgcgacttcgctgagcagccgccgccaccgcctctctggatccggccgcccggggtcgcgcatgctgggcagctcctcggcgtcccagagcagcaccgaaagcgcaaaatcgacgcagggaccatggcagagccctcggcttcgcccagcaagcgccgtgacagcggggacaacagcgccccgagcggccaggagcgtgaggaccacggtctggagacaggcgatccgccgctgccgccgccgcccgtactgccggggccgggggaggagctcccgggcgcccggctcccggggggcggtggcgacgacggggcggggcgcgcaggacccccgcggggagactggggggtcgcatcgtgccagcacaatgaagaattttggcagtataataccttccaatactggaggaatcctttgcctcctattgatctggcagacattgaagatttaagtgaagacaccctgacagaagcaacacttcagggcaggaatgaaggggctgaggttgacatggagtcctgatgtaaggagccgaagcagtgggattggctgatttgaggagatgtctctaagtgaattctcgtattcttaagggaaaagttattttccatacttgaagttatatttccaaacctgagaaatgaagaaagattgttctgacattaaatacctacagttactactgaacctcttaataaggatttgtcaaggatagagtacagttgtaggggaagtattttatgtatgcattcttagagcaaaaagttttgtttaaattctagaattgaaggtactgatcttataaaaagaaattctagcagttttagaaataggtgggaaaaactcaaatattcctcctatctgcaccaaaaagtttatttgtggtatataaaatgaatattgttttataataacttgttaataaagtactttctaatacattctattgactctgttagttgaacaaatagctgacttgaacatctatgcaaacttaagatgggcgggattgttgtaaaagctattgttttaaaagagctttctaaatgtaaagtagtgataatttcaatttgggtagcgtgtttgcaaagcttccaatatttgatgttggttaagctctactatgggcaactgaagatggataaagaaaaatgaaaactgaatcggtgcctgcttccccctgttttcccaggattagaggaaaaaatttattgtataatcagcttcttggttttgaattgcttcgaggcatggttttattccttattactttagacctgtagttttcaacactgacagcactttaaaaatctttgcctgggcctcactcttgagagattctcatttaatagttctgaggtgggtcttggatataactatttttttaaacacctgtcctgtttccctccattcctctcatgtgcagacagggttgagaaccagtagactaatggtcgtttttcctgtttaaaggagataactaatttgagctgaagcaatgcttcttaattagctttgtttttgttttgctctgttggtggctttgttacaactgaattattgtgttattactatttcattgttaaagaaataaagtaagcaatttgt

SEQ ID NO: 4090 - protein, 194 aa, Homo sapien
MAKRRAAEPVTFHVPWKRLLLCDFAEQPPPPPLWIRPPGVAHAGQLLGVPEQHRKRKIDAGTMAEPSASPSKRRDSGDNSAPSGQEREDHGLETGDPPLPPPPVLPGPGEELPGARLPGGGGDDGAGRAGPPRGDWGVASCQHNEEFWQYNTFQYWRNPLPPIDLADIEDLSEDTLTEATLQGRNEGAEVDMES

SEQ ID NO: 4091 - DNA, 2633 bp, Homo sapien
aaagatgaagagagcaggatttgtaaagccctgtttttatacacttcacatttgcggaaatataatgatgccctcattatcagtgagcatgcacgaatgaaagatgctctggattacttgaaagacttcttcagcaatgtccgagcagcaggattcgatgagattgagcaagatcttactcagagatttgaagaaaagctgcaggaactagaaagtgtttccagggatcccagcaatgagaatcctaaacttgaagacctctgcttcatcttacaagaagagtaccacttaaacccagagacaataacaattctctttgtgaaaaccagagcacttgtggacgctttaaaaaattggattgaaggaaatcctaaactcagttttctaaaacctggcatattgactggacgtggcaaaacaaatcagaacacaggaatgaccctcccggcacagaagtgtatattggatgcattcaaagccagtggagatcacaatattctgattgccacctcagttgctgatgaaggcattgacattgcacagtgcaatcttgtcatcctttatgagtatgtgggcaatgtcatcaaaatgatccaaaccagaggcagaggaagagcaagaggtagcaagtgcttccttctgactagtaatgctggtgtaattgaaaaagaacaaataaacatgtacaaagaaaaaatgatgaatgactctattttacgccttcagacatgggacgaagcagtatttagggaaaagattctgcatatacagactcatgaaaaattcatcagagatagtcaagaaaaaccaaaacctgtacctgataaggaaaataaaaaactgctctgcagaaagtgcaaagccttggcatgttacacagctgacgtaagagtgatagaggaatgccattacactgtgcttggagatgcttttaaggaatgctttgtgagtagaccacatcccaagccaaagcagttttcaagttttgaaaaaagagcaaagatattctgtgcccgacagaactgcagccatgactggggaatccatgtgaagtacaagacatttgagattccagttataaaaattgaaagttttgtggtggaggatattgcaactggagttcagacactgtactcgaagtggaaggactttcattttgagaagataccatttgatccagcagaaatgtccaaatgatatcaggtcctcaatcttcagctacagggaatgagtaactttgagtggagaagaaacaaacatagtgggtataatcatggatcgcttgtacccctgtgaaaatatattttttaaaaatatctttagcagtttgtactatattatatatgcaaagcacaaatgagtgaatcacagcactgagtattttgtaggccaacagagctcatagtacttgggaaaaattaaaaagcctcatttctagccttctttttagagtcaactgccaacaaacacacagtaatcactctgtacacactgggatagatgaatgaatggaatgttgggaatttttatctccctttgtctccttaacctactgtaaactggcttttgcccttaacaatctactgaaattgttcttttgaaggttaccagtgactctggttgccaaatccactgggcacttcttaaccttctatttgacctctgcgcatttggccctgttgagcactcttcttgaagctctccctgggcttctctctcttctagttctattctagtctttttttattgagtcctcctctttgctgatcccttccaagggttcaatatatatacatgtatatactgtacatatgtatatgtaactaatatgcatacatacaggtatgtatatgtaatggttatatgtactcatgttcctggtgtagcaacgtgtggtatggctacacagagaacatgagaacataaagccatttttgtgcttactaccaaaggctgtccactgtagagttgctgtatgtagcaatgtgtatccactctacggtggtcagcttttagtagagagcataaaaatgataaaatacttcttgaaaacttagtttactatacatcttgccctattaatatgttctcttaacgtgtgccattgttctctttgaccattttcctataatgatgttgatgttcaacacctggactgaatgtctgttctcagatcccttggatgttacagatgaggcagtctgactgtcctttctacttgaaagattagaatatgtatccaaatggcattcacgtgtcacttagcaaggtttgctgatgcttcaaagagcttagtttgcggtttcctggacgtggaaacaagtatctgagttccctggagatcaacgggatgaggtgttacagctgcctccctcttcatgcaatctggtgagcagtggtgcaggcggggagccagagaaacttgccagttatataacttctctttggcttttcttcatctgtaaaacaaggataatactgaactgtaagggttagtggagagtttttaattaaaagaatgtgtgaaaagtacatgacacagtagttgcttgataatagttactagtagtagtattcttactaagacccaatacaaatggattatttaaaccaaaaaaaaaaaaaaaaaaaaa

SEQ ID NO: 4092 - DNA, 3211 bp, Homo sapien; identical to SEQ ID NO: 3611

SEQ ID NO: 4093 - protein, 298 aa, Homo sapien; identical to SEQ ID NO: 3612

SEQ ID NO: 4094 - DNA, 5566 bp, Homo sapien
atttttggctgcctctgtcggtctgttcagttaccacgtgaaccgccgacggagacccgtagtgggggaggcggcggcagcgttaagtgagaaaggaaaaaagacaacgaggaaaaaggaggtgtccgggtagggcaacgcggcgacacccgaggcctggtggtggcggcggatcgagatattcaaggctgaagcagctacggaacggcagcggcggcggtcggacaaactgactgaccgagccgggtggtggcgggagcagcgggagcagccggaacgatgccggccgtgagcctcccgcccaaggagaatgcgctcttcaagcggatcttgaggtgttatgaacataaacagtatagaaatggattgaaattctgtaaacaaatactttctaatcccaaatttgcagagcatggagaaaccttggctatgaaaggattaacattgaactgtttggggaaaaaggaagaagcttatgaattggttcgtagaggtttgagaaatgacttgaagagtcatgtgtgttggcacgtttatggccttcttcagaggtcagacaagaagtatgatgaagccattaagtgttacagaaatgcactaaaatgggataaagacaatcttcaaatcttaagggacctttccttactacagattcaaatgcgagatcttgagggttacagggaaacgaggtatcagttacttcagcttcgacctgcgcagagagcatcatggattggttatgctattgcttaccatttattagaagattatgaaatggcagcaaagattttagaagaatttaggaaaacacaacagacatcccctgacaaggtggattatgaatatagtgaactactcttatatcagaatcaagttcttcgggaagcaggtctctatagagaagctttggaacatctttgtacctatgaaaagcagatttgtgataaacttgctgtagaagaaaccaaaggggaacttctgttgcaactatgtcgtttggaagatgctgcagatgtttatagaggattgcaagagagaaatcctgaaaactgggcctattacaaaggcttggaaaaagcactcaagccagctaatatgttagaacggctaaaaatttatgaggaagcctggactaaatatcccaggggactggtgccaagaaggctgccgttaaactttttatctggtgagaagtttaaagaatgtttggataagttcctaaggatgaatttcagcaagggttgcccaccagtcttcaatactttaagatcattatacaaagacaaagaaaaggtggcaatcatagaagagttagtagtaggttatgaaacctctctaaaaagctgccggttatttaaccccaatgatgatggaaaggaggaaccaccaaccacattactttgggtccagtactacttggcacaacattatgacaaaattggtcagccatctattgctttggagtacataaatactgctattgaaagtacacctacattaatagaactctttctcgtgaaagctaaaatctataagcatgctggaaatattaaagaagctgcaaggtggatggatgaggcccaggccttggacacagcagacagatttatcaactccaaatgtgcaaaatacatgctaaaagccaacctgattaaagaagctgaagaaatgtgctcaaagtttacaagggaaggaacatcagcggtagagaatttgaatgaaatgcagtgcatgtggttccaaacagaatgtgcccaggcttataaagcaatgaataaatttggtgaagcacttaagaaatgtcatgagattgagagaaaatcactgatgaccagtttgactttcatacatactgtatgaggaagattacccttagatcatatgtggacttattaaaactagaagatgtacttcgacagcatccattttacttcaaggcagcaagaattgctatagagatctatttgaagcttcatgacaacccccttacagatgagaataaagaacacgaagctgatacagcaaacatgtctgacaaagagctaaagaagctacgtaataaacaaagaagagctcaaaagaaagcccagatagaagaagagaaaaaaaatgcagaaaaagaaaagcagcagagaaatcagaaaaagaagaaggatgatgatgatgaggagataggaggtccaaaagaagaacttattccagagaaactggccaaggttgaaactccattggaagaagctattaaatttttaacaccgttgaagaacttggtgaagaacaagatagagactcatctttttgcctttgagatttactttaggaaagaaaagtttcttttgatgctacaatcagtaaagagggcatttgctattgattctagtcatccctggcttcatgagtgtatgattcgtctctttaatactgcagtgtgtgaaagtaaagatttatctgatacagttagaacagtattaaaacaagaaatgaatcgtctttttggagcaacgaatccaaagaattttaatgaaacttttctgaaaaggaattctgattcattgccacacagattatcagctgccaaaatggtatattacttagatccttctagtcagaagcgagctatagagttggcaacaacacttgatgaatctctcactaacagaaacctccagacatgtatggaggtattggaagccttgtatgatggtagcctaggagactgtaaagaagctgctgaaatttatagagcaaattgtcataagcttttcccttatgctttggctttcatgcctcctggatatgaagaggatatgaagatcacagttaatggagatagttctgcagaagctgaagaactggccaatgaaatttgaacatcactaaacaagcaaatggaatgactttggaccatatctagtatataatatttttgtcacgcacctgctgcattgctctaacttacacagaatgagaggagtaaatgttcttgccttcaaatagtgttttacgttttttatcctgctgaaaaagtatatataaaatatctaacattacaggatagaggttcagtttcttaaaaaattaaagctgctaaaattgagtggttaaaaaagataccttatcctattcctccccacccacccatgtttttaaactaatttatataaaatctggaggctgttacagctaacaaagcaggtgtgtggcagaaatattactttaaatttgtcttgtgagattttactatatctcagacagcataaatgctgttttagcactggattctttcactgagcacaaagagttgttggggctttagcatctgactgattttgttacggggttgattctgaccataggaagtatgcaatgtgaatcactatttacagagaaacctacaacagatgcttgatgttgtagaaactgggacatatagataccaagcaaaattataagaaacctataaggtgttcaatacgcttgtgtttccaaaattcactgtacatgatcagtttggtgttcttgtaccacagtttttaactgaaggaaccagttgtaacagtctcaattttaactaaaacttgaagaactaaaacaacaatgcaaacctttcagcattgtttggccaaacttgttaaaactgtaatgcaagaaccaaatgcactgtgatgtggcaccaactaattagcaagcatgaatttttcacccaagagtgaaaaaaggaaaatctaccatggcttgaagttaaagagcagaactcctgactaccattctatgactgatcaaaagactaatagttaaaaacctcagcaggccttgttcacgatatgcagaaaaaaaagtgctgcagtttagatacctctggaatttttccacagtgtcacaggtttgtaatacttgaagccctacatttctaagaatatatttcttgctcagttgtttcaggcaagcccaagactttgtaatttttaaagggcccaagatttttttttttttttttttttcaaataacagaccagcttctttttcttgcagttacagatgtaatttcctttttgttgtcaaacataaggtaccaaatatgatgcaataaattgttttgaaaaacagttgtgtgaatatttcaactaatctgtgttgggcttctgtgaaatacacaggtggaaacagaggtgcaagccagaggcaatgtaatatgctgtaaggctagtgcagatgggagctttttagaaggggctaagtgctggtgtcagggaaattccataatgaagtagaatgctgctcctgcattaagatttcattgagggcaaggctggtggcaggtactatgaatgtaattcataatttaaaaggaaaactaaaaactattttgatttgggaaaatgagccttaatttgttaaacctatacactgagaactagcctcaggcttaatattctcattgcatttgcaagatctgagcaaataagattaagtaaaacaaatcaattgtatatataattgacctttttgtggaacatgtagtttatagaaagtatactctaaagggaatttgccgaagaccttttactgattgaacagttgtgctacaatcaacttttcatagtacatgacctgcattccacatctcagtctaacagtttagtagtgatgtaaagagaagtacaaaccgaactccagtgctttgttatgttttattaactggccctgtctcaggaacatcttaacagatggcaaaaaaacaaaaactttttttcaactcctatgagtggcaactgaagttcttattgttgggaaagaacactagtcctacctctgccactaatgaggtgtttggaggaggtaccagccatataatagggggtgtatgtgtgaattttgtttaaactctactgtatattgaaatgaaattcatttatttgtcttgacaatgttcaaatgatgtagattgtcttagaatgaatattcataagtactcagaactcttaagatgcagatgccacccgtgaggagctaaattcctaatgtgtattgtattccaacccaattttactggaactattgaataaatcttttattttctttcaggtttacttgatagtggatacattggtgtcagaggaccttgactgggttcattttatgtccagacatcacccctgaaacactgtactgtactatcttgctctgagtagtatcaactggatcgtctcatatttgcctcattcatcctattaatttcaaatgatactgtgggggaaaaacagggttagaaaaacaagtggaaaaaatggagtgatgttgtaatctaaacaagtgccttatgtttattgctaagaactggtgttaccaacccttttgagaagaaagggtctcttgacctgtattaacataggaaagtaaagttctttttgtttttctttataagctactcttgtcatttctcgttgaaaaactaaaatctgactaggttagtttactcagctttaattagatagttgagtcatatattttcaacatttttctgtatcgtatttattatgcacaaaaataaagtgtgatctctaat

SEQ ID NO: 4095 - protein, 526 aa, Homo sapien
MPAVSLPPKENALFKRILRCYEHKQYRNGLKFCKQILSNPKFAEHGETLAMKGLTLNCLGKKEEAYELVRRGLRNDLKSHVCWHVYGLLQRSDKKYDEAIKCYRNALKWDKDNLQILRDLSLLQIQMRDLEGYRETRYQLLQLRPAQRASWIGYAIAYHLLEDYEMAAKILEEFRKTQQTSPDKVDYEYSELLLYQNQVLREAGLYREALEHLCTYEKQICDKLAVEETKGELLLQLCRLEDAADVYRGLQERNPENWAYYKGLEKALKPANMLERLKIYEEAWTKYPRGLVPRRLPLNFLSGEKFKECLDKFLRMNFSKGCPPVFNTLRSLYKDKEKVAIIEELVVGYETSLKSCRLFNPNDDGKEEPPTTLLWVQYYLAQHYDKIGQPSIALEYINTAIESTPTLIELFLVKAKIYKHAGNIKEAARWMDEAQALDTADRFINSKCAKYMLKANLIKEAEEMCSKFTREGTSAVENLNEMQCMWFQTECAQAYKAMNKFGEALKKCHEIERKSLMTSLTFIHTV

SEQ ID NO: 4096 - DNA, 2672 bp, Homo sapien
cttccagagagcaatatggctggttccccaacatgcctcaccctcatctatatcctttggcagctcacagggtcagcagcctctggacccgtgaaagagctggtcggttccgttggtggggccgtgactttccccctgaagtccaaagtaaagcaagttgactctattgtctggaccttcaacacaacccctcttgtcaccatacagccagaagggggcactatcatagtgacccaaaatcgtaatagggagagagtagacttcccagatggaggctactccctgaagctcagcaaactgaagaagaatgactcagggatctactatgtggggatatacagctcatcactccagcagccctccacccaggagtacgtgctgcatgtctacgagcacctgtcaaagcctaaagtcaccatgggtctgcagagcaataagaatggcacctgtgtgaccaatctgacatgctgcatggaacatggggaagaggatgtgatttatacctggaaggccctggggcaagcagccaatgagtcccataatgggtccatcctccccatctcctggagatggggagaaagtgatatgaccttcatctgcgttgccaggaaccctgtcagcagaaacttctcaagccccatccttgccaggaagctctgtgaaggtgctgctgatgacccagattcctccatggtcctcctgtgtctcctgttggtgcccctcctgctcagtctctttgtactggggctatttctttggtttctgaagagagagagacaagaagagtacattgaagagaagaagagagtggacatttgtcgggaaactcctaacatatgcccccattctggagagaacacagagtacgacacaatccctcacactaatagaacaatcctaaaggaagatccagcaaatacggtttactccactgtggaaataccgaaaaagatggaaaatccccactcactgctcacgatgccagacacaccaaggctatttgcctatgagaatgttatctagacagcagtgcactcccctaagtctctgctcaaaaaaaaaacaattctcggcccaaagaaaacaatcagaagaattcactgatttgactagaaacatcaaggaagaatgaagaacgttgacttttttccaggataaattatctctgatgcttctttagatttaagagttcataattccatccactgctgagaaatctcctcaaacccagaaggtttaatcacttcatcccaaaaatgggattgtgaatgtcagcaaaccataaaaaaagtgcttagaagtattcctatagaaatgtaaatgcaaggtcacacatattaatgacagcctgttgtattaatgatggctccaggtcagtgtctggagtttcattccatcccagggcttggatgtaaggattataccaagagtcttgctaccaggagggcaagaagaccaaaacagacagacaagtccagcagaagcagatgcacctgacaaaaatggatgtattaattggctctataaactatgtgcccagcactatgctgagcttacactaattggtcagacgtgctgtctgccctcatgaaattggctccaaatgaatgaactactttcatgagcagttgtagcaggcctgaccacagattcccagagggccaggtgtggatccacaggacttgaaggtcaaagttcacaaagatgaagaatcagggtagctgaccatgtttggcagatactataatggagacacagaagtgtgcatggcccaaggacaaggacctccagccaggcttcatttatgcacttgtgctgcaaaagaaaagtctaggttttaaggctgtgccagaacccatcccaataaagagaccgagtctgaagtcacattgtaaatctagtgtaggagacttggagtcaggcagtgagactggtggggcacggggggcagtgggtacttgtaaacctttaaagatggttaattcattcaatagatatttattaagaacctatgcggcccggcatggtggctcacacctgtaatcccagcactttgggaggccaaggtgggtgggtcatctgaggtcaggagttcaagaccagcctggccaacatggtgaaaccccatctctactaaagatacaaaaatttgctgagcgtggtggtgtgcacctgtaatcccagctactcgagaggccaaggcatgagaatcgcttgaacctgggaggtggaggttgcagtgagctgagatggcaccactgcactccggcctaggcaacgagagcaaaactccaatacaaacaaacaaacaaacacctgtgctaggtcagtctggcacgtaagatgaacatccctaccaacacagagctcaccatctcttatacttaagtgaaaaacatggggaaggggaaaggggaatggctgcttttgatatgttccctgacacatatcttgaatggagacctccctaccaagtgatgaaagtgttgaaaaacttaataacaaatgcttgttgggcaagaatgggattgaggattatcttctctcagaaaggcattgtgaaggaattgagccagatctctctccctactgcaaaaccctattgtagtaaaaaagtcttctttactatcttaataaaacagatattgtgagattcaaaaaaaaaaaaaaaa

SEQ ID NO: 4097 - protein, 335 aa, Homo sapien
MAGSPTCLTLIYILWQLTGSAASGPVKELVGSVGGAVTFPLKSKVKQVDSIVWTFNTTPLVTIQPEGGTIIVTQNRNRERVDFPDGGYSLKLSKLKKNDSGIYYVGIYSSSLQQPSTQEYVLHVYEHLSKPKVTMGLQSNKNGTCVTNLTCCMEHGEEDVIYTWKALGQAANESHNGSILPISWRWGESDMTFICVARNPVSRNFSSPILARKLCEGAADDPDSSMVLLCLLLVPLLLSLFVLGLFLWFLKRERQEEYIEEKKRVDICRETPNICPHSGENTEYDTIPHTNRTILKEDPANTVYSTVEIPKKMENPHSLLTMPDTPRLFAYENVI

SEQ ID NO: 4098 - DNA, 1931 bp, Homo sapien
tttgctaaagccaccataaaggaaatagttgtgtggcccatgttgaggccagacatctttactggtttaaggggaccccctaaaggaattttgctctttggtcctcctgggactggtaaaactctaattggcaagtgcattgctagtcagtctggggcaacattctttagcatctctgcttcatccttaacttctaaatgggtaggtgagggggagaaaatggtccgtgcattgtttgctgttgcaaggtgtcagcaaccagctgtgatatttattgacgaaattgattccttgttatctcaacggggagatggtgagcatgaatcttctagaaggataaaaacagaatttttagttcaattagatggagcaacaacatcttctgaagatcgtatcctagtggtgggagcaacaaatcggccacaagaaattgatgaggctgcccggagaagattggtgaaaaggctttatattcccctcccagaagcttcagccaggaaacagatagtaattaatctaatgtccaaagagcagtgttgcctcagtgaagaagaaattgaacagattgtacagcagtctgatgcgttttcaggagcagacatgacacagctttgcagggaggcttctcttggtcctattcgcagtttacaaactgctgacattgctaccataacaccggatcaagttcgacccatagcttacattgattttgaaaatgcttttagaactgtgcgacctagtgtttctccaaaagatttagagctttatgaaaactggaacaaaacttttggttgtggaaagtaagtgggatacttggaatcaaggcatctctgtagtacagtcttctttattttttagcatagaaagttggggatgtgttaattgtatttttaagaatatattctaagttctgtacttcaaataatagcacagattttacatctgattgacatagtgtatgttaatgtaagttttgctttccagtgattacctgatacgtaagcctatttgaacaaagtgagaatgaacttttgtttctaagaagtctttatcttgaagctatataacatgaaaagtgagctcaaattttttttagttgaagattacatataaagttgtgtctgattaatattcatcttttattgaagaaagtgccttctgatggccacataattcttaatgtcagctagtataatggtttacatttggacaaagtattgcttagtgttatttaagtagatttaagatctcaaagctaaagtgccaatttttactttcttcagccaatttgttacctcttttatggttttaaatttttatcaggactaacattttcagaaatagcaaggtgtgatctagtattagattcacagaactgaaaggttaattaagaatgttggttattttcacgggagcgtgtgatatttaacattaatattttatttgacactacagcctgtaatactgctctctttcaaaaacaagttttcagatttttataacagacccattttgttttatgaaacatgttcattacagaaacatgagaaaatagagataagtaaaaagaataaaagtcactattatcctaccactttgcgggacacactattaatatttaagcatagattcttccagatgttttgttttatacagcagtaggattgtgtaatgtattctctcttgtagcctattcttcaaagcgtatcttcactttccatgttaacataaatgtccttttatgattgtctaggattccatggatggatggaatataattgagtcatctggtagagcgcatataggacaggacgctaggttgtttatcttttgtttattgtaaaggaactatgtgggatgcatttggtgatctttttaaaaaatgtataaatttcttgagtaattcctggattaaagaatatgcacttctt

SEQ ID NO: 4099 - protein, 254 aa, Homo sapien
MLRPDIFTGLRGPPKGILLFGPPGTGKTLIGKCIASQSGATFFSISASSLTSKWVGEGEKMVRALFAVARCQQPAVIFIDEIDSLLSQRGDGEHESSRRIKTEFLVQLDGATTSSEDRILVVGATNRPQEIDEAARRRLVKRLYIPLPEASARKQIVINLMSKEQCCLSEEEIEQIVQQSDAFSGADMTQLCREASLGPIRSLQTADIATITPDQVRPIAYIDFENAFRTVRPSVSPKDLELYENWNKTFGCGK

SEQ ID NO: 4100 - DNA, 2950 bp, Homo sapien
gcaggctgctgtctcacagagcgagaaggtgtcaggagcagcccagttgtgtctctctctctacctctgtgaagggcgcgaatgggcagagcagaacttctagaagggaagatgagcacccaggatccctcagatctgtggagcagatccgatggagaggctgagctgctccaggacttggggtggtatcacggcaacctcacacgccatgctgctgaagctcttctcctctcaaatggatgtgacggcagctaccttctgagggacagcaatgagaccaccgggctgtactctctctctgtgagggccaaagattctgttaaacactttcatgttgaatatactggatattcatttaaatttggctttaatgaattctcatctttgaaggattttgtcaagcattttgcaaatcagcctttgattggaagcgagacaggcactctgatggttctaaaacatccctacccaagaaaagtggaagaaccctccatttatgaatctgtccgggttcacacagcaatgcagacaggaagaacagaagatgaccttgtgcccacagcaccttctctgggcaccaaagaaggttacctcaccaaacagggaggcctggtcaagacctggaaaacaagatggtttactctgcacaggaatgaactgaaatacttcaaagaccagatgtcaccagaaccaattcggatcctagacctaacagaatgttcagctgtacaattcgattattcacaagaaagggtaaactgtttttgtttggtatttccattcaggacattttatctctgtgcaaagaccggagtagaagctgatgagtggatcaagatattacgctggaaattggtcaaggacaaaagctgtattttgtctgctctctgtatatctcccgaggagaagactgatcacaaataagaaaacagctcaaccaaggggaaggcacgatccgatctcggtcgttcatctttaaatagatctttcttgccaaggaatgctctggcccaggagcaaggtggaatgtttccctgacgctgtgatctgcagcaggcttcaaatgaaaaccgactaaggattttctttcaaaaacaaatcagaagcagatgctgattgggacccatataccacgttgctgactcacgttgctgcccttccatgatgttgccatctccttgagaacactgaagcaatcaccattctgatagaaagtgcttaaaccaccactcttaggtctgctcactcttagaacacacaatggaagaggaagggtttttgttttcactcattgtggtccccaagcctattgacactagttgcctagagtcccactgtgagtcatggtcagcctgtctgacatccaggttgtgctattaaccaagaaggaaacagatacttggaggcttagatgacttctgcaggatttatattcagatagaaaacatcaaatattttcaggggagaggtttttttttttaatttttccccctttatacaaaaaaaaagaacatttccaaaactaaaatagaaaatgcttgtggcatttattttctctttttaaaaggttcagaaatttggcaggtcctttgcttctaatgacaaaactgtgagagctagatgtcctatgggcaattaggtagtataataaaggtaaatgaaggtacaatttttaaaccattattttcaccctgttggggtaaatgttttaaagagtgagaaaacataaattgagaaagggtgataaagtaatagataacttttagtttaataataattattgttattatactactaataatagagcacttgtaagcactaagttatctttatccaacatttctccaaatggactgaaagaaacttttcaaggacagtgtattataacaatccctttcccagaattagttgtatagggttggcccaagagatgtaagaaaaatctcgcattgctccctaagcaccctgggccttattaaagagcaacttctatttccagtcgggggagtaacactaaagctacaagaaatatgtaataatgataggtaataatgtgttccaaagctttttcaaactagaataaggaggcaaatagaagaatgagatactgatgtccacagttcattggcagaatctaaccccttctgttatcttttttaatactatttttgtttagatagaagtttcaaagaagataaaaatgcttgaagagcctgagagtaaaaagattatgctgcaaagctatgatataaactgctcttgcagtccaaagggatacctgattaaagaagtttcttatttaaacatctcagacgcaaaaattacattaaatttttgtatatttcaacaacattttaaatgtattttgttatgtttgtattatataggataaagcaaatgtcaagttaaaatgtattgtgttgtttgtaaagtaagaagttactggccaggagcggcggctcatgcctgtaatcccaggactttggtaggccaagacaagcagatcacttgaggtcaggagttcaacatcagcctggccaacatgatgaaaccttgtctttactaaaaatacaaaaattagctgggcatggtggcaggcgcctgtaatcccagctactcaggaggctgaggcaggagaattgcttgaacccgggaggtggaggttgcagtgaaccaagatcgcggcgctgcactctagcctgggtgacagagtcagactccgtcccaaaaaaacaaacaaacaaaacaaaacaaaaaaaacagaagttacaaatgaatactcacggatatgtatagttttatgtttgttttcttagaaacaaatgtgtttctttgggtgggtaatattgtgttttactatgtttaccttttataaaacataacctgtttatttatattctttggctttgtttattaaaaagcatgattttgctgtgcatgtaccattttg

SEQ ID NO: 4101 - protein, 280 aa, Homo sapien
MGRAELLEGKMSTQDPSDLWSRSDGEAELLQDLGWYHGNLTRHAAEALLLSNGCDGSYLLRDSNETTGLYSLSVRAKDSVKHFHVEYTGYSFKFGFNEFSSLKDFVKHFANQPLIGSETGTLMVLKHPYPRKVEEPSIYESVRVHTAMQTGRTEDDLVPTAPSLGTKEGYLTKQGGLVKTWKTRWFTLHRNELKYFKDQMSPEPIRILDLTECSAVQFDYSQERVNCFCLVFPFRTFYLCAKTGVEADEWIKILRWKLVKDKSCILSALCISPEEKTDHK

SEQ ID NO: 4102 - DNA, 2950 bp, Homo sapien; identical to SEQ ID NO: 4100

SEQ ID NO: 4103 - protein, 280 aa, Homo sapien; identical to SEQ ID NO: 4101

SEQ ID NO: 4104 - DNA, 1970 bp, Homo sapien
attatgaagatcagggtgatgaccagttaaatgtatttggagaggacactatgggaggtttcatggaagatttgagaaagtgtaaaattattttcataattggtggtcctggctctggcaaaggcacacagtgtgaaaagctggtggaaaaatatggatttacacatctctcaactggcgagctcctgcgtgaggaactggcatcagaatctgaaagaagcaaattgatcagagacattatggaacgtggagacctggtgccctcaggcatcgttttggagctcctgaaggaggccatggtggccagcctcggggacaccaggggcttcctgattgacggctatcctcgggaggtgaagcaaggggaagagttcggacgcaggattggagacccacagttggtgatctgtatggactgctcggcagacaccatgaccaaccgccttctccaaaggagccggagcagcctgcctgtggacgacaccaccaagaccatcgccaagcgcctagaagcctactaccgagcgtccatccccgtgatcgcctactacgagacaaaaacacagctacacaagataaatgcagagggaacaccagaggacgtttttcttcaactctgcacagctattgactctattattttctgaaggcaaaaatgcatgtttgttagaatggaaacagaaaaacattaaaaagttcattccttaacacaatgtttcaagttaaaccttttgtgtcaccgccccccaccaaccaccacctcctaaatcctgacagcactgtttgcttcccagctagacctgtgtgagaggtgtctggaaatcatgcatggtgtatttgggactatatcaacctattctccacacttcagacaactgtctgcactcacggcacgcacactttgtatcatgcaggccacactcagagctagtcagtacatgaacagtggtgcggtgccagtctgtgtccgttgtgatcacaggccttgctagaccctgatcatctggttctcctctcattaagcatccctaacccccagtcacaccttcctcttacatactgttccccaatggaggcccctggcataggggacagccctgggcatcttcctttggtgtctggctgttttgtcaactctcatccactggtggctcagagccataaggtgggttgattacacaatgccttgtacatgatatagaggcatcaagcaagtaaaatttgacagaaattttaaaatatgaagatgtatagctttcccaagatgatggtaaaacccaggttagtcatcagtaaccttctctattattattattttttagaaacttggaatactgtcattatggctaagagaacaaatctgataaattgtgtaacctagtctcttctctacatggtgatgcatttcagcaattataaattaatataaatgaccaaaagtaacttaaaagcatgagatatttgctatttcattcattgggcacatatcaaattataattttgattttaaatggtcacccatgtatttgttgccaagcaagtaaaaaaataccctaacaaacctgatgtgggtgggaggggcatgtcagtaagtggtgtgttcaatgtgtttgtttcatatgggccctttccaggagtttgcaaaccttgtcatacccatatgcaaaactgtgtttccttgcattaaaccagtgaagtttgggttctcttttgtgctatcaatcagttgtaaaatcagagcttcttatatattctactggaataactgcatcttccactcagtcactacaaaaaagcatagtttcagtttgcatgaatttttttttttttcttcaatggttgtgcagataaggatccatttctgggatagaattgtattttttaagtcatttttttttcttgaaatggatatgtacaaataaaattaaatggaagacaggataaaaaaaaaaaaaaaaaaaaaaaaaaaa

SEQ ID NO: 4105 - protein, 198 aa, Homo sapien [sequence omitted]

SEQ ID NO: 4106 - DNA, 1196 bp, Homo sapien
cgtggtttccggaacttcgcccgcgtctctgggcttttgctctgtcaggctggtggcgttttggtgtcttcgtttgttatggccgctgctgtcgctatggagacagatgatgctggaaatcgacttcggtttcagttggagttggaatttgtgcaatgtttagccaacccaaattaccttaattttcttgcccaaagaggttacttcaaagacaaagcttttgttaattatcttaaatacttgctttactggaaagacccagaatatgccaagtatctaaagtaccctcagtgtttacacatgttagagctgctccaatatgaacacttccgaaaggagctggtgaatgctcagtgtgcgaaatttattgatgaacagcagattctacattggcagcactattcccggaagcggatgcgccttcagcaagccttggcagagcagcaacagcaaaataacacatcgggaaaatgaaaaactggatacaaacgaggcacttaatacatgtatataatgtatttcttttgtacagtgaagacaaaaaaaatgaaaactcttcctatctacctttattatggtagcccctagaacctttagtgtgctttttcatccaactttttattgttaatagactatttctgttaaacctgaattgttctttgatttccctgtggatttgtaaggtgtttttcttttttacgcatttagcataatcagctgattaagaatggaaaagttaggtgctttagaccaaataaggcactggggcatggggtaggggtgggccaccaagtatactgaattctaaggctagctgttcctgacatatagtagggcaagaccatctcctggaaccttactgtctcagatcaactactctaccactctactctaagatgtagtgagagtagcggagtcactgacctctttaaatcataggacaggaactgcataaaggttcttgaattctgcaggacaggaaataactgtattacctgctttgcaaggtggctttaagaatcactgaatcactgtggcctcacttgacctagtcatggcaggacaactagtggttagttactaactggactcttgactttagaacaaacatgaggagcctcaaatacttgtgttcatttgggaaagctaccattgatttgggaggtaccacaaaccaggtgctatgttaagtgctt

SEQ ID NO: 4107 - protein, 131 aa, Homo sapien
MAAAVAMETDDAGNRLRFQLELEFVQCLANPNYLNFLAQRGYFKDKAFVNYLKYLLYWKDPEYAKYLKYPQCLHMLELLQYEHFRKELVNAQCAKFIDEQQILHWQHYSRKRMRLQQALAEQQQQNNTSGK

SEQ ID NO: 4108 - DNA, 3032 bp, Homo sapien; identical to SEQ ID NO: 3663

SEQ ID NO: 4109 - protein, 134 aa, Homo sapien; identical to SEQ ID NO: 3664

SEQ ID NO: 4110 - DNA, 2792 bp, Homo sapien
agatgaccgtgccagagatccagaggtgtaacctggccagtgtgatgcttcagcttctagcaatgaaagtcccaaatgtgctcacctttgacttcatgtcgaagccatctccagatcacattcaggcggccattgcccaactggacctgttaggtgctcttgaacataaggatgaccagcttaccctgactccaatgggaagaaagatggcagcatttcctttagaacccaaatttgccaaaaccatcctcatgtcccccaaattccactgtacagaggagatcctgaccattgtctccctgctgtctgtggacagcgtcctccacaaccctccttcccggcgagaggaagtgcaaggggtccgcaagaagttcatatccagcgagggggatcacatgaccctgctcaatatctatcggaccttcaaaaacctaggcggaaataaggattggtgcaaagagaattttgtcaacagcaagaatatgacgctggtagcagaagtcagagcacagctgagggacatctgcttaaagatgtcaatgccaatcgcatcatcccgaggagacgtggagagtgtccgccgctgcctggctcacagcctcttcatgagcaccgccgagcttcagccagatggcacctatgccaccacggacacccaccagccagtggccatccacccgtcgtctgtcctcttccactgcaagccggcctgcgtcgtgtacactgagctgctctacaccaacaagtgctacatgcgggacctctgcgtcatagatgcacagtggctgtacgaggctgcccctgagtactttaggaggaagctgagaaccgccagaaactgagccgccccaggatgccgccagaatcactggtccctggaagcttggactacagttgtccttacagcaggcttccaggttggcgcttagagaagccttggaatcagctgaaggtgcctgacttccaggagcgtgaaagcatctttgctcaactcctgggactgaaccatatagacatggacatatcatttgtacctggaaacctcaaaattatgcttttggttcttactgggtgactttgacttaatttaacacctgagcctcagttttctcatctgccaaatgggagtaataataataatccttataaaattgggttcataaagtttagagaaaaggaatggaaagtacccagaactatgcctggagcacgcacgacacacgtacagtgagttgggagccgttaggctgaatgttactgcttgccatatgatgtgaagtacagcaatatcccaagttcttgtgactgagggagattttctggaagggccacaggaggttgcggagcttggatgttgcccttagttcttgtttaatgtctctctgaatgcagttttaaaatagaaaacaaaactgacttctgtagaagtttccagagggaggtgctgttatctcgtacctcctgggatggcgatccctactgaacgcttgtgtctcagggtggaccactctgtgtctgtctccaagcagagaccagtaaaggagcctcctggtcctcagtgcgtgaccctgtcagtgctttcaggagacatgcaagcttcctgggtgaaggttgatttgtaccttctgaatcctgtcacgtgtagacatgggaaactgacctatcagtgttttgtgtgtgtaggtgactcccacatacacagttgccatttttctctctaactgggcaccagtgaacatgcgggcatgaggagtgactgtgtaccatttcagctgtttcttttcgggcagtcccctggtcagagggggtgggggtgggggaggggagaggggtacctagaacccagagaacattggcttatgccagataccacaccacatctgggcttacattcttgtatcttttttggtgtgtgggcggggggggtggggggcagttcagtgaagtctagaagacctgctggacaaattctaaaagagctagagctgtaacacttattcttgcatcttattaattttctatgatattttttccttcttcgtagggacttgggacaatctggctttgctgctttccaactgctaggcacctctctctaaccctcattgtcagagggaattggaggatatccacggtctgttcctgttctgatattctgagcagagaaaaggcactaacggttcctcttagctatttaattatcagaagcaagtaatctttccccagataatattttgccctagaagaagccgtgatttagctcttttattgtgcttacttggtccaaatacatctgtggggtgttttgtcatttcttaatgaatgaatcatagttataaccaggggccaagctgcccaagaggctcttcagagatcatggatgctctctttctggaagctgtggcctgatggagcagccccattccagggtcccatctgtccggagttgtgtatgtcaagtccggctcagtctttatttccaacactagccgtggtcctgtgcagtcaagctctcagctagtgtttagggctgtctgtcagaaatggttatacgtgggcaaaagaagatctgacagctcctatataccttatcttactgaattcttaaactttgaaccagttcttccacttactgacttgttaccactgctgactttctgaaaagttttccagtttttgttttttgttttttgttttccagtagggggttagaatgtttagtcctacttagtaagaaaaatattgtatttttaatcattcatagtgctggtaaaaaaaaaaaaaaaaaaaaa

SEQ ID NO: 4111 - protein, 279 aa, Homo sapien
MTVPEIQRCNLASVMLQLLAMKVPNVLTFDFMSKPSPDHIQAAIAQLDLLGALEHKDDQLTLTPMGRKMAAFPLEPKFAKTILMSPKFHCTEEILTIVSLLSVDSVLHNPPSRREEVQGVRKKFISSEGDHMTLLNIYRTFKNLGGNKDWCKENFVNSKNMTLVAEVRAQLRDICLKMSMPIASSRGDVESVRRCLAHSLFMSTAELQPDGTYATTDTHQPVAIHPSSVLFHCKPACVVYTELLYTNKCYMRDLCVIDAQWLYEAAPEYFRRKLRTARN

SEQ ID NO: 4112 - DNA, 3016 bp, Homo sapien
cagcccacctcttgcatcgtcacctacaggtatctaagcaatggatccaagccctggaggttggtgagagccatgtattacccctagatgaaattggacaagagaccatgaccgtaaccctcctcgatgccaatcactgtcctggttctgtcatgtttctctttgaaggatattttggaaccatcctctacacaggtgattttcgatacacaccatccatgctaaaggagccagccctgacactggggaaacagatccatactttatacctagacaacaccaattgcaatccagccctggttcttccttcccgacaagaagctgcccaccagattgtccagctcattcgaaaacacccacaacataacataaagattggactctacagcctgggaaaggaatcactgctggagcagctggccctggagtttcagacctgggtggtattgagtcctcggcgcctggagttggtacagctactgggcctggcagatgtgttcacagtggaggagaaggctggccgcatccatgcagtagaccatatggagacctgccattccaacatgctgcgttggaaccagacccaccctacgattgctatccttcccacaagccgaaaaatccacagctcccaccctgatatccacgtcatcccttactctgaccattcctcttactccgagcttcgtgcctttgtcgcagcactgaagccttgccaggtggtgcccattgtaagtcggcggccctgtggaggctttcaggacagtctgagccccaggatctccgtgcccctgattccggactctgtacagcaatacatgagttcttcctctagaaaaccaagccttctctggctgttagaaaggaggctaaagaggccgagaacccaaggtgttgtgtttgaatcccctgaggaaagtgctgatcaatctcaagctgacagagactcaaagaaggccaagaaagagaaactttctccctggcctgcggaccttgaaaagcagccttcccaccatcctttgcggatcaagaagcagttgttcccagatctctatagcaaagaatggaacaaggcagtgcctttctgtgagtctcaaaagagggtgactatgttgacggccccactgggattttcagtgcacttaaggtctacagatgaggagtttatttctcaaaaaaccagggaggaaattggtttagggtcccccttggtacccatgggagatgatgatggaggtccagaagccacagggaatcagagtgcctggatgggccatggttctcccctgtcccacagcagcaagggcacccctcttctagctactgaattcaggggtctagcactcaaatatcttctgactccagtgaactttttccaggcagggtattcttccaggagatttgaccagcaagtggaaaaataccataaaccctgctgaagacaggagagtacagaatgacaacattgagcccacactgcagttttgaagatagtaactgatggctggtgggaaagagtttgtttttggggcctacttttctatctttacaagactcttatgggcccaccgtggagcagcacttcccaaaacttgttcactggggtcctcgtgcctatggaatccttctttttataactaagtttaagaaatactttttttataaaatctttggagtatgcgtgagcaaattaaaagttctttgaagtcctacagtaacttaatctgtttaaccttgtttaacccagtatttctcaaacttttgtgaacatgcaatcatcttatgtgggtacagaaagaggtaaagagtctgaatcaaaaaggaccaggttattgctgttgctgttttgtggtgtcatgagccattctccatgtccccttctccctcttctcagatcaaaatccctagggagttctatttttaaaattatgaactatggcgctgcatgcttcaatcctgaacgtcactgacttgctgtgaccatccaaataattttcctgtctctgcctctgggagggaacaggaagcgatgaagaggtcttggaacagtagtgaaaattctacctctatgtccttcatgaggatgtgcagtatcccagtatcactgggatccatgtggaacagagccagctggggggttgggcagctctctccaaggcagtacctagagcccagctgaacaacaaggctttgggtgtgaagggactccccagcctggagaccctatttggctgaaacagttacaaaatatcaaatgtgttgtcagatattcctccaattgttcacatagctgggatatttgttgctcccctcaccccttggattatgtagggagccagtgcacacagcctgtttgttttagtatccaaggaagagaccaaggagccagctggcgggaaggggtgggggtgtgcagtctgccctgtccttctgctcataacctgacaaaatgccaaactagtaagcaggatagctgataccacggctatgagggagtaggctccgagagggcacagacttgtggagctgggcgtctggatcaaaactgctttgggatggaacctcgagccctagcagtgaagaagattccatttcttgtccaggggatttaaaagagttttctgctttgagagagaaatagagagtttagaaagcaattgctcttgggaaagctatacacagctctgttttgtcaatgacctttgttgtaagtctcccaacgtcctattaggagccacagcaggtgaggcatttggtgcagcaggaaacatggggactgcctaggctcgaatctgtggcaccctgagcaattacttaaattgtggagcctagttcctcatctgtaagatggacttgagattcctacctctcatgattactatggagattgaataattggtaaaattctcctagctcagtgactgccacaggatgggtctttcagattttggttctctttagcttctggttcttgaaagaaattgatctgtatataacataagaaactttgaaagtc

SEQ ID NO: 4113 - protein, 443 aa, Homo sapien [sequence omitted]

SEQ ID NO: 4114 - DNA, 7603 bp, Homo sapien; identical to SEQ ID NO: 3699

SEQ ID NO: 4115 - protein, 823 aa, Homo sapien
MSRRKQGNPQHLSQRELITPEADHVEAAILEEDEGLEIEEPSGLGLMVGGPDPDLLTCGQCQMNFPLGDILVFIEHKRKQCGGSLGACYDKALDKDSPPPSSRSELRKVSEPVEIGIQVTPDEDDHLLSPTKGICPKQENIAGKDEPSSYICTTCKQPFNSAWFLLQHAQNTHGFRIYLEPGPASSSLTPRLTIPPPLGPEAVAQSPLMNFLGDSNPFNLLRMTGPILRDHPGFGEGRLPGTPPLFSPPPRHHLDPHRLSAEEMGLVAQHPSAFDRVMRLNPMAIDSPAMDFSRRLRELAGNSSTPPPVSPGRGNPMHRLLNPFQPSPKSPFLSTPPLPPMPPGGTPPPQPPAKSKSCEFCGKTFKFQSNLIVHRRSHTGEKPYKCQLCDHACSQASKLKRHMKTHMHKAGSLAGRSDDGLSAASSPEPGTSELAGEGLKAADGDFRHHESDPSLGHEPEEEDEEEEEEEEELLLENESRPESSFSMDSELSRNRENGGGGVPGVPGAGGGAAKALADEKALVLGKVMENVGLGALPQYGELLADKQKRGAFLKRAAGGGDAGDDDDAGGCGDAGAGGAVNGRGGGFAPGTEPFPGLFPRKPAPLPSPGLNSAAKRIKVEKDLELPPAALIPSENVYSQWLVGYAASRHFMKDPFLGFTDARQSPFATSSEHSSENGSLRFSTPPGDLLDGGLSGRSGTASGGSTPHLGGPGPGRPSSKEGRRSDTCEYCGKVFKNCSNLTVHRRSHTGERPYKCELCNYACAQSSKLTRHMKTHGQIGKEVYRCDICQMPFSVYSTLEKHMKKWHGEHLLTNDVKIEQAERS

SEQ ID NO: 4116 - DNA, 2657 bp, Homo sapien
tatatcaatacaccagtggctgaaattatcatgaaaccaaatgttggacaaggcagcacaagtgtgcaaacagctatggaaagtgaactcggagagtctagtgccacaatcaataaaagactctgcaaaagtacaatagaactttcagaaaattctttacttccagcttcttctatgttgactggcacacaaagtaaggctgttgctttcaatgcatgcaatattaactttgagtgtttactaactctgtgttttgcttacctggcttttcttccttgaagttgcttttttttttcctccaagaggaattatttaaaaagactttagtctgtgacataaccaagatttattctgtttacctaaggaacttattttcttttttgcaatttcatttattctgagtcactttatttgtaataagtgaagaattttaatacttagaaataagttgtaaagaaaataatgagaatcttaccatgctttagaggaacgtaatttctagaaatagttaaaagatgaaatactaagatattattttaccttctttatatagctgtatatactggtagtatgaaagcaactagtgtcattgatgattttttgggggggtatttttgtattctaggcttgctgcaacctcatttagagagggttgccatcgatgctctacagttatgttgtttgttacttcccccaccaaatcgtagaaagcttcaacttttaatgcgtatgatttcccgaatgagtcaaaatgttgatatgcccaaacttcatgatgcaatgggtacgaggtcactgatgatacataccttttctcgatgtgtgttatgctgtgctgaagaagtggatcttgatgagcttcttgctggaagattagtttctttcttaatggatcatcatcaggaaattcttcaagtaccctcttacttacagactgcagtggaaaaacatcttgactacttaaaaaagggacatattgaaaatcctggagatggactatttgctcctttgccaacttactcatactgtaagcagattagtgctcaggagtttgatgagcaaaaagtttctacctctcaagctgcaattgcagaacttttagaaaatattattaaaaacaggagtttacctctaaaggagaaaagaaaaaaactaaaacagtttcagaaggaatatcctttgatatatcagaaaagatttccaaccacggagagtgaagcagcactttttggtgacaaacctacaatcaagcaaccaatgctgattttaagaaaaccaaagttccgtagtctaagataactaactgaattaaaaattatgtaatacttgtggaactttgataaatgaagccatatctgagaatgtagctactcaaaaggaagtctgtcattaataaggtatttctaaataaacacattatgtaaggaagtgccaaaatagttatcaatgtgagactcttaggaaactaactagatctcaattgagagcacataacaatagatgataccaaatactttttgtttttaacacagctatccagtaaggctatcatgatgtgtgctaaaattttatttacttgaattttgaaaactgagctgtgttagggattaaactataattctgttcttaaaagaaaatttatctgcaaatgtgcaagttctgagatattagctaatgaattagttgtttggggttacttctttgtttctaagtataagaatgtgaagaatatttgaaaactcaatggaataattctcagctgccaaatgttgcactcttttatatattctttttccacttttgatctatttatatatatgtatgtgtttttaaaatatgtgtatattttatcagatttggttttgccttaaatattatccccaattgcttcagtcattcatttgttcagtatatatattttgaattctagttttcataatctattagaagatggggatataaaagaagtataaggcaatcatatattcattcaaaagatatttatttagcaactgctatgtgcctttcgttgttccagatatgcagagacaatgataaataaaacatataatctcttccataaggtatttattttttaatcaagggagatacacctatcagatgtttaaaataacaacactacccactgaaatcagggcatatagaatcattcagctaaagagtgacttctatgatgatggaacaggtctctaagctagtggttttcaaactggtacacattagactcacccgaggaattttaaaacagcctatatgcccagggcctaacttacactaattaaatctgaattttggggatgttgtatagggattagtattttttttaatctaggtgattccaatattcagccaactgtgagaatcaatggcctaaatgctttttataaacatttttataagtgtcaagataatggcacattgactttattttttcattggaagaaaatgcctgccaagtataaatgactctcatcttaaaacaaggttcttcaggtttctgcttgattgacttggtacaaacttgaagcaagttgccttctaatttttactccaagattgtttcatatctattccttaagtgtaaagaaatatataatgcatggtttgtaataaaatcttaatgtttaatgactgtt

SEQ ID NO: 4117 - protein, 242 aa, Homo sapien
MKATSVIDDFLGGYFCILGLLQPHLERVAIDALQLCCLLLPPPNRRKLQLLMRMISRMSQNVDMPKLHDAMGTRSLMIHTFSRCVLCCAEEVDLDELLAGRLVSFLMDHHQEILQVPSYLQTAVEKHLDYLKKGHIENPGDGLFAPLPTYSYCKQISAQEFDEQKVSTSQAAIAELLENIIKNRSLPLKEKRKKLKQFQKEYPLIYQKRFPTTESEAALFGDKPTIKQPMLILRKPKFRSLR

SEQ ID NO: 4118 - DNA, 3721 bp, Homo sapien
agaaggcgtcccggcatcggccaagattctacattgctcatctgggcatctgagcctccttcgaagtttcctgtcacaactgtcctcttgacagcatggatgaggaggaagacaatctgtctctgctgaccgcactgctggaagaaaatgagtcagccttggattgtaattcagaagaaaataacttcttgacgcgggaaaatggcgagcccgacgcatttgatgagctctttgatgccgacggcgacggtgaatcttatacagaagaggctgatgatggagaaacaggagagacaagagacgaaaaggaaaatctggccactctctttggagatatggaggacttaacagatgaagaagaagttcccgcatcacagtcaactgaaaatagggtcctccctgctcctgcccccaggcgagagaaaacgaatgaagagttgcaagaggaattaaggaatttgcaagagcaaatgaaggccttacaagagcagctaaaagtaacaacaattaaacagacagcaagcccagcccgtctgcaaaaatcccctgagaagtctccccggccacctcttaaggagaggagagttcagagaattcaggagtcaacatgcttttctgcggagcttgatgtccctgcgctaccaagaaccaagagggtggctcgaacaccaaaggcttcacctccagatcccaaaagctcatcttcaaggatgacaagtgcaccctcccaacccctacagacgatttctcggaacaaacctagtgggataactagaggtcaaattgtggggaccccaggaagttctggggaaacgactcaacccatctgtgtggaagccttctctggtctgcggctcaggcggcctcgagtatcctccacagaaatgaacaagaaaatgaccggccgaaaactgatcagactgtctcagatcaaggaaaagatggccagagagaagctggaagaaatagattgggtgacatttggggttatattgaagaaggttacgccacagagtgtgaatagtggaaaaaccttcagcatatggaaactgaatgatcttcgtgacctgacacaatgtgtgtccttgttcttatttggagaagttcacaaagcgctctggaagacggagcaggggactgtcgtagggatcctcaatgccaaccccatgaagcccaaggatggttcagaggaggtgtgtttatctatcgatcatcctcagaaggtcttaattatgggtgaagctcttgacctgggaacctgtaaagccaagaagaagaatggagagccgtgcacgcagactgtgaatttgcgtgactgtgagtactgtcagtaccatgtccaggctcagtacaagaagctcagcgcaaagcgtgcggatctgcagtccaccttctctggaggacgaattccaaagaagtttgcccgcagaggcaccagcctcaaagaacggctgtgccaagatggcttttactacggaggggtttcttctgcctcgtatgcagcttcaattgcagcagctgtggctcctaagaagaagattcaaaccactctgagtaatctggttgttaagggcacaaacttgatcatccaggaaacacggcaaaaactcggaataccccagaagagcctgtcttgctctgaggagttcaaggaactgatggacctgccgacgtgtggagccaggaacttaaaacaacatttagccaaagccacagcttcagggattatggggagcccaaaaccagccatcaagtccatctcggcctcagcactcttgaagcaacagaagcagcggatgttggagatgaggagaaggaaatcagaagaaatacagaagcgatttctgcagagctcaagtgaagttgagagcccagctgtgccatcttcatcaagacagccccctgctcagcctccacggacaggatccgagttccccaggctggagggagccccggccacaatgacgcccaagctggggcgaggtgtcttggaaggagatgatgttctcttttatgatgagtcaccaccaccaagaccaaaactgagtgctttagcagaagccaaaaagttagctgctatcaccaaattaagggcaaaaggccaggttcttacaaaaacaaacccaaacagcattaagaagaaacaaaaggaccctcaggacatcctggaggtgaaggaacgtgtagaaaaaaacaccatgttttcttctcaagctgaggatgaattggagcctgccaggaaaaaaaggagagaacaacttgcctatctggaatctgaggaatttcagaaaatcctaaaagcaaaatcaaaacacacaggcatcctgaaagaggccgaggctgagatgcaggagcgctactttgagccactggtgaaaaaagaacaaatggaagaaaagatgagaaacatcagagaagtgaagtgccgtgtcgtgacatgcaagacgtgcgcctatacccacttcaagctgctggagacctgcgtcagtgagcagcatgaataccactggcatgatggtgtgaagaggtttttcaaatgtccctgtggaaacagaagcatctccttggacagactcccgaacaagcactgcagtaactgtggcctctacaaatgggaacgggacggaatgctaaaggaaaagactggtccaaagataggaggagaaactctgttaccaagaggagaagaacatgctaaatttctgaacagccttaaataacccgaacttcagacattttcccacagacttcctggcctcctgtgactctggaaagcaaaggattggctgtgtattgtccattgattcctgattgacgccgtcaaaaacaaatgcttgttaagcccataagctttgcctgcttactttctgccattgggttggtttgataccacatttaacattgacatttaagtggaaaaccaagttatcattgtcttttctaagctcagtgtggatgattgcattacttcattcactgaagtttttgcccaaaaattggaaggtaaacagagagctatgtttctgtatcttttggttatagagtgttcacttctttatcataacaaaattctagtgtttatacgaacacccagaggcaaaagaatttggcttaattctcactccaggtaagtagcttaacttctgggcttcagttttctcatctgtaaaatcaggaagattggactaagtgatcctgaaatgtattttttagcactggatttctacaaataataaaactttcccatctagataatgatgatcacatagtcttgatgtacggacattaaaagccagatttcttcattcaattctgttatctctgttttactctttgaaattgatcaagccactgaatcactttgcatttcagtttatatatatagagagaaagaaggtgtctgctcttacattattgtggagccctgtgatagaaatatgtaaaatctcatattattttttttttaatttttttattttttatgacagggtctcactatgtcaccctggctggagtgcagtagtgcgatcgcggcacactgcagccttggcttccctgggctcaagcagtcctcccacctcagtctcccaaatagctaggactacaggcgtgcgtgaccaagcccagctaatttttgcattttttgtagagatggggttttgccatgttgctcaggctggtctcaaactcctgagcactagcaatccacccacctctgttt

SEQ ID NO: 4119 - protein, 874 aa, Homo sapien
MDEEEDNLSLLTALLEENESALDCNSEENNFLTRENGEPDAFDELFDADGDGESYTEEADDGETGETRDEKENLATLFGDMEDLTDEEEVPASQSTENRVLPAPAPRREKTNEELQEELRNLQEQMKALQEQLKVTTIKQTASPARLQKSPEKSPRPPLKERRVQRIQESTCFSAELDVPALPRTKRVARTPKASPPDPKSSSSRMTSAPSQPLQTISRNKPSGITRGQIVGTPGSSGETTQPICVEAFSGLRLRRPRVSSTEMNKKMTGRKLIRLSQIKEKMAREKLEEIDWVTFGVILKKVTPQSVNSGKTFSIWKLNDLRDLTQCVSLFLFGEVHKALWKTEQGTVVGILNANPMKPKDGSEEVCLSIDHPQKVLIMGEALDLGTCKAKKKNGEPCTQTVNLRDCEYCQYHVQAQYKKLSAKRADLQSTFSGGRIPKKFARRGTSLKERLCQDGFYYGGVSSASYAASIAAAVAPKKKIQTTLSNLVVKGTNLIIQETRQKLGIPQKSLSCSEEFKELMDLPTCGARNLKQHLAKATASGIMGSPKPAIKSISASALLKQQKQRMLEMRRRKSEEIQKRFLQSSSEVESPAVPSSSRQPPAQPPRTGSEFPRLEGAPATMTPKLGRGVLEGDDVLFYDESPPPRPKLSALAEAKKLAAITKLRAKGQVLTKTNPNSIKKKQKDPQDILEVKERVEKNTMFSSQAEDELEPARKKRREQLAYLESEEFQKILKAKSKHTGILKEAEAEMQERYFEPLVKKEQMEEKMRNIREVKCRVVTCKTCAYTHFKLLETCVSEQHEYHWHDGVKRFFKCPCGNRSISLDRLPNKHCSNCGLYKWERDGMLKEKTGPKIGGETLLPRGEEHAKFLNSLK

SEQ ID NO: 4120 - DNA, 1167 bp, Homo sapien
cttcagaacaggttctccttccccagtcaccagttgctcgagttagaattgtctgcaatggccgccctgcagaaatctgtgagctctttccttatggggaccctggccaccagctgcctccttctcttggccctcttggtacagggaggagcagctgcgcccatcagctcccactgcaggcttgacaagtccaacttccagcagccctatatcaccaaccgcaccttcatgctggctaaggaggctagcttggctgataacaacacagacgttcgtctcattggggagaaactgttccacggagtcagtatgagtgagcgctgctatctgatgaagcaggtgctgaacttcacccttgaagaagtgctgttccctcaatctgataggttccagccttatatgcaggaggtggtgcccttcctggccaggctcagcaacaggctaagcacatgtcatattgaaggtgatgacctgcatatccagaggaatgtgcaaaagctgaaggacacagtgaaaaagcttggagagagtggagagatcaaagcaattggagaactggatttgctgtttatgtctctgagaaatgcctgcatttgaccagagcaaagctgaaaaatgaataactaaccccctttccctgctagaaataacaattagatgccccaaagcgattttttttaaccaaaaggaagatgggaagccaaactccatcatgatgggtggattccaaatgaacccctgcgttagttacaaaggaaaccaatgccacttttgtttataagaccagaaggtagactttctaagcatagatatttattgataacatttcattgtaactggtgttctatacacagaaaacaatttattttttaaataattgtctttttccataaaaaagattactttccattcctttaggggaaaaaacccctaaatagcttcatgtttccataatcagtactttatatttataaatgtatttattattattataagactgcattttatttatatcattttattaatatggatttatttatagaaacatcattcgatattgctacttgagtgtaaggctaatattgatatttatgacaataattatagagctataacatgtttatttgacctcaataaacacttggatatcccaaaaaaaaaaaaaaa

SEQ ID NO: 4121 - protein, 179 aa, Homo sapien; identical to SEQ ID NO: 3875

SEQ ID NO: 4122 - DNA, 3571 bp, Homo sapien
ctcgaaaaggccccatgtgggcagggggtgtggcaggagctcccagcactggagacccacggactcaacccagttacctcacatggggccttttctgagcaaggtctcgaaagcgcaggccgccctggctgagcagcaccgccctttcccagctgcactcgccctgtggacagccccgacacaccactttcctgaggctgtcgctcactcagattgtccgtttgctatgccgaatgcagccaaaattcctttttacaatttgtgatgccttaccgatttgatcttaatcctgtatttaaagttttctaacactgccttatactgtgtttctctttttgggggagcttaactgcttgttgctccctgtcgtctgcaccatagtaaatgccacaagggtagtcgaacacctctctggcccctagacctatctggggacaggctggctcagcctgtctccagggctgctgcggcccagccccgagcctgccccacgtggcgcgcctctgtctgatcagcaccttcctggaggacggcatccgtatgtggttccagtggagcgagcagcgcgactacatcgacaccacctggaactgcggctacctgctggcctcgtccttcgtcttcctcaacttgctgggacagctgactggctgcgtcctggtgttgagcaggaacttcgtgcagtacgcctgcttcgggctctttggaatcatagctctgcagacgattgcctacagcattttatgggacttgaagtttttgatgaggaacctggccctgggaggaggcctgttgctgctcctagcagaatcccgttctgaagggaagagcatgtttgcgggcgtccccaccatgcgtgagagctcccccaaacagtacatgcagctcggaggcagggtcttgctggttctgatgttcatgaccctccttcactttgacgccagcttcttttctattgtccagaacatcgtgggcacagctctgatgattttagtggccattggttttaaaaccaagctggctgctttgactcttgttgtgtggctctttgccatcaacgtatatttcaacgccttctggaccattccagtctacaagcccatgcatgacttcctgaaatacgacttcttccagaccatgtcggtgattgggggcttgctcctggtggtggccctgggccctgggggtgtctccatggatgagaagaagaaggagtggtaacagtcacagatccctacctgcctggctaagacccgtggccgtcaaggactggttcggggtggattcaacaaaactgccagcttttatgtatcctcttcccttcccctcccttggtaaaggcacagatgttttgagaactttatttgcagagacacctgagaatcgatggctcagtctgctctggagccacagtctggcgtctgacccttcagtgcaggccagcctggcagctggaagcctcccccacgccgaggctttggagtgaacagcccgcttggctgtggcatctcagtcctatttttgagtttttttgtgggggtacaggagggggccttcaagctgtactgtgagcagacgcattggtattatcattcaaagcagtctccctcttatttgtaagtttacatttttagcggaaactactaaattattttgggtggttcagccaaacctcaaaacagttaatctccctggtttaaaatcacaccagtggctttgatgttgtttctgccccgcattgtattttataggaatagtgaaaacatttagggacacccaaagaatgatgcagtattaaaggggtggtagaagctgctgtttatgataaaagtcatcggtcagaaaatcagcttggattggtgccaagtgttttattgggtaacaccctgggagttttagtagcttgaggcaaggtggaggggcaagaagtccttggggaagctgctggtctgggtgctgctggcctccaagctggcagtgggaagggctagtgagaccacacaggggtagccccagcagcagcaccctgcaagccagcctggccagctgctcagaccagcttgcagagccgcagccgctgtgggcagggggtgtggcaggagctcccagcactggagacccacggactcaacccagttacctcacatggggccttttctgagcaaggtctcgaaagcgcaggccgccctggctgagcagcaccgccctttcccagctgcactcgccctgtggacagccccgacacaccactttcctgaggctgtcgctcactcagattgtccgtttgctatgccgaatgcagccaaaattcctttttacaatttgtgatgccttaccgatttgatcttaatcctgtatttaaagttttctaacactgccttatactgtgtttctctttttgggggagcttaactgcttgttgctccctgtcgtctgcaccatagtaaatgccacaagggtagtcgaacacctctctggcccctagacctatctggggacaggctggctcagcctgtctccagggctgctgcggcccagccccgagcctgcctccctcttggcctctcatccattggctctgcagggcaggggtgaggcaggtttctgctcataagtgcttttggaagtcacctacctttttaacacagccgaactagtcccaacgcgtttgcaaatattcccctggtagcctacttccttacccccgaatattggtaagatcgagcaatggcttcaggacatgggttctcttctcctgtgatcattcaagtgctcactgcatgaagactggcttgtctcagtgtttcaacctcaccagggctgtctcttggtccacacctcgctccctgttagtgccgtatgacagcccccatcaaatgaccttggccaagtcacggtttctctgtggtcaaggttggttggctgattggtggaaagtagggtggaccaaaggaggccacgtgagcagtcagcaccagttctgcaccagcagcgcctccgtcctagtgggtgttcctgtttctcctggccctgggtgggctagggcctgattcgggaagatgcctttgcagggaggggaggataagtgggatctaccaattgattctggcaaaacaatttctaagatttttttgctttatgtgggaaacagatctaaatctcattttatgctgtattttatatcttagttgtgtttgaaaacgttttgatttttggaaacacatcaaaataaataatggcgtttgttgtatgcagtgtgatcctatagcgttgcccagcctgaatggggctcccctcaggatgccagtgagcgaggttacttctctaggcttctctgaagaccactcagaagccatgtccagagagaattagtccctcagagtccctgctgcttcctgggtgtgggggacagactccctcagccctgccttagagggcagcagatgtcatgagacaaggataagtgggtagagaagacactggggacaacccgatcattcagaggacacacggtttgatcaggagcgggggaaatatctgaaggctttctcgaaacttcacggcatgtgct

SEQ ID NO: 4123 - protein, 152 aa, Homo sapien
MRNLALGGGLLLLLAESRSEGKSMFAGVPTMRESSPKQYMQLGGRVLLVLMFMTLLHFDASFFSIVQNIVGTALMILVAIGFKTKLAALTLVVWLFAINVYFNAFWTIPVYKPMHDFLKYDFFQTMSVIGGLLLVVALGPGGVSMDEKKKEW

SEQ ID NO: 4124 - DNA, 3810 bp, Homo sapien
gctgacggttgctgcacacacagtccccacgtcagatcctgagcttgcaggggagagctccgtcgggctgggaagcgccagccctggtttgcaacagcacacatgcgctgtccagagcctggggcctcctcctgctgctctggagattttcggataactgtaaacgtgatcttactattcagtcaaccatgtggccctctaggtgtggcaccctggctgtcacctaagccaacccttgttctgtcagggtactctgggcgtcactgggcaggctgggaggtccaggcccttggcacctcagccatgtgtgacctgcaggctggggtcaagtcttggcattgcaccatcaggtctgcgaagcctaggggaaccccttcccgctgggtttaatatagccatttgtaaggtgaggggttggaccagagcagcggagatgcctggcaaagtgcagcggtgcctcaggagggaggctgctgctggcatgtcgtgggcagacatgtcgtgcgtcatagcctgcagcacccaggatgacccacggcaaagagtggcctggcctcagatgccagtagtgctgaggtgcagaaacgttggatagatgacctctaagtgccttttcagatgtcattctgtgattccaacttgtaaatgcctttgaccgaaaagagcagctctgtgtcttgtggcagtgccaccttggaagactgtagttgcctgccgaggcactgggggaaatcacggtagcagagtgttagggctgctgccctataggatctgccccagagggcctaacgtcaagtcatgcatctccgggactgatccttggattgttgcatgtgtccagactcacagggtagcgctcaggagcaagcactgagagccccctagtctgccctgggaaggcaccggggctgacaagagctcttgccttccacagcgtctgttcctcacacaccccgcccaaggacgtgcctggcagcggcctggtgctccccgccgcagccacctcacccttgggtttctgtggccctgcagttcctccgtgtcacaaagcagtacctgccccacgtggcgcgcctctgtctgatcagcaccttcctggaggacggcatccgtatgtggttccagtggagcgagcagcgcgactacatcgacaccacctggaactgcggctacctgctggcctcgtccttcgtcttcctcaacttgctgggacagctgactggctgcgtcctggtgttgagcaggaacttcgtgcagtacgcctgcttcgggctctttggaatcatagctactgcagacgattgccttacagcattttatgggacttgaagtttttgatgaggaacctgggccctgggaggaggcctgtgctgctcctagcagaatcccgttctgaagggaagagcatgtttgcgggcgtccccaccatgcgtgagagctcccccaaacagtacatgcagctcggaggcagggtcttgctggttctgatgttcatgaccctccttcacttggacgccagcttcttttctatgtccagaacatcgtgggcacagctctgatgattttagtggccattggttttaaaaccaagctggctgctttgactcttgttgtgcggctctttgccatcaacgtatatttcaacgccttctggaccattccagtctacaagcccatgcatgacttcctgaaatacgacttcttccagaccatgtcggtgattgggggcttgctcctggtggtggccctgggccctgggggtgtctccatggatgagaagaagaaggagtggtaacagtcacagatccctacctgcctggctaagacccgtggcgtcaaggactggttcggggtggattcaacaaaaactgcagcttttatgtatcctcttcccttcccctcccttggtaaaggcacagatgttttgagaactttatttgcagagacacctgagaatcgatggctcagtctgctctggagccacagtctggcgtctgacccttcagtgcaggccagcctggcagctggaagcctcccccacgccgaggctttggagtgaacagcccgcttggctgtggcatctcagtcctatttttgagtttttttgtgggggtacaggagggggccttcaagctgtactgtgagcagacgcattggtattatcattcaaagcagtctccctcttatttgtaagtttacatttttagcggaaactactaaattattttgggtggttcagccaaacctcaaaacagttaatctccctggtttaaaatcacaccagtggctttgatgttgtttctgccccgcattgtattttataggaatactgaaaacatttagggacacccaaagaatgatgcagtattaaaggggtggtagaagctgctgtttatgataaaagtcatcggtcagaaaatcagcttggattggtgccaagtgttttattgggtaacaccctgggagttttagtagcttgaggcaaggtggaggggcaagaagtccttggggaagctgctggtctgggtgctgctggcctccaagctggcagtgggaagggctagtgagaccacacaggggtagccccagcagcagcaccctgcaagccagcctggccagctgctcagaccagcttgcagagccgcagccgctgtgggcagggggtgtggcaggagctcccagcactggagacccacggactcaacccagttacctcacatggggccttttctgagcaaggtctcgaaagcgcaggccgccctggctgagcagcaccgccctttcccagctgcactcgccctgtggacagccccgacacaccactttcctgaggctgtcgctcactcagattgtccgtttgctatgccgaatgcagccaaaattcctttttacaatttgtgatgccttaccgatttgatcttaatcctgtatttaaagttttctaacactgccttatactgtgtttctctttttgggggagcttaactgcttgttgctccctgtcgtctgcaccatagtaaatgccacaagggtagtcgaacacctctctggcccctagacctatctggggacaggctggctcagcctgtctccagggctgctgcggcccagccccgagcctgcctccctcttggcctctcatccattggctctgcagggcaggggtgaggcaggtttctgctcataagtgcttttggaagtcacctacctttttaacacagccgaactagtcccaacgcgtttgcaaatattcccctggtagcctacttccttacccccgaatattggtaagatcgagcaatggcttcaggacatgggttctcttctcctgtgatcattcaagtgctcactgcatgaagactggcttgtctcagtgtttcaacctcaccagggctgtctcttggtccacacctcgctccctgttagtgccgtatgacagcccccatcaaatgaccttggccaagtcacggtttctctgtggtcaaggttggttggctgattggtggaaagtagggtggaccaaaggaggccacgtgagcagtcagcaccagttctgcaccagcagcgcctccgtcctagtgggtgttcctgtttctcctggccctgggtgggctagggcctgattcgggaagatgcctttgcagggaggggaggataagtgggatctaccaattgattctggcaaaacaatttctaagattttttgctttatgtgggaaacagatctaaatctcattttatgctgtattttatatcttagttgtgtttgaaaacgtttgattttggaaacacatcaaaataaataatggc

SEQ ID NO: 4125 - protein, 51 aa, Homo sapien
LTVAAHTVPTSDPELAGESSVGLGSASPGLQQHTCAVQSLGPPPAALEIFG

SEQ ID NO: 4126 - DNA, 1577 bp, Homo sapien
ggcggagagggccggccgccggcacattcctgtggaggccgcagcgggtgcggcgccgacgggaggagcagcgagcgagcgacgaacgccgagccgagcctcccgccgtcgccatgggccagaacgacctgatgggcacggccgaggacttcgccgaccagttcctccgtgtcacaaagcagtacctgccccacgtggcgcgcctctgtctgatcagcaccttcctggaggacggcatccgtatgtggttccagtggagcgagcagcgcgactacatcgacaccacctggaactgcggctacctgctggcctcgtccttcgtcttcctcaacttgctgggacagctgactggctgcgtcctggtgttgagcaggaacttcgtgcagtacgcctgcttcgggctctttggaatcatagctctgcagacgattgcctacagcattttatgggacttgaagtttttgatgaggaacctggccctgggaggaggcctgttgctgctcctagcagaatcccgttctgaagggaagagcatgtttgcgggcgtccccaccatgcgtgagagctcccccaaacagtacatgcagctcggaggcagggtcttgctggttctgatgttcatgaccctccttcactttgacgccagcttcttttctattgtccagaacatcgtgggcacagctctgatgattttagtggccattggttttaaaaccaagctggctgctttgactcttgttgtgtggctctttgccatcaacgtatatttcaacgccttctggaccattccagtctacaagcccatgcatgacttcctgaaatacgacttcttccagaccatgtcggtgattgggggcttgctcctggtggtggccctgggccctgggggtgtctccatggatgagaagaagaaggagtggtaacagtcacagatccctacctgcctggctaagacccgtggccgtcaaggactggttcggggtggattcaacaaaactgccagcttttatgtatcctcttcccttcccctcccttggtaaaggcacagatgttttgagaactttatttgcagagacacctgagaatcgatggctcagtctgctctggagccacagtctggcgtctgacccttcagtgcaggccagcctggcagctggaagcctcccccacgccgaggctttggagtgaacagcccgcttggctgtggcatctcagtcctatttttgagtttttttgtgggggtacaggagggggccttcaagctgtactgtgagcagacgcattggtattatcattcaaagcagtctccctcttatttgtaagtttacatttttagcggaaactactaaattattttgggtggttcagccaaacctcaaaacagttaatctccctggtttaaaatcacaccagtggctttgatgttgtttctgccccgcattgtattttataggaatactgaaaacatttagggacacccaaagaatgatgcagtattaaaggggtggtagaagctgctgtttatgataaaagtcatcggtcagaaaaaaaaaaaaaaaaaaaaaaaaaaaaaaaaa

SEQ ID NO: 4127 - protein, 269 aa, Homo sapien
MGQNDLMGTAEDFADQFLRVTKQYLPHVARLCLISTFLEDGIRMWFQWSEQRDYIDTTWNCGYLLASSFVFLNLLGQLTGCVLVLSRNFVQYACFGLFGIIALQTIAYSILWDLKFLMRNLALGGGLLLLLAESRSEGKSMFAGVPTMRESSPKQYMQLGGRVLLVLMFMTLLHFDASFFSIVQNIVGTALMILVAIGFKTKLAALTLVVWLFAINVYFNAFWTIPVYKPMHDFLKYDFFQTMSVIGGLLLVVALGPGGVSMDEKKKEW

SEQ ID NO: 4128 - DNA, 3164 bp, Homo sapien
cggcctcagaaagccgagtgaggagttggccgtagtgagagggaccgatcccttggggccgccggcggcgaggccgagccgctcctcccaatggcgaagaagacgtacgacctgcttttcaagctgctcctgatcggggattccggagtggggaagacctgcgtcctttttcgtttttcggatgatgccttcaatactacctttatttccaccataggaatagacttcaagatcaaaacagttgaattacaaggaaagaagatcaagctacagatatgggatacagcaggccaggagcgatttcacaccatcacaacctcctactacagaggcgcaatgggtatcatgctagtatatgacatcaccaatggtaaaagttttgaaaacatcagcaaatggcttagaaacatagatgagcatgccaatgaagatgtggaaagaatgttactaggaaacaagtgtgatatggacgacaaaagagttgtacctaaaggaaaaggagaacagattgcaagggagcatggtattaggttttttgagactagtgcaaaagcaaatataaacatcgaaaaggcgttcctcacgttagctgaagatatccttcgaaagacccctgtaaaagagcccaacagtgaaaatgtagatatcagcagtggaggaggcgtgacaggctggaagagcaaatgctgctgagcattctcctgttccatcagttgccatccactaccccgttttctcttcttgctgcaaaataaaccactctgtccatttttaactctaaacagatatttttgtttctcatcttaactatccaagccacctattttatttgttctttcatctgtgactgcttgctgactttatcataattttcttcaaacaaaaaaatgtatagaaaaatcatgtctgtgacttcatttttaaatgtacttgctcagctcaactgcatttcagttgtattatagtccagttcttatcaacattaaaacctatagcaatcatttcaaatctattctgcaaattgtataagaataaagttagaattaacaattttattttgtacaacagtggaattttctgtcatggataatgtgcttgagtccctataatctatagacatgtgatagcaaaagaaacaaacaaaagccaggaaaacactcattttcgccttgaatatgtaaatgggattaattttgtcctgtgccttatgtggaaagggacttctttgggttttccttttttgttctggtggaagcatgtgcagggagaccatatcatccaaaccataaacccattaaaatgtttgtggtttgcttggctgtaattttcaaagtagttaattgaggacaaagggtaatgcagaagtgatagctttggtttgctgagtcttgttttaagtggccttgatatttaaaactattcctgccaccatttcttctccttggccacttcttccttgcgtctccctgcatgctgctttatttgcttctccctccccaaccacctcatggtatatttaagagtgaaagggacaaactagtaggtttgtcaagtttaatataaagcactgatgtaacttgctaggtaaacggaaagataagttctaactgcctactatccaatgtcagttaattggtgtcttcccccctcatttgctctcttccctaaaatgtgtcccagatgccttcatttgctgttttacttctatgttctgcttttcctcctctctttgttcccttcctgtctatccattgagtttatgaaatggaagagttaactgcatgcactagtgtttggagggtgttgtggtttgtctttctaattaggtgtatagcctattcactttcctaggaataaatctcttaacctaaatttgagtagtctgcattttggcaactcctctaagcagcttggtagcctaagtacaggttgtttttttaaaaaaggaaaagcaggaaggaggagtgaattttattaacatgtttgccaaatgtattgagatttggcctctgaagaacactttttcagtgttaagtttctttaccttaagattccgaaatactttagaatattattaattttaagtcctgtctttacatccttttggaaaacttgtattaccatgagtttggaaaaaggacaacgaaaggcttttcatgtaaagataagatctttagctatctctaaccctgtccttttttcactgcattttttctagttttgcttcattgcttatcattaggatagggtaagtgaagtttgctatgctgctagcatcctaagatgatacctttgttgaaagaattgtgaatagcatgattcatttctagcagaggctgagtttaggacagcagcttccattgagaagtctttctgtgtcgtgaatagcattttaatgacctcttggctcacataagcaaacaacatagggacgtatctgctatgaaaatccacaaatttttcagatagtgccctaaaaacaattttatatgcctcactggttgttattcttaggttattcccacacttgactttatcattgtttactactagtaaaaagcagcattgccaaataatccctaattttccactaaaaatataatgaaatgatgttaagctttttgaaaagtttaggttaaacctactgttgttagattaatgtatttgttgcttccctttatctggaatgtggcattagcttttttattttaaccctctttaattcttattcaattccatgacttaaggttggagagctaaacactgggatttttggataacagactgacagttttgcataattataatcggcattgtacatagaaaggatatggctaccttttgttaaatctgcactttctaaatatcaaaaaagggaaatgaagtataaatcaatttttgtataatctgtttgaaacatgagttttatttgcttaatattagctttgccccttttctgtaagtctcttgggatcctgtgtagaagctgttctcattaaacaccaaacagttaagtccattctctggtactagctacaaattcggtttcatattctacttaacaatttaaataaactgaaatatttctagatggtctacttctgttcatataaaaacaaaacttgatttccaaaaaaaaaaaaaaaaaaaaaaaaaaaaaaaaa

SEQ ID NO: 4129 - protein, 200 aa, Homo sapien
MAKKTYDLLFKLLLIGDSGVGKTCVLFRFSDDAFNTTFISTIGIDFKIKTVELQGKKIKLQIWDTAGQERFHTITTSYYRGAMGIMLVYDITNGKSFENISKWLRNIDEHANEDVERMLLGNKCDMDDKRVVPKGKGEQIAREHGIRFFETSAKANINIEKAFLTLAEDILRKTPVKEPNSENVDISSGGGVTGWKSKCC

SEQ ID NO: 4130 - DNA, 3164 bp, Homo sapien; identical to SEQ ID NO: 4128

SEQ ID NO: 4131 - protein, 200 aa, Homo sapien; identical to SEQ ID NO: 4129

SEQ ID NO: 4132 - DNA, 3712 bp, Rattus norvegicus
ccggttcccgcggtcgcagctccagccgcctcctccgcgcagccgccgcctcagctgctcgctctgtgggtcggtcctctccggcacttgggctccagtcgcgccctccaagcccttcaggccgccccagtgtcctcctccttctccggccagacccagccccgcgaagatggtggaccgcgagcaactggtgcagaaagcccggctggccgagcaggcggagcgctacgacgacatggccgcggccatgaagaacgtgacagagctgaatgagccactgtcgaatgaggaacgaaaccttctgtctgtggcctacaagaacgttgtgggggcacgccgctcttcctggagggtcatcagtagcattgagcagaagacatctgcagacggcaatgagaagaagattgagatggtccgtgcgtaccgggagaagatagagaaggagttggaggctgtgtgccaggatgtgctgagcctgctggataactacctgatcaagaattgcagcgagacccagtacgagagcaaagtgttctacctgaagatgaaaggggactactaccgctacctggctgaagtggccaccggagagaaaagggcgacggtggtggagtcctccgagaaggcctacagcgaagcccacgagatcagcaaagagcacatgcagcccacccaccccatccgattaggcctggctcttaactactccgtcttctactatgagatccagaacgccccagagcaagcgtgccacttggccaagaccgcgttcgacgacgccatcgccgagcttgacaccctcaacgaggactcctacaaggactccacgctcatcatgcagctcctccgcgacaacctcacgctctggacgagcgaccagcaggacgacgatggcggcgaaggcaacaattaaggccccaggggaactggcagcgcacgcggatgctactactgcagtctttatttttttcccatgagttgggggtcgggtgggggagggaaagggagggatgaccttcccagggagaaacccacgacctgtcctgtctttgatcgcctctttgacatttttgccaaaataccactagtggaaagtcaggctagctgtgctggtattggaatagcagcctcacactggcgtctggactgttctgtagattcatgcaagtggagctgtctgtctctaatttaacttattgctagataatagggttttcagatgaaaagaaaacttaaagaggaatggccctcattcagtaagttctgtggttccagtaaggatttttatgtacatacgctctcgtctctcgttttgggtactttctatctcatctgtctcggctctgcatgttttccagggtgtagcctacagacatggaacagtgtaaatcccagactgacagacttagaacctgaggtctcattcatccttatggtttaggccttgccagttttccgaagtctctgattagttgacagtattaacactaaattgcagtttacagtatttctacattacagccatatgtaacatcaagccatcgattgtgtacttttcctttgctagttgtttgggctttaacatccttattcagccttatccaggttggttttgctgttgatcggtctcctaggctaaatgagaatgaaagcgacttcaggtttttggttcataggtgctcggcaggtggctgtgggatttttttttttggtccttctttcctcttaacgtaaatccaccaccaaaattattaatcctcttgagagaaacgtgaaacgccacaaaaatagagaaaattcaggtctgtatgtcatggatcgtgttggtattttcagagaacatcccgcttctgaagctgctgcagctccctcctcagggatcacactgccgtcacccactctgcactggggcgtttcctactgcgcctcgtgctggcggacgcagctgggtgcagaagctgtggggtcggagaggcgtttggagaaggtctgtggtgcagtgtgtgaaaattcaggtgctagaagcctactggtagaaaaacccaaaaggaagagctatatccttaaccattctgtccaatttcgggagccttgtcagtgtgtcagtttttcctccccgaagacactccttccccaagtaattgtaggaagataaaaaaactgttaccagataacaaacacttaactcctatttgaccagaactttttcctctcgagatagttttttctttttaatgaaaaaagcataggaattggagattggcttgtctcacgcagccagtgcacatttggaattgacggaaacaacgttgctatttccacccatttgttttcggcagccttaaggccctcattctcatttcgggtgaatctgtctatctgtgaacgtggcccgcatgtgcattcttttttttatatatataaagtcagtgacgaggcactcccgagacgtgtaatgacaccacacttgttttctttgtttctttgttttatttaggcaagaagaggtgtgagtaattgaggaaaaactgacagatgcttttgctaataccaaaattgagcttacaattaggaactgagtatgtgtaacaggatacaggtgacagtgaagatagaagaaccacgatgaccacagactcaatgtgctctgtaacatcgcacagtttacccagcatgactttccttaggaggccccctcctcacgctagagtaaaagtcccagttaagtgaagcctaccagaagaactagtagaagaagctttgccgcttttgtgcctctcacaggcgcctaaagtcattgccatgggaggaagacgatttggggggggagggggggggcagggtaggtggggctttccctaatttatcttcatgtccagtgagcagtgttgcgtttttccttgtagcatttggaaatgatttactggaattacaaaacctatttttcctttaaatttcagctttggctctggctgctttttagaataatgcaagataaaaatcacacctgagggctgaaaacggagagggaatgggagacttgatatttaagcagcttgaatggtttttcttttctttatttttaaagaaatgcacttgcctatgatactgtctctccagtgaaatgattactcctccattactctattgatacaatattgtgcatgctagtgttgtatttctatacagtagcttgaaattgattaacttatactgtaggtgttatgtattcctatgacaaaaaaaattaagtcttcaaattttttaaaggttttttttttttaatttaatttttccttttgggggtaaagtttgctctaccaaatagtgattgtaacaaattgatctgttttggatgttgctatagtgacatgcagttatatattttgtttttaaaagggggggagcaaaagaaacaccagtgttagcttaatcttaatgtctggtgtttgtcatggtgaaattataactattacagtgttggagaacaacaaatatgttctctgaatgagcctttgtgctttttgtcatgttatgcagtgaactatttttaaggtctaatcagtgattatttttccagctccgtgtttctctaaggaattatttcacacacggaccatctttagcagtttcctcagtgatggaatatcatgaatgtgagtcattatgtagctgtcgtacattgagcaaataaacttacagatctgacgcc

SEQ ID NO: 4133 - protein, 247 aa, Rattus norvegicus
MVDREQLVQKARLAEQAERYDDMAAAMKNVTELNEPLSNEERNLLSVAYKNVVGARRSSWRVISSIEQKTSADGNEKKIEMVRAYREKIEKELEAVCQDVLSLLDNYLIKNCSETQYESKVFYLKMKGDYYRYLAEVATGEKRATVVESSEKAYSEAHEISKEHMQPTHPIRLGLALNYSVFYYEIQNAPEQACHLAKTAFDDAIAELDTLNEDSYKDSTLIMQLLRDNLTLWTSDQQDDDGGEGNN

SEQ ID NO: 4134 - DNA, 2974 bp, Homo sapien
ggaggaagcggtggctgctgcggatgtcggtgtgagcgagcggcgcctgaacacacggcggctgccgagcgcctgacccgggcctgcgccagagcctgcaccgagctccggggccccacacccgctacggtggccctgcgcccgttgctactgaggcggcgtgctctgcattcttcgctgtccaggcctgccggctctggtgtctgctggctcctccttgctcgcctgctccctcctgcttgcctgagtcaccgccgccgccgccgccacagccatggccgagagtggtgaaagcggcggtcctccgggctcccaggatagcgccgccggagccgaaggtgctggcgcccccgcggccgctgcctccgcggagcccaaaatcatgaaagtcaccgtgaagaccccgaaggaaaaggaggaattcgccgtgcccgagaatagctccgtccagcagtttaaggaagaaatctctaaacgttttaaatcacatactgaccaacttgtgttgatatttgctggaaaaattttgaaagatcaagataccttgagtcagcatggaattcatgatggacttactgttcaccttgtcattaaaacacaaaacaggcctcaggatcattcagctcagcaaacaaatacagctggaagcaatgttactacatcatcaactcctaatagtaactctacatctggttctgctactagcaacccttttggtttaggtggccttgggggacttgcaggtctgagtagcttgggtttgaatactaccaacttctctgaactacagagtcagatgcagcgacaacttttgtctaaccctgaaatgatggtccagatcatggaaaatccctttgttcagagcatgctctcaaatcctgacctgatgagacagttaattatggccaatccacaaatgcagcagttgatacagagaaatccagaaattagtcatatgttgaataatccagatataatgagacaaacgttggaacttgccaggaatccagcaatgatgcaggagatgatgaggaaccaggaccgagctttgagcaacctagaaagcatcccagggggatataatgctttaaggcgcatgtacacagatattcaggaaccaatgctgagtgctgcacaagagcagtttggtggtaatccatttgcttccttggtgagcaatacatcctctggtgaaggtagtcaaccttcccgtacagaaaatagagatccactacccaatccatgggctccacagacttcccagagttcatcagcttccagcggcactgccagcactgtgggtggcactactggtagtactgccagtggcacttctgggcagagtactactgcgccaaatttggtgcctggagtaggagctagtatgttcaacacaccaggaatgcagagcttgttgcaacaaataactgaaaacccacaactgatgcaaaacatgttgtctgccccctacatgagaagcatgatgcagtcactaagccagaatcctgaccttgctgcacagatgatgctgaataatcccctatttgctggaaatcctcagcttcaagaacaaatgagacaacagctcccaactttcctccaacaaatgcagaatcctgatacactatcagcaatgtcaaaccctagagcaatgcaggccttgttacagattcagcagggtttacagacattagcaacggaagccccgggcctcatcccagggtttactcctggcttgggggcattaggaagcactggaggctcttcgggaactaatggatctaacgccacacctagtgaaaacacaagtcccacagcaggaaccactgaacctggacatcagcagtttattcagcagatgctgcaggctcttgctggagtaaatcctcagctacagaatccagaagtcagatttcagcaacaactggaacaactcagtgcaatgggatttttgaaccgtgaagcaaacttgcaagctctaatagcaacaggaggtgatatcaatgcagctattgaaaggttactgggctcccagccatcatagcagcatttctgtatcttgaaaaaatgtaatttatttttgataacggctcttaaactttaaaatacctgctttatttcattttgactcttggaattctgtgctgttataaacaaacccaatatgatgcattttaaggtggagtacagtaagatgtgtgggtttttctgtatttttcttttctggaacagtgggaattaaggctactgcatgcatcacttctgcatttattgtaattttttaaaaacatcaccttttatagttgggtgaccagattttgtcctgcatctgtccagtttatttgctttttaaacattagcctatggtagtaatttatgtagaataaaagcattaaaaagaagcaaatcatttgcactctataatttgtggtacagtattgcttattgtgactttggcatgcatttttgcaaacaatgctgtaagatttatactactgataattttgttttatttgtatacaatatagagtatgcacatttgggactgcatttctggaaacatactgcaataggctctctgagcaaaacacctgtaactaaaaaagtgaagataagaaaatactcttaaagctgagtatttcctaattgtatagaatcttacagcatctttgacaaacatctcccagcaaaagtgccggttagtcaggtttgttgaaaatacagtagaaaagctgattctggttatctctttaaggacaattaattgtacagacacataatgtaacattgtctcaacattcattcacagattgactgtaaattaccttaatctttgtgcagactgaaggaacactgtagtataccccaaagtgcatttgcctaggacttctcagcttctcccataggtagtttaacaggcattaaaatttgtaattgaaatgttgctttcactcaaaaaaaaaaaaaaaaaaaa

SEQ ID NO: 4135 - protein, 589 aa, Homo sapien
MAESGESGGPPGSQDSAAGAEGAGAPAAAASAEPKIMKVTVKTPKEKEEFAVPENSSVQQFKEEISKRFKSHTDQLVLIFAGKILKDQDTLSQHGIHDGLTVHLVIKTQNRPQDHSAQQTNTAGSNVTTSSTPNSNSTSGSATSNPFGLGGLGGLAGLSSLGLNTTNFSELQSQMQRQLLSNPEMMVQIMENPFVQSMLSNPDLMRQLIMANPQMQQLIQRNPEISHMLNNPDIMRQTLELARNPAMMQEMMRNQDRALSNLESIPGGYNALRRMYTDIQEPMLSAAQEQFGGNPFASLVSNTSSGEGSQPSRTENRDPLPNPWAPQTSQSSSASSGTASTVGGTTGSTASGTSGQSTTAPNLVPGVGASMFNTPGMQSLLQQITENPQLMQNMLSAPYMRSMMQSLSQNPDLAAQMMLNNPLFAGNPQLQEQMRQQLPTFLQQMQNPDTLSAMSNPRAMQALLQIQQGLQTLATEAPGLIPGFTPGLGALGSTGGSSGTNGSNATPSENTSPTAGTTEPGHQQFIQQMLQALAGVNPQLQNPEVRFQQQLEQLSAMGFLNREANLQALIATGGDINAAIERLLGSQPS

SEQ ID NO: 4136 - DNA, 2974 bp, Homo sapien; identical to SEQ ID NO: 4134

SEQ ID NO: 4137 - protein, 561 aa, Homo sapien
MAESGESGGPPGSQDSAAGAEGAGAPAAAASAEPKIMKVTVKTPKEKEEFAVPENSSVQQFKEEISKRFKSHTDQLVLIFAGKILKDQDTLSQHGIHDGLTVHLVIKTQNRPQDHSAQQTNTAGSNVTTSSTPNSNSTSGSATSNPFGLGGLGGLAGLSSLGLNTTNFSELQSQMQRQLLSNPEMMVQIMENPFVQSMLSNPDLMRQLIMANPQMQQLIQRNPEISHMLNNPDIMRQTLELARNPAMMQEMMRNQDRALSNLESIPGGYNALRRMYTDIQEPMLSAAQEQFGGNPFASLVSNTSSGEGSQPSRTENRDPLPNPWAPQTSQSSSASSGTASTVGGTTGSTASGTSGQSTTAPNLVPGVGASMFNTPGMQSLLQQITENPQLMQNMLSAPYMRSMMQSLSQNPDLAAQMQNPDTLSAMSNPRAMQALLQIQQGLQTLATEAPGLIPGFTPGLGALGSTGGSSGTNGSNATPSENTSPTAGTTEPGHQQFIQQMLQALAGVNPQLQNPEVRFQQQLEQLSAMGFLNREANLQALIATGGDINAAIERLLGSQPS

SEQ ID NO: 4138 - DNA, 1511 bp, Homo sapien
ctcattcgttcccagcaggccctgcgcgcggcaacatggcggggtccaggtggaggtcttgaggctatcagatcggtatggcattggcgtccgggcccgcaaggcgggcgctagctggctccgggcagctcggccttgggggcttcggggccccgagacgcggggcgtatgagtggggcgtgcgctccacgcggaagtcggagcctcctcccctggatagggtgtacgagatccctggactggagcccatcacctttgcggggaagatgcacttcgtgccctggctggcgcggccgatctttccgccctgggaccgcggctacaaggacccaaggttctaccgctcgccccctcttcacgagcatccgctgtacaaagaccaggcctgctatatctttcaccaccgttgccgccttctcgagggtgtaaagcaggccctctggctcaccaagaccaagttaatagaaggccttcccgagaaagtgcttagccttgttgatgatccaaggaaccacatagagaaccaagacgagtgcgttctgaatgtgatctctcacgcccgtctctggcagaccactgaggaaatccccaagagagagacctactgcccggtcatcgtggacaacctaatacagctgtgtaaatctcagattctcaagcatccttctctggccaggaggatctgtgtccaaaactccacgttttctgctacctggaaccgagagtctcttctccttcaagtccgtggttctggtggagcccgactgagcactaaggatcctctgcccaccatcgcctccagagaggagattgaagctactaagaatcatgttctagagaccttctaccccatatcacccatcatcgatcttcatgaatgcaatatttatgatgtgaaaaatgacacaggattccaggaaggctatccttacccctatccccataccctgtacttactggacaaagccaatttacgaccacaccgccttcaaccagatcagctgcgggccaagatgatcctgtttgcttttggcagtgccctggctcaggcccggctcctctatgggaatgatgccaaggtcttggagcagcccgtggtggtgcagagcgtgggcacggatggacgtgtcttccatttcctagtgtttcaactgaataccacagacctggactgtaacgagggtgtcaagaatttggcctgggtggactcagaccagctcctctatcagcatttttggtgtctcccagtgatcaaaaagagagtggttgtggaacctgttgggccagttggtttcaagccagagacattcagaaagtttttagctctatatttgcatggtgctgcgtgagcggaggacccctctgaatcctgaaacccctcttgcctctcttccacggaagagggcctgggccccgtggagcctcagtgcccgtttggcctgctgctctcgctgacaataaagagcccttgcgttgcaaaaaaaaaaaaaaaaaaaaaaaaaaaaaaaaaa

SEQ ID NO: 4139 - protein, 423 aa, Homo sapien [sequence omitted]

SEQ ID NO: 4140 - DNA, 1108 bp, Homo sapien
agcagtggcccaaagaggagcagcagacaagagtgcagtggtggctgccgccgcaccagcctcagtggcagatgacacaccaccccccgagcgtcggaacaagagcggtatcatcagtgagcccctcaacaagagcctgcgccgctcccgcccgctctcccactactcttcttttggcagcagtggtggtagtggcggtggcagcatgatgggcggagagtctgcttgacaaggccactgcggctgcagcctggccttccctgttggccaatgggatgacctggcggcggccatggcggtggacaaaagcaaccctacctcaaagcacaaaagtggtgctgtggccagcctgctgagcaaggcagagcgggccacggagctggcagccgagggacagctgacgctgcagcagtttgcgcagtccacagagatgctgaagcgcgtggtgcaggagcatctcccgctgatgagcgaggcgggtgctggcctgcctgacatggaggctgtggcaggtgccgaagccctcaatggccagtccgacttcccctacctgggcgctttccccatcaacccaggcctcttcattatgaccccggcaggtgtgttcctggccgagagcgcgctgcacatggcgggcctggctgagtaccccatgcagggagagctgcctctgccatcagctccggcaagaagaagcggaaacgctgcggcattgtgcgcgccctgccggcggcgcatcaactgcgagcagtgcagcagttgtaggaatcgaaagactggccatcagatttgcaaattcagaaaatgtgaggaactcaaaaagaagccttccgctgctctggagaaggtgatgcttccgacgggagccgccttccggtggtttcagtgacggcggcggaacccaaagctgccctctccgtgcaatgtcactgctcgtgtggtctccagcaagggattcgggcgaagacaaacggatgcacccgtctttagaaccaaaaatattctctcacagatttcattcctgtttttatatatatattttttgttgtcgttttaacatctccacgtccctagcataaaaaaaaaaaaaaaaaaaaaaaaaaaaaaa

SEQ ID NO: 4141 - protein, 198 aa, Homo sapien
MAVDKSNPTSKHKSGAVASLLSKAERATELAAEGQLTLQQFAQSTEMLKRVVQEHLPLMSEAGAGLPDMEAVAGAEALNGQSDFPYLGAFPINPGLFIMTPAGVFLAESALHMAGLAEYPMQGELPLPSAPARRSGNAAALCAPCRRRINCEQCSSCRNRKTGHQICKFRKCEELKKKPSAALEKVMLPTGAAFRWFQ

SEQ ID NO: 4142 - DNA, 1733 bp, Homo sapien
ctctcacgcagccaacatggctccagtggagcacgttgtggcggatgctggggctttcctgcggcatgcggctctgcaggacatcgggaagaacatttacaccatccgggaggtggtcactgagattcgggacaaggccacacgcaggcggctcgctgtcctgccctacgagctgcggttcaaggagcccttaccggaatacgtgcggctggtgactgagttttcaaagaaaacaggagactaccccagcctctctgccacggacatccaagtgcttgcactcacataccagttggaagcagagtttgttggggtgtctcacctaaaacaagaaccacagaaggttaaggtgagctcatcgattcagcacccagaaacacctctgcacatttctggtttccatctgccctacaagcctaaacccccacaagaaacagaaaaaggacactcagcttgtgagcctgagaacctggaatttagttccttcatgttctggagaaaccctttgcccaacatcgatcatgaactgcaggagctgctgattgacagaggtgaggacgttccaagtgaggaggaggaggaggaagaaaacgggtttgaagacagaaaagatgacagcgatgacgacgggggtggctggataacccccagtaacatcaagcagatccagcaggagctggagcagtgtgacgtccccgaggacgtgcgggttggctgcctgaccacagacttcgccatgcagaatgttctgctgcagatggggctgcacgtgctggcggtgaacggcatgctgattcgtgaggcccggagctacatcttgcgctgccatggctgtttcaagacaacgtctgacatgagccgagtgttctgctcacactgtgggaacaagaccctgaagaaagtgtccgtgaccgtcagcgacgacggcaccctgcacatgcacttctcccgcaaccccaaggtgctgaacccccgcggcctccggtactcgcttcccactcccaaagggggcaaatacgccatcaacccccatctcaccgaggatcagcgcttccctcagctgcgactctcccaaaaggccaggcagaaaaccaacgtgttcgcccctgactacatcgccggggtgtcaccctttgtcgagaatgacatctccagccgctcagctaccctgcaggtccgggacagcaccttgggagctgggcggagacgcttaaatcccaacgcttccagaaagaagtttgtgaagaaaaggtgaagagcgagttcccgcaggcaaattggatgggcgtctggccgccgtggagttccggtgacccatttccccagccgtgtcgtctccaggaccacccgatggaaataacaggcgggcttcacggtgcggctctgtccgcccatgccccgctgggtctgcagggaactggactgtcccatggcctgtgagcaccggagcgcctggctgcctgccaaggaagtgcaattgcataaaaacagaaagaacaacgccctggagccaatcttcaagaaaggaatttccaaaggataatatttttctaataaatgcggctgcaacctcctgtgcatttaattaaataggccaaatttttgctgcttaggtcatctcaaggctgatacttgagctgtgtgcccagagatcatgcatttagatttatatttttgccagaaaatacaaggttataataaaactaagaactaccaaaaaaaaaaaaaaaaaa

SEQ ID NO: 4143 - protein, 412 aa, Homo sapien [sequence omitted]

SEQ ID NO: 4144 - DNA, 1833 bp, Homo sapien
cgggagtagagatggccgcgcttgcaccgctgcccccgctccccgcacagttcaagagcatacagcatcatctgaggacggctcaggagcatgacaagcgagaccctgtggtggcttattactgtcgtttatacgcaatgcagactggaatgaagatcgatagtaaaactcctgaatgtcgcaaatttttatcaaagttaatggatcagttagaagctctaaagaagcagttgggtgataatgaagctattactcaagaaatagtgggctgtgcccatttggagaattatgctttgaaaatgtttttgtatgcagacaatgaagatcgtgctggacgatttcacaaaaacatgatcaagtccttctatactgcaagtcttttgatagatgtcataacagtatttggagaactcactgatgaaaatgtgaaacacaggaagtatgccagatggaaggcaacatacatccataattgtttaaagaatggggagactcctcaagcaggccctgttggaattgaagaagataatgatattgaagaaaatgaagatgctggagcagcctctctgcccactcagccaactcagccatcatcatcttcaacttatgacccaagcaacatgccatcaggcaactatactggaatacagattcctccgggtgcacacgctccagctaatacaccagcagaagtgcctcacagcacaggtgtagcaagtaatactatccaacctactccacagactatacctgccattgatcccgcacttttcaatacaatttcccagggggatgttcgtctaaccccagaagactttgctagagctcagaagtactgcaaatatgctggcagtgctttgcagtatgaagatgtaagcactgctgtccagaatctacaaaaggctctcaagttactgacgacaggcagagaatgaagcctttgtatgacagacccatgtatttttggcatgaggaactaacagtccattactctatcttcagcctatcaggatcacagttttcattgtccatttactagattcaatcgtctctgagtatatagggctgatgttagcaagaccctaaaaatgtccattgaaccctgcttcaaaaaatgaaaacacacctctataaaatgtgtactgggaataagctttgtatttacatacattaggggaattttttaaaatctgtaatgtttggacaaacagatgatattactttgctataaaattataaatgtaacttttaataaagatagccagaatattctaaattagaaattacgtttttgtttccctcaagacataaaacaaatataaacattctaaactgctggatgaatctgaaaagacattaagttcaaattttaatttattctcatattaaatataactccattaaaagtttaaaatttcatgggagaaaatataataaggtaaagaggtagaatcactttcagacttaagaataatgttgatttcccaagtgctttaccttatctgttaaagcgtaagatgaattggtatttgcttcataggcagtttgactgcatgtattagagaatgaaaagaagatatttgtagtaatgcctggaaacttggtgctttaaattaaggtactcctctgctgctgtagaatggattccacacagtggatagctatgggtgattcagagtattatgtttagattcccatttgttaagtttataagttttgtggggaattatgaacttactgtgtactacctgcatttgtgctgtgtgaaaaataaatacaaggattcgtttagctaattcaactaaaaaaaaaaaaaaaaaaaaaaaaaaaaaa

SEQ ID NO: 4145 - protein, 307 aa, Homo sapien
MAALAPLPPLPAQFKSIQHHLRTAQEHDKRDPVVAYYCRLYAMQTGMKIDSKTPECRKFLSKLMDQLEALKKQLGDNEAITQEIVGCAHLENYALKMFLYADNEDRAGRFHKNMIKSFYTASLLIDVITVFGELTDENVKHRKYARWKATYIHNCLKNGETPQAGPVGIEEDNDIEENEDAGAASLPTQPTQPSSSSTYDPSNMPSGNYTGIQIPPGAHAPANTPAEVPHSTGVASNTIQPTPQTIPAIDPALFNTISQGDVRLTPEDFARAQKYCKYAGSALQYEDVSTAVQNLQKALKLLTTGRE

SEQ ID NO: 4146 - DNA, 4175 bp, Homo sapien
cggggccgaggcggaggagcggccgccgcgccggggcccagccggagccgccgccctcgcccttgcctttgcctgcgcggctcagaatcaccatccgcggcggggagacgagccggccgtcccgggccgggggacccgcccgccatggccaccaaggctcgggttatgtatgattttgctgctgaacctggaaataatgaactgacggttaatgaaggagaaatcatcacaatcacaaatccggatgtaggtggaggatggctggaaggaagaaacatcaaaggagaacgagggctggttcccacagactacgttgaaattttacccagtgatggaaaagatcaattttcttgtggaaattcagtggctgaccaagccttccttgattctctctcagccagcacagctcaggccagttcgtcggctgccagcaacaatcaccaggttggcagtggcaatgacccctggtcagcctggagtgcctccaaatctgggaactgggaaagctcagaaggctggggggcccagccagagggggctggagcccaaagaaacacaaacactcccaacaactgggacactgccttcggccacccccaggcctaccaaggaccagcaactggtgatgatgatgactgggatgaagactgggatgggcccaaatcctcttcctactttaaggattcagagtcagctgatgcaggcggcgctcagcgaggaaacagtcgtgctagttcctcatccatgaaaattccccttaacaaatttcctggatttgcgaaacctggcacggaacagtatttgttggccaaacaactagcaaaacccaaagagaaaattcccatcattgttggagattatggcccaatgtgggtttatcctacctctacttttgactgtgtggtagcagatcccaggaaaggctccaaaatgtatggtctaaagagctacatcgaatatcagctaacacctactaacactaatcgatctgtaaaccacaggtataagcactttgactggttatatgagcgtctcctggttaagtttgggtcagccattccaatcccttctcttccagacaaacaagtcacaggccgctttgaagaggaatttatcaaaatgcgcatggagagacttcaggcctggatgaccaggatgtgtcgccatccagtaatctcagaaagtgaagttttccagcagttcctaaatttccgagatgagaaggaatggaaaactggaaagaggaaggccgagagagatgagctggcgggagtcatgatattttccaccatggaaccagaggcacctgacttggacttagtagaaatagagcagaagtgcgaggctgtggggaagttcaccaaggccatggatgacggcgtgaaggagctgctgacggtggggcaggagcactggaagcgctgcacgggcccattacccaaggaatatcagaagataggaaaggccttgcagagtttggccacagtgttcagttccagtggctatcaaggtgaaacagatctcaatgatgcaataacagaagcaggaaagacttatgaagaaattgccagtctcgtggcagaacagccaaagaaagatctccatttcctgatggaatgtaatcacgagtataaaggttttcttggctgcttccctgacatcattggcactcacaagggagcaatagaaaaagtgaaagaaagtgacaaactagttgcaacaagtaaaatcaccctacaagacaaacagaacatggtgaagagagtcagcatcatgtcttacgcgttgcaagctgagatgaatcactttcacagtaaccggatctatgattacaacagtgtcatccgcctgtacctggagcagcaagtgcaattttacgaaacgattgcagaaaagctgaggcaggccctcagccgctttccagtgatgtaggacagaacgggccttgaagagaatgccgcgtgctttctcctgacttggggcaatgcaattcaaaacttttttcccctattattcagaaaaaaaaggaaacaaaaccaaaaagaaagagttgcaaaaaactgcatttattttattagccaccctaaatgcgtcagttatttagggatggtcttttgttcatttccgcatccattatttaaaccagtggaaattgtctctatttttggaaagtacttaaaagttaccagaattttcaatggaaaatgaggggtttctccccactgatattttacatagagtcataatttatatgtcttataaattataagtcttatataatttataagtctcccacaatcttccagttcttacccagtgtcagataattaattactaattactttcttaaaaacatgaactatgccagaataaaaaatatctatgtttgtatatttttataactcctttcagtcctctggggctcctgtcattgagggaagtcgttacgcctttcactgccacagttacagctcaagtgcttacacttcaagagggaggacgctgggggcccctggggtgactagtgccatcgtgggtgtgtgggcaggtgggccatcccatgtccctccaggggaccccacagcctggcagatgagcagatacccctggccacccatgtcctcagcgacatttctgatgtgctgctcttatgtgaggaccagtgctttctctctttgcacttccttcctaatcttggttaaggcatgttttatgccatgaagaatacattagaagaattgagggactttgtagagaattttgtggctttggtccgacgggtgagtggctgtgcggaggcctgtgttcgggagggcctgggggaaggagggcacccagcaccccggcgtctctggccctttcttattctttggctcctcatccaccgtgatgagaagcgctgctgtggccacggcacactgcttggcttgggtggcgggttcatggccagttggtgtcatcagcaaagagaaaaagcacaggttagctccccattagatggaaaagtgtagggactgagaagggctgcagcctcagcagtgtacagagtccccggcgctctgaggttggagagaaagaacagaccagcgcccttcctgactacatccgaaacttcacacagggtgtttctgagcaccagcacttccagcgcttcacttaacggcataaagcaaaacaggaccttggcacaccgtcagctcgaactcaacactggcagccaccgtctcacccctgcggaggagcgctcccgtctcccacaggtgccttaccgcgttccctcccgctgctttcatttttctgaccttaataattacgggaaatggaaagtctgggccagcatcaataaaatgacaccaaaaataagtagatgaaatcaaatgaatatgagaacatcttgttcttcaatatcacgggtttttgttaatgtttcataagtaattctccccacttgatttttcttctataaaatcccatagaacaatgtttatgctatagccatttaatatatgtacaaattgtaaagaatatgtataaatgttttacacgaatgtaagagcatgtagaagccaacatataaataaattgtttaaaaaaactgtacagtaaattctcaaatcactttttcaaaacactttttggactttgtgtgtgatttttgttgttgttgttaagtactttttattccagctgctgaaaatggtccaggtaatgaattcttccccaaatcctatttcttctgacatgaattcatcatttcagttccgtaggtcaagtgttgcggtccgggaagcgtatcataaccacctgggaagttgccaatgaagcagacaagtctcccagtgtctgactctcggatatttggatttgactggtgtgaggcaaagtgaaaaagggatgggggaaatggagatggcacgggctcctcagagcgtggtagccgacttgaggaaaagcagagggaatgtgaaagaaaataagagaatccacgggatttgatgcctggaagattctccttcaagtggcaacatggcatatatatccttctccggggagtcacatgcaccatttggttcttagatacgttgatgttttgatttttaatgatttgtatcaacctgtaggtaccacagaagagctgtagtcatacaatcacataacttttacaaatatagtgg

SEQ ID NO: 4147 - protein, 595 aa, Homo sapien
MATKARVMYDFAAEPGNNELTVNEGEIITITNPDVGGGWLEGRNIKGERGLVPTDYVEILPSDGKDQFSCGNSVADQAFLDSLSASTAQASSSAASNNHQVGSGNDPWSAWSASKSGNWESSEGWGAQPEGAGAQRNTNTPNNWDTAFGHPQAYQGPATGDDDDWDEDWDGPKSSSYFKDSESADAGGAQRGNSRASSSSMKIPLNKFPGFAKPGTEQYLLAKQLAKPKEKIPIIVGDYGPMWVYPTSTFDCVVADPRKGSKMYGLKSYIEYQLTPTNTNRSVNHRYKHFDWLYERLLVKFGSAIPIPSLPDKQVTGRFEEEFIKMRMERLQAWMTRMCRHPVISESEVFQQFLNFRDEKEWKTGKRKAERDELAGVMIFSTMEPEAPDLDLVEIEQKCEAVGKFTKAMDDGVKELLTVGQEHWKRCTGPLPKEYQKIGKALQSLATVFSSSGYQGETDLNDAITEAGKTYEEIASLVAEQPKKDLHFLMECNHEYKGFLGCFPDIIGTHKGAIEKVKESDKLVATSKITLQDKQNMVKRVSIMSYALQAEMNHFHSNRIYDYNSVIRLYLEQQVQFYETIAEKLRQALSRFPVM

SEQ ID NO: 4148 - DNA, 3118 bp, Homo sapien
agttcgacacaccatgccgactgtcagcgtgaagcgtgatctgctcttccaagccctgggccgcacctacactgacgaagaatttgatgaactatgttttgaatttggtctggagcttgatgaaattacatctgagaaggaaataataagtaaagaacaaggtaatgtaaaggcagcaggagcctctgatgttgttctttacaaaattgacgtccctgccaatagatatgatctcctgtgtctggaaggattggttcgaggacttcaggtcttcaaagaaaggataaaggctccagtgtataaacgggtaatgcctgatggaaaaatccagaaattgattatcacagaagagacagctaagatacgtccttttgcggtagcagcagttctccgtaatataaagtttactaaagatcgatatgacagcttcattgaacttcaggagaaattacatcagaatatttgcaggaaaagagcactggttgccattggtacccatgatttggacactttgtcgggcccatttacttatactgcaaagcgtccttcagatatcaaattcaagcctctaaataagaccaaggagtatacagcctgtgaactgatgaacatatacaagactgacaatcacctgaaacattatttacatatcattgaaaacaaacccctgtatccagttatctatgatagcaatggtgtcgtcctttcaatgcctcccatcatcaatggggatcattccagaataacagtaaatactagaaatatttttattgaatgcacgggaactgactttactaaggcaaaaatagttcttgatattattgtcaccatgttcagtgaatattgtgagaatcaatttacggtcgaagctgctgaagtggtttttcctaatggaaaatcacatacctttccagaattagcttaccgaaaggagatggtgagagctgacctaattaacaaaaaagttggaatcagagaaactccagaaaatcttgccaaacttctgaccaggatgtatttaaaatcagaagtcataggtgatgggaatcagattgagattgaaatccctccaaccagagctgacattatccatgcatgtgatattgtagaagatgcagctattgcttatggatataacaacattcagatgactctcccgaaaacttacaccatagctaatcaatttcctcttaataagctcactgaacttctccgacatgacatggcagccgctggcttcactgaagcacttacctttgccctgtgctcccaagaagatattgctgataaactaggtgtggatatctctgcaacaaaggcagtccacataagtaatcctaaaacagctgaatttcaggtggcacgcactacccttcttcctggcctcctgaagaccatagcagcaaatcgtaagatgccccttccactgaaactgtttgaaatctctgacattgtaataaaagattctaatacagatgtaggtgcaaaaaactacagacatctctgtgctgtttattacaacaagaatcctgggtttgagatcattcatgggctgctggacagaattatgcagttgctcgatgtgcctcctggtgaagacaaggggggatatgtgatcaaagcatcagaagggcctgctttcttccccgggcgatgtgcagagatctttgccagggttcaaagcgtcgggaagcttggggtccttcatcctgacgttatcaccaaatttgagctgaccatgccctgctcctccctagaaatcaatattggaccctttttgtgaagattggtctctgtggtgtgattctcttcccaggtgtccctttctcctcccctagtgtccttaagtcctcctccacagggaacatctatttgggctttgatgtttaataaagtagaaagcactgtctggctgtgtgggtagagaccatcctttccctgcatattaggccagcttgtgccatataccagtgtggtgtctgtgtgtgaagctgcattgttgggtaaaagccccgtggagtgctggagaaatgcactagcagagtgcaggatctgttctgaaaggcagacgtgctcctcagacatcagaacatcacattggaacggattactcctgcataacaagatcccatttctttccttattgataaaacaagataatcgatgagaattcatgttgcatgagttcgagataactgaggggtttagctttgattttctacatttgacatgtattcatcattgagaaacactaaaataacaatatttttagaaaacgtttaagaatcaattatggtccaacaattatagcttctgaggtcagtttaaagtgaaagaaaaatctgtaatacaaggattcaaaatatgtgagggtgcataggtattttttactctatctgtgatactctaagatagagtacatgcaacaaagatctgttctgctgtaagagttaaaatggacaagtattgatatcaatgcagtatgaacattaggaaacaatgagaagcttatttttgccataggccatacatgttactgtaatcagtcagttataaaatcatggttttaaatacttaattgagctactagtttctctattgtcccagggagatattagacctctctttttctgaagctaagcttcagccaatcctccttgttttatatcctaatttcctttcttacttcaatctagaattctccagtaggtaccatctctggaaaaaagctgggtctcatgtttgagacaagttcccaggtactattgaagtaataagaaatatgataaaatataatactttaaagtcccagtagaaatagctaacaaaggctgggtgcgctgtggctcatgcctgtaatcctagcactttgggaggctgaggtgggcagatcacttgaggccaatagttcgagatcagcctgaccaacatgatgaaatgccatctccactaaaaatataaaaattagccaggcatggtggtgtgggcctgcagtcccagctacctgggaggctgagtcaggaaaatctcttgaaccaggaggtggacgttgcagtgatcccagattgtgccactgccctccagcctgggtgacagagtgagattctgtctacaaaaa

SEQ ID NO: 4149 - protein, 589 aa, Homo sapien
MPTVSVKRDLLFQALGRTYTDEEFDELCFEFGLELDEITSEKEIISKEQGNVKAAGASDVVLYKIDVPANRYDLLCLEGLVRGLQVFKERIKAPVYKRVMPDGKIQKLIITEETAKIRPFAVAAVLRNIKFTKDRYDSFIELQEKLHQNICRKRALVAIGTHDLDTLSGPFTYTAKRPSDIKFKPLNKTKEYTACELMNIYKTDNHLKHYLHIIENKPLYPVIYDSNGVVLSMPPIINGDHSRITVNTRNIFIECTGTDFTKAKIVLDIIVTMFSEYCENQFTVEAAEVVFPNGKSHTFPELAYRKEMVRADLINKKVGIRETPENLAKLLTRMYLKSEVIGDGNQIEIEIPPTRADIIHACDIVEDAAIAYGYNNIQMTLPKTYTIANQFPLNKLTELLRHDMAAAGFTEALTFALCSQEDIADKLGVDISATKAVHISNPKTAEFQVARTTLLPGLLKTIAANRKMPLPLKLFEISDIVIKDSNTDVGAKNYRHLCAVYYNKNPGFEIIHGLLDRIMQLLDVPPGEDKGGYVIKASEGPAFFPGRCAEIFARVQSVGKLGVLHPDVITKFELTMPCSSLEINIGPFL

SEQ ID NO: 4150 - DNA, 3097 bp, Homo sapien
agactatctttctagacaaggcagttgaggaggagggagcgcttgagggggactggcctggcgtgcactccgcacctcggggacattattgcgcgtggaacggctgcttttggaaggcacaacttcctgaatggaccatgactcccaccaaagatccctgtctctgattcaccaaacagcttcaaccctgaaaccaggacgagaagttgacaacatctgagtggacagctaattgacctaagacttcagaccagactattgcccagaagaaaagatgtttggttttcacaagccaaagatgtaccgaagtatagagggctgctgtatttgcagagctaagtcctccagttctcgattcactgacagtaaacgctatgaaaaggacttccagagctgttttggattgcatgagactcgttcaggagacatctgcaatgcctgtgtcctgcttgtgaaaagatggaagaagttgccagcaggatcaaaaaaaaactggaatcatgtggtagatgcaagggctggacccagtctaaagactacattgaaaccaaagaaagtgaaaactctatctgggaacaggataaaaagcaaccagatcagtaaactgcagaaggaatttaaacgtcataattctgatgctcacagtaccacctcaagtgcctccccagctcaatctccttgttacagtaaccagtcagatgacggctcagatacagagatggcttctggttctaacagaacaccagttttttcctttttagatctcacttactggaaaagacagaagatatgttgtgggatcatctataaaggccgttttggggaagtcctcattgacacacatctcttcaagccttgctgcagcaataagaaagcagctgctgagaagccagaggagcaggggccagagcctctgcccatctccactcaggagtggtgactgaggtttttatgtagaaggggaacaaaaaaaaaaatctgaattttgaaaaaccacaaagctacaaactgaccctctttttttttttttttttttgagacggagttttgctcttgttacccaggctggagtgcagtggcgtgatcttggctcactgcaacttccgtctcccgggttcaagtgattctcctgcctcagcctcccaagtagctgggtttataggtgcccgccaccagacccggctaattttttagttttagtagagacggggtttcaccacgttggccaggctggtcttaaatgaccctcttatttttaacttggatacctgctattctgccaaaagacaatttctagagtagttttgaatgggttgatttcccccactcccacaaactctgaagccagtgtctagcttactaaaaaaagagttgtatataatatttaagatgctgagtatttcataggaaagctgaatgctgctgtaaagtgctctttaagtctttttttttttaatccccttctaatgaatgaaactaggggaatttcaggggacagagatgggatttgttgtatgataaactgtatgtagtttttagtctttctgttttgagaagcagtggttggggcatttttaagatggctggctactcttgttttccctcatgataataaatttgtcataactcagtaacatgaacttgcccctagaggtagttgttaataattttgaaatattaaggtcttgccaagcttctgatgattcacacctgtactactgattattaagcaggacagactgagctttctgttgcaaataccttggaggagaaagtaatttctaaatatacagagaggtaacttgactatatatgttgcatcctgtgcctcccttcatattaatatttgataaagattttaatttatgtaaaacttctaaagcagaatcaaagctcctcttggggaaatggcaagtctttaggataggcaagaccctgtatgaatagtaccaaagcattaccgcatggtagagaacacactcgattaaaaatgttaagctatctgaaaaataaaatgtgcaagtcttcaggatggcacaaaacaaaggttaatgcttcttggggcacatttcttagagggcttgctgagtgtgtaaatataatcgacttttgtttgtgttacatgacttctgtgacttcattgaaaatctgcacaattcagtttcagctctggattacttcagttgacctttgtgaaggtttttatctgtgtagaatgggtgtttgacttgttttagcctattaaatttttattttctttcactctgtattaaaagtaaaacttactaaaagaaaagaggtttgtgttcacattaaatggttttggtttggcttcttttagtcaggctttctgaacattgagatatcctgaacttagagctcttcaatcctaagattttcatgaaaagcctctcacttgaacccaaaccagagtactcttactgcctcttttctaaatgttcaggaaaagcattgccagttcagtcttttcaaaatgagggagaaacatttgcctgccttgtaataacaagactcagtgcttattttttaaactgcattttaaaaattggatagtataataacaataaggagtaagccaccttttataggcaccctgtagttttatagttcttaatctaaacattttatatttccttcttttggaaaaaacctacatgctacaagccaccatatgcacagactatacagtgagttgagttggctctcccacagtctttgaggtgaattacaaaagtccagccattatcatcctcctgagttatttgaaatgattttttttgtacattttggctgcagtattggtggtagaatatactataatatggatcatctctacttctgtatttatttatttattactagacctcaaccacagtcttctttttccccttccacctctctttgcctgtaggatgtactgtatgtagtcatgcactttgtattaatatattagaaatctacagatctgttttgtactttttatactgttggatacttataatcaaaacttttactagggtattgaataaatctagtcttactagaaaaaaaaaaaaaagaaaaaaaaaaaaaaaaa

SEQ ID NO: 4151 - protein, 221 aa, Homo sapien
MFGFHKPKMYRSIEGCCICRAKSSSSRFTDSKRYEKDFQSCFGLHETRSGDICNACVLLVKRWKKLPAGSKKNWNHVVDARAGPSLKTTLKPKKVKTLSGNRIKSNQISKLQKEFKRHNSDAHSTTSSASPAQSPCYSNQSDDGSDTEMASGSNRTPVFSFLDLTYWKRQKICCGIIYKGRFGEVLIDTHLFKPCCSNKKAAAEKPEEQGPEPLPISTQEW

SEQ ID NO: 4152 - DNA, 1593 bp, Homo sapien
ctggaagggctggggcggcgcttggggcggcccagccgccgcctcccgttctcccctccgcagcggcggcggtggcggagaaggaactcgacacgcaccgaccgccctcccgccccagccgaagcggaagctgtagcccgctctgggccggggccatgggcgccccgcgccgcccgggtcatgaggacggaggcggaggcagcggggccgccgctcgagcccggggactttgtgcaactgcctgtgcccgtcatccagcagctctaccactgggactgtggcctggcctgctccaggatggtgctgcggtacctgggccagctggacgacagtgagtttgagagagccctgcagaagctgcagctgaccaggagcatctggaccatcgacctggcctacctgatgcaccactttggcgtgaggcaccgcttctgtacccagaccctgggtgtcgacaagggctacaagaaccagtccttctacaggaagcactttgacacagaagagacccgggtgaatcagctgtttgcacaagcaaaggcctgcaaggtgctggtggagaaatgcacagtgagtgtgaaggacatccaggcgcacctggctcagggccatgtggccatcgtgctggtgaactcgggggtgctgcactgtgacctgtgctccagccctgtcaagtactgctgcttcacccccagtggccaccactgcttctgccgcactcctgactaccagggccacttcatcgtgctgcgtggctacaaccgggccactggctgcatcttctacaacaacccagcctatgccgaccgaatgtgcagcaccagcatcagtaactttgaggaggccagaaccagctatggcacagatgaggacatcctctttgtctacttggacagctgacagcaggagcctggtgcgcctaggccctcggaccccatccccaccccagccgggcccgctcaggacgcccaggagtacccatgcacagcagctgtggggtgtgggcatcttcaggtggtgttctggtaaaatcgttagaatagctgtatgaaggaaaccagtgggaggaaatgaagttttcaggatggtgggatgtgatttagacagtgcacatgctgttagggctgtcactagggagtggccttcatggagggtggtaacagcacctcagtccagccaaaatgtttagaaacactcagtctctggtcccagaggatggcttctcagggcatgccacaagttaaaggtcaccttcctgaaagatgaatgagaaagctgcccattctcaagactcatctgcctagggagggtcacagaggcaggatgtaagacacactgtgttgcattcttgcacaagtcatgaaaatggagccagagagcctggacatcagggacttttgcccacagcacatgacaccgacagctgcccagcctgttcacatgctggggaccagcacagcacctgaagccatgtgggacagttgggctttgttcattctagccacggggatgaaagggatcttttgcattgcagagattttatatatattttgtttgtaatgagccattctcaataaacattattctcactgc

SEQ ID NO: 4153 - protein, 239 aa, Homo sapien
MRTEAEAAGPPLEPGDFVQLPVPVIQQLYHWDCGLACSRMVLRYLGQLDDSEFERALQKLQLTRSIWTIDLAYLMHHFGVRHRFCTQTLGVDKGYKNQSFYRKHFDTEETRVNQLFAQAKACKVLVEKCTVSVKDIQAHLAQGHVAIVLVNSGVLHCDLCSSPVKYCCFTPSGHHCFCRTPDYQGHFIVLRGYNRATGCIFYNNPAYADRMCSTSISNFEEARTSYGTDEDILFVYLDS

SEQ ID NO: 4154 - DNA, 1090 bp, Homo sapien
gctccgggagacttccggcagggcgggcgcggggtcttggcgaacggtcttcggaagcggcggcggcgcgatgaccacgctacgggcctttacctgcgacgacctgttccgcttcaacaacattaacttggatccacttacagaaacttatgggattcctttctacctacaatacctcgcccactggccagagtatttcattgttgcagaggcacctggtggagaattaatgggttatattatgggtaaagcagaaggctcagtagctagggaagaatggcacgggcacgtcacagctctgtctgttgccccagaatttcgacgccttggtttggctgctaaacttatggagttactagaggagatttcagaaagaaagggtggattttttgtggatctctttgtaagagtatctaaccaagttgcagttaacatgtacaagcagttgggctacagtgtatataggacggtcatagagtactattcggccagcaacggggagcctgatgaggacgcttatgatatgaggaaagcactttccagggatactgagaagaaatccatcataccattacctcatcctgtgaggcctgaagacattgaataaccctgggcagtggttcttaggcagatactctagatgctttatggacaatattattttcattggatgattctggagctctattaggagaaaagtaatcattttaggtcttaaagacttcaagaaaatacaggttatcaatttattttaaatctcattgtttccagttagcaatatcatacctattaaagctgttcattgtaacaaaattcaatcaaaaaggcagctaggtcagaaggaaacataccactctcatggttcatagtattcactgtatgtatgctagggaaaagacttgctccagtctcctcctcagttctgtgcctgagaaccactgctgcatatatttgtttttaaattttgtattgaactgttaattgaagctttaaaagcatatatgaaatgtataaatctaagatgtataatacattattgactctaaaaaaaaaaaaaaaaaaaaaaaaaaaaaaaaaaaaaaaaaaaaaa

SEQ ID NO: 4155 - protein, 178 aa, Homo sapien
MTTLRAFTCDDLFRFNNINLDPLTETYGIPFYLQYLAHWPEYFIVAEAPGGELMGYIMGKAEGSVAREEWHGHVTALSVAPEFRRLGLAAKLMELLEEISERKGGFFVDLFVRVSNQVAVNMYKQLGYSVYRTVIEYYSASNGEPDEDAYDMRKALSRDTEKKSIIPLPHPVRPEDIE

SEQ ID NO: 4156 - DNA, 3333 bp, Homo sapien
acgcgtccgagctggctcagggcgtccgctaggctcggacgacctgctgagcctcccaaaccgcttccataaggctttgcctttccaacttcagctacagtgttagctaagtttggaaagaaggaaaaaagaaaatccctgggccccttttcttttgttctttgccaaagtcgtcgttgtagtctttttgcccaaggctgttgtgtttttagaggtgctatctccagttccttgcactcctgttaacaagcacctcagcgagagcagcagcagcgatagcagccgcagaagagccagcggggtcgcctagtgtcatgaccagggcgggagatcacaaccgccagagaggatgctgtggatccttggccgactacctgacctctgcaaaattccttctctaccttggtcattctctctctacttggggagatcggatgtggcactttgcggtgtctgtgtttctggtagagctctatggaaacagcctccttttgacagcagtctacgggctggtggtggcagggtctgttctggtcctgggagccatcatcggtgactgggtggacaagaatgctagacttaaagtggcccagacctcgctggtggtacagaatgtttcagtcatcctgtgtggaatcatcctgatgatggttttcttacataaacatgagcttctgaccatgtaccatggatgggttctcacttcctgctatatcctgatcatcactattgcaaatattgcaaatttggccagtactgctactgcaatcacaatccaaagggattggattgttgttgttgcaggagaagacagaagcaaactagcaaatatgaatgccacaatacgaaggattgaccagttaaccaacatcttagcccccatggctgttggccagattatgacatttggctccccagtcatcggctgtggctttatttcgggatggaacttggtatccatgtgcgtggagtacgtcctgctctggaaggtttaccagaaaaccccagctctagctgtgaaagctggtcttaaagaagaggaaactgaattgaaacagctgaatttacacaaagatactgagccaaaacccctggagggaactcatctaatgggtgtgaaagactctaacatccatgagcttgaacatgagcaagagcctacttgtgcctcccagatggctgagcccttccgtaccttccgagatggatgggtctcctactacaaccagcctgtgtttctggctggcatgggtcttgctttcctttatatgactgtcctgggctttgactgcatcaccacagggtacgcctacactcagggactgagtggttccatcctcagtattttgatgggagcatcagctataactggaataatgggaactgtagcttttacttggctacgtcgaaaatgtggtttggttcggacaggtctgatctcaggattggcacagctttcctgtttgatcttgtgtgtgatctctgtattcatgcctggaagccccctggacttgtccgtttctccttttgaagatatccgatcaaggttcattcaaggagagtcaattacacctaccaagatacctgaaattacaactgaaatatacatgtctaatgggtctaattctgctaatattgtcccggagacaagtcctgaatctgtgcccataatctctgtcagtctgctgtttgcaggcgtcattgctgctagaatcggtctttggtcctttgatttaactgtgacacagttgctgcaagaaaatgtaattgaatctgaaagaggcattataaatggtgtacagaactccatgaactatcttcttgatcttctgcatttcatcatggtcatcctggctccaaatcctgaagcttttggcttgctcgtattgatttcagtctcctttgtggcaatgggccacattatgtatttccgatttgcccaaaatactctgggaaacaagctctttgcttgcggtcctgatgcaaaagaagttaggaaggaaaatcaagcaaatacatctgttgtttgagacagtttaactgttgctatcctgttactagattatatagagcacatgtgcttattttgtactgcagaattccaataaatggctgggtgttttgctctgtttttaccacagctgtgccttgagaactaaaagctgtttaggaaacctaagtcagcagaaattaactgattaatttcccttatgttgaggcatggaaaaaaaattggaaaagaaaaactcagtttaaatacggagactataatgataacactgaattcccctatttctcatgagtagatacaatcttacgtaaaagagtggttagtcacgtgaattcagttatcatttgacagattcttatctgtactagaattcagatatgtcagttttctgcaaaactcactcttgttcaagactagctaatttatttttttgcatcttagttatttttaaaaacaaattcttcaagtatgaagactaaattttgataactaatattatccttattgatcctattgatcttaaggtatttacatgtatgtggaaaaacaaaacacttaactagaattctctaataaggtttatggtttagcttaaagagcacctttgtatttttattatcagatggggcaacatattgtatgaagcatatgtagcacttcacagcatggttatcatgtaagctgcaggtagaagcaaagctgtaaagtagatttatcacacaatgactgcatacagacttcaaatatgtcaatagtttggtcatagaacctagaagccaaaagccacacagaagggcaagaatcccaatttaactcatgttatcatcattagtgatctgtgttgtagaacatgagggtgtaagccttcagcctggcaagttacatgtagaaagcccacacttgtgaaggttttgttttacaaatcacttgatttaacacactcaggtagaatatttttatttttactgttttatacccagaagttatttctacattgttctacagcaagaatattcataaaagtatccctttcaaatgcctttgagaagaatagaagaaaaaaagtttgtatatattttaaaaaattgttttaaaagtcagtttgcaacatgtctgtaccaagatggtactttgccttaaccgtttatatgcactttcatggagactgcaatacgttgctatgagcactttctttatccttggagtttaatcctttgcttcatctttctacagtatgacataatgatttgctatgttgtaaaatctttgtaaaaaatttctatataaaaatattttgaaaatcttaaaaaaaaaaaaaaaaa

SEQ ID NO: 4157 - protein, 571 aa, Homo sapien
MTRAGDHNRQRGCCGSLADYLTSAKFLLYLGHSLSTWGDRMWHFAVSVFLVELYGNSLLLTAVYGLVVAGSVLVLGAIIGDWVDKNARLKVAQTSLVVQNVSVILCGIILMMVFLHKHELLTMYHGWVLTSCYILIITIANIANLASTATAITIQRDWIVVVAGEDRSKLANMNATIRRIDQLTNILAPMAVGQIMTFGSPVIGCGFISGWNLVSMCVEYVLLWKVYQKTPALAVKAGLKEEETELKQLNLHKDTEPKPLEGTHLMGVKDSNIHELEHEQEPTCASQMAEPFRTFRDGWVSYYNQPVFLAGMGLAFLYMTVLGFDCITTGYAYTQGLSGSILSILMGASAITGIMGTVAFTWLRRKCGLVRTGLISGLAQLSCLILCVISVFMPGSPLDLSVSPFEDIRSRFIQGESITPTKIPEITTEIYMSNGSNSANIVPETSPESVPIISVSLLFAGVIAARIGLWSFDLTVTQLLQENVIESERGIINGVQNSMNYLLDLLHFIMVILAPNPEAFGLLVLISVSFVAMGHIMYFRFAQNTLGNKLFACGPDAKEVRKENQANTSVV

SEQ ID NO: 4158 - DNA, 1083 bp, Homo sapien
gccgcttttttttttttctcatctgccatttgtgtgtcttagatgggttttaattgcatgaatgtggctaatgtggttctcagaaattggtcagtatggcccgacatagcttctgctctgtcttgctgactcaatacctttaggatttgtatcagagtttggatactagtgttagtggtggtgtcaccactacttaattgggagataatgaaaccaatcatggatgctgtttttattgggcatgtcatctaagagaggagaaatagctgggttttgggtctaattatgaataaggactgattcagaaaacgagtttatggtaggtagactaaagtttcacatcagactgtaccattgtgatttagacctatctaaaattcagagcatatcatctgggctacctcagggtcaccacccatgtattgggcttagtcaggattgacagatacattctcagctggcctgtcatataaaacatactgtcattgagcttaagctccgcttgttctgaggtttcacctccatgtgtttcattggtgcaaaagtggatctcttagttggtcacttaattctttctttttcagaaagatagtatgttcactggtatatttggtcactcttagaaccttccttcacattgttttttatgggacccatgaatggttagcctttcttttctattgtagaaggaaataaataggagtaaaaagaccattgtagtaaataagttcaaggggaacttgggaccagaaaccactgttatgtacaaaaaaatggcaaattcaataaactcaaatttaaaataatttttaaattaacagttatgataaattttatattttatacaaatagattgcttagaatggttctcaagaattataagagaaatgaactcacagtacaaaaattttataattactatacttgtgttttgtttgggggctgggaaatgtatttttacattgtagccaatcattttatatttgtcaatttaaatcttatgggtctttttttttttatctctcttgatgtcagattttatagtctttttaaataaatccatttaattaaaacgttaaaaaa

SEQ ID NO: 4159 - protein, 77 aa, Homo sapien
MINFIFYTNRLLRMVLKNYKRNELTVQKFYNYYTCVLFGGWEMYFYIVANHFIFVNLNLMGLFFFISLDVRFYSLFK

SEQ ID NO: 4160 - DNA, 1701 bp, Mus musculus
ggaacaaaagctggagctccaccgcggtggcggccgctctagaactagtggatcccccgggctgcaggaattcggcacgagcagaagagggggctagctagctgtctctgcggaccaggggagaccccgcgcccccccggtgtgaggcggcctcacagggccgggtgggctggcgagccgacgcggcggcggaggaggctgtgaggagtgtgtggaacaggacccgggacagaggaaccatggctccgcagaacctgagcaccttttgcctgttgctgctatacctcatcggggcggtgattgccggacgagatttctataagatcttgggggtgcctcgaagtgcctctataaaggatattaaaaaggcctataggaaactagccctgcagcttcatcccgaccggaaccctgatgatccacaagcccaggagaaattccaggatctgggtgctgcttatgaggttctgtcagatagtgagaaacggaaacagtacgatacttatggtgaagaaggattaaaagatggtcatcagagctcccatggagacattttttcacacttctttggggattttggtttcatgtttggaggaacccctcgtcagcaagacagaaatattccaagaggaagtgatattattgtagatctagaagtcactttggaagaagtatatgcaggaaattttgtggaagtagttagaaacaaacctgtggcaaggcaggctcctggcaaacggaagtgcaattgtcggcaagagatgcggaccacccagctgggccctgggcgcttccaaatgacccaggaggtggtctgcgacgaatgccctaatgtcaaactagtgaatgaagaacgaacgctggaagtagaaatagagcctggggtgagagacggcatggagtacccctttattggagaaggtgagcctcacgtggatggggagcctggagatttacggttccgaatcaaagttgtcaagcacccaatatttgaaaggagaggagatgatttgtacacaaatgtgacaatctcattagttgagtcactggttggctttgagatggatattactcacttggatggtcacaaggtacatatttcccgggataagatcaccaggccaggagcgaagctatggaagaaaggggaagggctccccaactttgacaacaacaatatcaagggctctttgataatcacttttgatgtggattttccaaaagaacagttaacagaggaagcgagagaaggtatcaaacagctactgaaacaagggtcagtgcagaaggtatacaatggactgcaaggatattgagagtgaataaaattggactttgtttaaaataagtgaataagcgatatttattatctgcaaggtttttttgtgtgtgtttttgtttttattttcaatatgcaagttaggcttaatttttttatctaatgatcatcatgaaatgaataagagggcttaagaatttgtccatttgcattcggaaaagaatgaccagcaaaaggtttactaatacgtctccctttggggatttaatgtctggtgctgccgcctgagtttcaagaattaaagctgcaagaggactccaggagcaaaagaaacacaatatagagggttggagttgttagcaatttcattcaaaatgccaactggagaagtctgtttttaaatacattttgttgttattttt

SEQ ID NO: 4161 - protein, 358 aa, Mus musculus
MAPQNLSTFCLLLLYLIGAVIAGRDFYKILGVPRSASIKDIKKAYRKLALQLHPDRNPDDPQAQEKFQDLGAAYEVLSDSEKRKQYDTYGEEGLKDGHQSSHGDIFSHFFGDFGFMFGGTPRQQDRNIPRGSDIIVDLEVTLEEVYAGNFVEVVRNKPVARQAPGKRKCNCRQEMRTTQLGPGRFQMTQEVVCDECPNVKLVNEERTLEVEIEPGVRDGMEYPFIGEGEPHVDGEPGDLRFRIKVVKHPIFERRGDDLYTNVTISLVESLVGFEMDITHLDGHKVHISRDKITRPGAKLWKKGEGLPNFDNNNIKGSLIITFDVDFPKEQLTEEAREGIKQLLKQGSVQKVYNGLQGY

SEQ ID NO: 4162 - DNA, 5231 bp, Homo sapien
agctgtcgtgcctcgtggtcccgggactgcagtggtgtgcgctctcggcgcgtggcgctaggcatggcgatggatcaagtaaacgcgctgtgcgagcagctggtgaaagcggtgacggtcatgatggaccccaactccacccagcgctaccggctggaagccctcaagttttgtgaggagtttaaagaaaagtgtcctatctgtgtcccctgtggcttgaggttggctgagaaaacacaagttgccatcgtcagacattttggccttcagatcctggaacacgttgtcaagtttcggtggaacggcatgtctcgattggagaaggtgtatctgaagaacagtgtcatggagctgattgcaaatggaacattgaacattttggaagaggagaaccatattaaagatgctctgtctcgaattgtagtggaaatgatcaagcgagagtggccacagcattggcctgacatgctaatagaattggacactctttccaaacaaggggaaacacagacagaattggtgatgtttatccttttgcgactggcagaggatgtagtgacttttcagacacttccccctcaaagaagaagggacatccagcaaacattaacccagaacatggaaaggatcttcagttttctgcttaacacacttcaagaaaatgtaaacaagtatcagcaagtgaagacagatacttctcaggagtcaaaggcgcaagcaaactgtcgagtaggagttgcagcactgaatactctagcaggctatattgactgggtgtctatgagtcacatcactgctgaaaactgtaaactcctggagatactgtgtttgctgttgaatgaacaggaacttcagttgggagccgctgagtgtcttctcattgcagtcagcagaaaaggcaagttggaagaccggaagcccttgatggtcttatttggagatgttgccatgcattatatactctccgccgcacagactgctgatggaggaggtttggtagaaaaacactacgtctttctgaagaggctctgtcaggtgttgtgtgcgctgggcaatcagctgtgtgcattgctgggtgcagattctgatgtagaaacaccatcaaactttggaaaatacctggaatcttttcttgctttcacaacccatccaagtcagtttctacgctcttcaactcagatgacttggggagccctcttcaggcatgaaatcctgtcccgtgatcctttgctattagcaataataccaaaatatcttcgtgcttccatgactaacttggtcaagatgggctttccttctaaaacagacagccctagctgtgaatattctcggtttgattttgatagcgatgaggacttcaatgctttcttcaactcctcccgagcacaacaaggagaggtgatgaggttggcatgtcgtttggatcccaaaactagcttccagatggctggggagtggctaaagtatcaactatcaacttttcttgatgctggttctgtgaattcttgttctgcagttggaactggagaaggaagcctctgttccgtcttctcaccttcattcgtgcagtgggaagccatgactctttttttggaaagtgttatcacccagatgtttcgaacactaaatagagaagaaattcctgttaatgatggaatagagctattgcagatggttctgaactttgataccaaggatcccctcatcctgtcctgcgtccttactaatgtctctgcactctttccatttgtcacctacagaccagagttcctgccccaggtcttctctaagctattttcatctgtcacttttgaaactgttgaagaaagtaaggcccccagaacccgggcagtgaggaatgtgaggaggcatgcttgttcctccatcatcaagatgtgtcgtgactacccccagcttgtgctgcccaattttgacatgctttataaccatgtgaagcaactcctctccaatgagctactcctgacacaaatggagaagtgtgccctcatggaagccctggttctcattagcaaccaatttaagaactacgagcgtcagaaggtgttcctagaggagctgatggcaccagtggccagcatctggctttctcaagacatgcacagagtgctgtcagatgttgatgctttcattgcgtatgtgggtacagatcagaagagctgtgacccaggcctggaggatccgtgtggcttaaaccgtgcacgaatgagcttttgtgtatacagcattctgggtgtggtgaaacgaacttgctggcccactgacctagaagaggccaaagctgggggatttgtggtgggttatacatccagtggaaatccaatcttccgtaacccctgcacagagcagattctgaaacttcttgacaatttgcttgcgcttataagaacccacaatacattatatgcaccagaaatgctagccaaaatggcagagcctttcaccaaggctctggatatgcttgacgcggaaaaatctgctatattaggattacctcaacctctcttggaactcaatgactctcctgtcttcaaaaccgtcttggaaagaatgcagcgtttcttctctaccctctatgaaaactgttttcatatcctagggaaggcaggcccttccatgcagcaagacttctatactgtggaggaccttgctacccagcttctcagctcagcctttgtcaacttgaacaatattcctgactaccgactcagacccatgcttcgtgtctttgtaaagcctctggtgctcttctgtcccccagagcactatgaagccctggtatcccccatcctcggacctcttttcacctacctccatatgaggctttctcagaaatggcaagttatcaaccaaaggagcctgctgtgtggagaagatgaggctgcagatgaaaacccagagtctcaagagatgctggaggagcaactggtgaggatgttaacccgagaagtcatggacctaatcacggtttgctgtgtttcaaagaagggtgctgaccacagtagtgctcccccagcagatggagacgatgaagaaatgatggccacagaggtcaccccctcagctatggcagagcttacagacctgggcaaatgtctgatgaagcatgaggatgtttgtacagcgctattaattacagccttcaattccctggcctggaaagatactctgtcctgccagaggacaacctcacagctctgctggcctctcctcaaacaagtgctgtcagggacactgctcgcagatgcagttacgtggcttttcaccagtgtgctgaaaggcttacagatgcacgggcagcacgacgggtgcatggcttccctggtccatctggccttccagatatatgaggcactgcgccccaggtacctggagataagagctgtaatggagcaaatccctgaaatacagaaggactcactggaccagtttgactgcaagcttttaaacccctccctgcagaaagtggctgacaagcgccgaaaggaccaattcaaacgcctcattgctggttgcattgggaaacccttgggagagcagttccgaaaagaagttcacattaagaatcttccctcacttttcaaaaaaacaaagccaatgctggagacggaggtgctggacaatgatgggggtggcctggccaccatctttgaaccctgaatcaagcttttgggcatccttcctcggcctttcttgtcatctcttctttccctttgtagccgatctctaggcccttcttgcactgccacctcactttccaccactgtcagcctggaaagagatccaggtctggagctggagagaacaggccctgtgcaggaccagaagtaattatactaaagtatcaagaaagggagttagggcttaaactattctgtctagatgtcccagatagttcccattctacttggagatttggcttttccaagaaaagctagagcagagcagcccttctcccacaagccctcccacccccgtgcagccacatacctgtacagaatggtaactaagggtgctgtgcccaaccctgcgactagcaaggctcgcagcaagagcacagccctcaactacttgtgccagagtttctcttggaccactccaactcccactgagcccttttgctgctgggctggcaggaaactttccccactccctaaggggcatgtctgggttaggtgctaagtgctgaagagaacttggtcagttctctcaactttgctttgggcaagaatctggtcacctgatgggatccatggtacaggctactgctaaacttggcacagtatcaagtatagtacctccaaggaccagggctgggaagtctttagtgctaacatcccctttagagttcacacatcttgcccttccatgaatgacccctcagtctggcctccccagcctcaaggtccactcaggcacaagagccacagtaccctagatagtgtcacatgacaccgttgtcatccaaggataatacagaccaactaggctacatctgtgatgagcagctagcaaagccgctggtcttctcctaggactaagtccaggtgccttccacaatctcatggtctttcaggtccctggttacttttctcaaaggccatttccaaaagaatacatgccttcacatcacaacctgtactgtgagtccattctagaggtcactgaaaggccctgtaaagagaggacatggatacgggacctggccctgaggttattactggccgtaaggcagagttaatccatacagaaaccagtgtgtccatgtgctctgcacaaaaacagacctgttgtccatccagtccactgacaagagggtttccccgagagccgaagtggactgaagctacagtttttagctggtgcgggccacaggcagggtcagattgagaagaagcaaagctggggaagcagaagttgggagtcttgtgttgctccctcttcctgtgtggtgctctgggtttctgtggatcgtgaaggcgatctcaagagtgtttccctccaaacctgatagctgcctattcctgtctggttggggctgtggaggatgtagttgtatttattgcattgtaatatttttaacatcctgtgacttcatgctagaaattttctattgtttatagaaactttttgtagaaacattaactctaaagcacatctgcatgtcagtaaaaatctcagtttcgtacagaaaaaaaaaaaaaaaaaaaaaa

SEQ ID NO: 4163 - protein, 1204 aa, Homo sapien
MAMDQVNALCEQLVKAVTVMMDPNSTQRYRLEALKFCEEFKEKCPICVPCGLRLAEKTQVAIVRHFGLQILEHVVKFRWNGMSRLEKVYLKNSVMELIANGTLNILEEENHIKDALSRIVVEMIKREWPQHWPDMLIELDTLSKQGETQTELVMFILLRLAEDVVTFQTLPPQRRRDIQQTLTQNMERIFSFLLNTLQENVNKYQQVKTDTSQESKAQANCRVGVAALNTLAGYIDWVSMSHITAENCKLLEILCLLLNEQELQLGAAECLLIAVSRKGKLEDRKPLMVLFGDVAMHYILSAAQTADGGGLVEKHYVFLKRLCQVLCALGNQLCALLGADSDVETPSNFGKYLESFLAFTTHPSQFLRSSTQMTWGALFRHEILSRDPLLLAIIPKYLRASMTNLVKMGFPSKTDSPSCEYSRFDFDSDEDFNAFFNSSRAQQGEVMRLACRLDPKTSFQMAGEWLKYQLSTFLDAGSVNSCSAVGTGEGSLCSVFSPSFVQWEAMTLFLESVITQMFRTLNREEIPVNDGIELLQMVLNFDTKDPLILSCVLTNVSALFPFVTYRPEFLPQVFSKLFSSVTFETVEESKAPRTRAVRNVRRHACSSIIKMCRDYPQLVLPNFDMLYNHVKQLLSNELLLTQMEKCALMEALVLISNQFKNYERQKVFLEELMAPVASIWLSQDMHRVLSDVDAFIAYVGTDQKSCDPGLEDPCGLNRARMSFCVYSILGVVKRTCWPTDLEEAKAGGFVVGYTSSGNPIFRNPCTEQILKLLDNLLALIRTHNTLYAPEMLAKMAEPFTKALDMLDAEKSAILGLPQPLLELNDSPVFKTVLERMQRFFSTLYENCFHILGKAGPSMQQDFYTVEDLATQLLSSAFVNLNNIPDYRLRPMLRVFVKPLVLFCPPEHYEALVSPILGPLFTYLHMRLSQKWQVINQRSLLCGEDEAADENPESQEMLEEQLVRMLTREVMDLITVCCVSKKGADHSSAPPADGDDEEMMATEVTPSAMAELTDLGKCLMKHEDVCTALLITAFNSLAWKDTLSCQRTTSQLCWPLLKQVLSGTLLADAVTWLFTSVLKGLQMHGQHDGCMASLVHLAFQIYEALRPRYLEIRAVMEQIPEIQKDSLDQFDCKLLNPSLQKVADKRRKDQFKRLIAGCIGKPLGEQFRKEVHIKNLPSLFKKTKPMLETEVLDNDGGGLATIFEP

SEQ ID NO: 4164 - DNA, 5296 bp, Homo sapien
gcgcgagttgctgctaacgctcctcctccagcttcccacccccgccgcccgccgcggcccggtaccaacgggtggtctcgccgagggagctgtcgtgcctcgtggtcccgggactgcagtggtgtgcgctctcggcgcgtggcgctaggcatggcgatggatcaagtaaacgcgctgtgcgagcagctggtgaaagcggtgacggtcatgatggaccccaactccacccagcgctaccggctggaagccctcaagttttgtgaggagtttaaagaaaagtgtcctatctgtgtcccctgtggcttgaggttggctgagaaaacacaagttgccatcgtcagacattttggccttcagatcctggaacacgttgtcaagtttcggtggaacggcatgtctcgattggagaaggtgtatctgaagaacagtgtcatggagctgattgcaaatggaacattgaacattttggaagaggagaaccatattaaagatgctctgtctcgaattgtagtggaaatgatcaagcgagagtggccacagcattggcctgacatgctaatagaattggacactctttccaaacaaggggaaacacagacagaattggtgatgtttatccttttgcgactggcagaggatgtagtgacttttcagacacttccccctcaaagaagaagggacatccagcaaacattaacccagaacatggaaaggatcttcagttttctgcttaacacacttcaagaaaatgtaaacaagtatcagcaagtgaagacagatacttctcaggagtcaaaggcgcaagcaaactgtcgagtaggagttgcagcactgaatactctagcaggctatattgactgggtgtctatgagtcacatcactgctgaaaactgtaaactcctggagatactgtgtttgctgttgaatgaacaggaacttcagttgggagccgctgagtgtcttctcattgcagtcagcagaaaaggcaagttggaagaccggaagcccttgatggtcttatttggagatgttgccatgcattatatactctccgccgcacagactgctgatggaggaggtttggtagaaaaacactacgtctttctgaagaggctctgtcaggtgttgtgtgcgctgggcaatcagctgtgtgcattgctgggtgcagattctgatgtagaaacaccatcaaactttggaaaatacctggaatcttttcttgctttcacaacccatccaagtcagtttctacgctcttcaactcagatgacttggggagccctcttcaggcatgaaatcctgtcccgtgatcctttgctattagcaataataccaaaatatcttcgtgcttccatgactaacttggtcaagatgggctttccttctaaaacagacagccctagctgtgaatattctcggtttgattttgatagcgatgaggacttcaatgctttcttcaactcctcccgagcacaacaaggagaggtgatgaggttggcatgtcgtttggatcccaaaactagcttccagatggctggggagtggctaaagtatcaactatcaacttttcttgatgctggttctgtgaattcttgttctgcagttggaactggagaaggaagcctctgttccgtcttctcaccttcattcgtgcagtgggaagccatgactctttttttggaaagtgttatcacccagatgtttcgaacactaaatagagaagaaattcctgttaatgatggaatagagctattgcagatggttctgaactttgataccaaggatcccctcatcctgtcctgcgtccttactaatgtctctgcactctttccatttgtcacctacagaccagagttcctgccccaggtcttctctaagctattttcatctgtcacttttgaaactgttgaagaaagtaaggcccccagaacccgggcagtgaggaatgtgaggaggcatgcttgttcctccatcatcaagatgtgtcgtgactacccccagcttgtgctgcccaattttgacatgctttataaccatgtgaagcaactcctctccaatgagctactcctgacacaaatggagaagtgtgccctcatggaagccctggttctcattagcaaccaatttaagaactacgagcgtcagaaggtgttcctagaggagctgatggcaccagtggccagcatctggctttctcaagacatgcacagagtgctgtcagatgttgatgctttcattgtgtatgtgggtacagatcagaagagctgtgacccaggcctggaggatccgtgtggcttaaaccgtgcacgaatgagcttttgtgtatacagcattctgggtgtggtgaaacgaacttgctggcccactgacctagaagaggccaaagctgggggatttgtggtgggttatacatccagtggaaatccaatcttccgtaacccctgcacagagcagattctgaaacttcttgacaatttgcttgcgcttataagaacccacaatacattatatgcaccagaaatgctagccaaaatggcagagcctttcaccaaggctctggatatgcttgacgcggaaaaatctgctatattaggattacctcaacctctcttggaactcaatgactctcctgtcttcaaaaccgtcttggaaagaatgcagcgtttcttctctaccctctatgaaaactgttttcatatcctagggaaggcaggcccttccatgcagcaagacttctatactgtggaggaccttgctacccagcttctcagctcagcctttgtcaacttgaacaatattcctgactaccgactcagacccatgcttcgtgtctttgtaaagcctctggtgctcttctgtcccccagagcactatgaagccctggtatcccccatcctcggacctcttttcacctacctccatatgaggctttctcagaaatggcaagttatcaaccaaaggagcctgctgtgtggagaagatgaggctgcagatgaaaacccagagtctcaagagatgctggaggagcaactggtgaggatgttaacccgagaagtcatggacctaatcacggtttgctgtgtttcaaagaagggtgctgaccacagtagtgctcccccagcagatggagacgatgaagaaatgatggccacagaggtcaccccctcagctatggcagagcttacagacctgggcaaatgtctgatgaagcatgaggatgtttgtacagcgctattaattacagccttcaattccctggcctggaaagatactctgtcctgccagaggacaacctcacagctctgctggcctctcctcaaacaagtgctgtcagggacactgctcgcagatgcagttacgtggcttttcaccagtgtgctgaaaggcttacagatgcacgggcagcacgacgggtgcatggcttccctggtccatctggccttccagatatacgaggcactgcgccccaggtacctggagataagagctgtaatggagcaaatccctgaaatacagaaggactcactggaccagtttgactgcaagcttttaaacccctccctgcagaaagtggctgacaagcgccgaaaggaccaattcaaacgcctcattgctggttgcattgggaaacccttgggagagcagttccgaaaagaagttcacattaagaatcttccctcacttttcaaaaaaacaaagccaatgctggagacggaggtgctggacaatgatgggggtggcctggccaccatctttgaaccctgaatcaagcttttgggcatccttcctcggcctttcttgtcatctcttctttccctttgtagccgatctctaggcccttcttgcactgccacctcactttccaccactgtcagcctggaaagagatccaggtctggagctggagagaacaggccctgtgcaggaccagaagtaattatactaaagtatcaagaaagggagttagggcttaaactattctgtctagatgtcccagatagttcccattctacttggagatttggcttttccaagaaaagctagagcagagcagcccttctcccacaagccctcccacccccgtgcagccacatacctgtacagaatggtaactaagggtgctgtgcccaaccctgcgactagcaaggctcgcagcaagagcacagccctcaactacttgtgccagagtttctcttggaccactccaactcccactgagcccttttgctgctgggctggcaggaaactttccccactccctaaggggcatgtctgggttaggtgctaagtgctgaagagaacttggtcagttctctcaactttgctttgggcaagaatctggtcacctgatgggatccatggtacaggctactgctaaacttggcacagtatcaagtatagtacctccaaggaccagggctgggaagtctttagtgctaacatcccctttagagttcacacatcttgcccttccatgaatgacccctcagtctggcctccccagcctcaaggtccactcaggcacaagagccacagtaccctagatagtgtcacatgacaccgttgtcatccaaggataatacagaccaactaggctacatctgtgatgagcagctagcaaagccgctggtcttctcctaggactaagtccaggtgccttccacaatctcatggtctttcaggtccctggttacttttctcaaaggccatttccaaaagaatacatgccttcacatcacaacctgtactgtgagtccattctagaggtcactgaaaggccctgtaaagagaggacatggatacgggacctggccctgaggttattactggccgtaaggcagagttaatccatacagaaaccagtgtgtccatgtgctctgcacaaaaacagacctgttgtccatccagtccactgacaagagggtttccccgagagccgaagtggactgaagctacagtttttagctggtgcgggccacaggcagggtcagattgagaagaagcaaagctggggaagcagaagttgggagtcttgtgttgctccctcttcctgtgtggtgctctgggtttctgtggatcgtgaaggcgatctcaagagtgtttccctccaaacctgatagctgcctattcctgtctggttggggctgtggaggatgtagttgtatttattgcattgtaatatttttaacatcctgtgacttcatgctagaaattttctattgtttatagaaactttttgtagaaacattaactctaaagcacatctgcatgtcagtaaaaatctcagtttcgtacag

SEQ ID NO: 4165 - DNA, 2855 bp, Homo sapien
ctcgtgacaatcttcgggtgcccttcgagagaaaaggggaggatgccactggagtcatcctcttcaatgccactatccttcccatctctcttaccctcagtaccacacaatactaacccttcccctcctctgatgtcttacatcacctcccaggagatgaagtgtattcttcactggtttgccaattggtcaggtccccagcgtgaacgtttcctagaggacctggtagctaaggcagtgccagaaaaattacaaccactgctggatagtctggagcagcttagtgtgtctggggcagaccgaccaccttctatctttgagtgccagctacatctttgggatcagtggtttcgaggctgggctgagcaggagcgcaatgaatttgtcagacagctggagttcagtgagccagacttcgtggcaaagttttaccaagcagtggctgctacagctggtaaggactgataggcattcagaccaaagaagataaccatagctgatggagccatgactctctacaatgataactcaattcaaatgtgttgcctaaagctctggaactggtattccaaccagctgaccgaactcactgaccagtacaggcatggttatttcaacattaatagcatgtcaactggactcctatttgtaaatgttatcaatctaagcaatccagctcatcagtctactagtttgcttctttccgagagatgtcaagtcctcaagaatttgatggcttcttctgcagctataaccacaaggaacctacacattgtaactcaagtccactgctggctcatgaaatgtgtaaagtagaaccctccttcccgagaaataagacaggacaataaaaggtggcgtttttgtactttacctggattccattggctggttttaccactcctatcagattgtagtgtaattgtgtgatacgcaaaccattagttttcccagtgatgatttaataaaattatgaaaaatcaggagagggagataattagttgcttcctccttcacactgtttgaatcgaactcgcggtgacttttttttttttttaaaaacatgggttgtcacttaagtttggagtgcagtggcatgatcatcagtgagcgtgagatcactgtgacctcaaattctaggctgaagtaatctttctgcctcagtctcctgagtatctaggactacaggcccgcacaacaatatctggctaatttttaaattattctgtagatacaggggtcatgctacgttttctagtctggtcttgaactgctggcctcaagcgatccattctcaccttggcctcccaaagtgctgggattacaggcatgaaccatcatacctggcctttttctaaggcatatgtatgtgatattcttggaactggtagcaggtgttcctattctgtaagtttgctttacaacaatacgaaaataagtgacaatttacaggttgaacaatttatttttgtaccaaaataaagaatggatctttagaactgtaaaacttcacccttttttcattgccaggctatataatattgacaaccggggaaagaggcattccaaagaaagtagaaattaagtatacacaatagattttccatccagttgtctcacaagaaattattctcttccttaccccctgtcatgttctgggcaacatcatacctcccttattcctctaactgggacccttgtgctgtggagctctggtgaatggtaagaggcagatggtctcacaggaagagtggctcttttctggtaggctgtggttcccattacacccaccaggattagcagcattaggcagagtcccatggacagccttaggtgggtcatggagggattatggtctgaagtaaccagcaacctaggaacatagaaggtaatatttggcatggaataatgcctagccttagtagataaagcggcattacctttttttttttttttttttggagacaaggtcttggtctgttgcccaggctggagtgcagtggtgtgatcttggctcaccgtaatctccgcctcccaggctcaagcaattctcctgcctcaaccttccgaatagctgggactacaggcgcacgccgcaccaccacgtctggctaaggggctttacccttaaagatagagctcatgaagccccgcctcatccaagcattaagctaaacaggaaatcattaagagggactatcgaaccttaaagtagaaataagatcaagatctaagtcttctagcatcttatattattggaagaagacctaacttggcagcaagggaagtggcttaagggaagagtcagtctatgttctttaggtagctagacacaatccctaacagtgcttaagaaaggaagggggctgggagtggtggcagtggctcccagcactttgggaggcagaggccggtgggttgctttagctcaggagttggagacaagcctgggcaacatggtgaaactgtctctatcaaaaatacaaaaattagctggcatggtggtgtgcacctgtagtcccagctacttgggaggctgaggtgggggaatcacttgagcctagggaggtcgaggccacagtgagctgagatcaccccactgcattccagcctgggtgacagagcgagaccctgtctcaaaaaagaagaagaaaaaggtggggggaggggactaagatccctatgtcctagagatgggggaatgtgttattgtatgggaggagggagtcaggtagtgacgggactggatgatcgtgttagggatctttgttctctgaaacgcaaccctgtctaggacaatatacacgtgagtgagtgcttaataaatttaatttcaaacaaaaaaaaaaaaaaaa

SEQ ID NO: 4166 - protein, 140 aa, Homo sapien
MPLESSSSMPLSFPSLLPSVPHNTNPSPPLMSYITSQEMKCILHWFANWSGPQRERFLEDLVAKAVPEKLQPLLDSLEQLSVSGADRPPSIFECQLHLWDQWFRGWAEQERNEFVRQLEFSEPDFVAKFYQAVAATAGKD

SEQ ID NO: 4167 - DNA, 2229 bp, Homo sapien; identical to SEQ ID NO: 3846

SEQ ID NO: 4168 - protein, 370 aa, Homo sapien; identical to SEQ ID NO: 2293

SEQ ID NO: 4169 - DNA, 1021 bp, Homo sapien
gcagtgcggcgcggctccggttcccggcggccctcgcggcaggtttcgggcttcaggacaattcgtgatggcgggggctggttccgccgctgtatcgggggcagggaccccggtggcggggcccacaggccgcgaccttttcgccgaagggctgctggagttcctgcgacccgctgtgcagcagctcgactctcacgtacacgccgtcagagagagccaggtagagctccgggaacaaattgacaacctagccacagaactgtgccgcataaatgaggatcagaaggtggccctggatcttgacccctatgttaagaagctacttaatgcccggcgacgcgttgtcttggttaacaacattctacagaatgctcaggaacgactgagacggctaaaccacagtgttgccaaggaaacagcccgcaggagagcaatgctggattcgggaatttacccccctggctccccaggcaaataacagatgagcctatggactcagtagcacaagtactgttccccagctgccttgtttcaacagacatgcaaagatcctaggagacagtccccatagaccttcagacattaaaaagggagccgtacagtttgtttgaagcacttcgtcttacccatttatgtaggggccccaggaaacctacacacagccagaatgaggttcccaaaggacttacattaattatggctcttgcttcctttcacaaatgagctgaggcctctacttttttttttaagctgcatacgtgaggcttaccttcttcaggactagttaaccagaggggcttcctttgtatgttacatgcctggttacatgggcctggacagcatgtcctctacctgtgacttctcattttcctgtttacactggggatttggagggggcaggcaaagtcaaagtgaatgacctctgtccacccacttttttattgcactggcttgaatacagtagcagtgttgatagaatcattttattcaataaatacttaaaatgaaaaaaaaaaaaaaa

SEQ ID NO: 4170 - protein, 136 aa, Homo sapien
MAGAGSAAVSGAGTPVAGPTGRDLFAEGLLEFLRPAVQQLDSHVHAVRESQVELREQIDNLATELCRINEDQKVALDLDPYVKKLLNARRRVVLVNNILQNAQERLRRLNHSVAKETARRRAMLDSGIYPPGSPGK

SEQ ID NO: 4171 - DNA, 2427 bp, Homo sapien
gggatttgttattgcgaatgatgtggacaacaagcgctgctacctgctcgtccatcaagccaagaggctgagcagcccctgcatcatggtggtcaaccatgatgcctccagcatacccaggctccagatagatgtggacggcaggaaagagatcctcttctatgatcgaattttatgtgatgtcccttgcagtggagacggcactatgagaaaaaacattgatgtttggaaaaagtggaccaccttaaatagcttgcagctacatggcttacagctgcggattgcaacacgcggggctgaacagctggctgaaggtggaagggtggtgtattccacgtgttcactaaaccctattgaggatgaagcagtcatagcatctttactggaaaaaagtgaaggtgctttggagcttgctgatgtgtctaatgaactgccagggctgaagtggatgcctggaatcacacagtggaaggtaatgacgaaagatgggcagtggtttacagactgggacgctgttcctcacagcagacacacccagatccgacctaccatgttccctccgaaggacccagaaaagctgcaggccatgcacctggagcgatgccttaggatattaccccatcatcagaatactggagggttttttgtggcagtattggtgaaaaaatcttcaatgccgtggaataaacgtcagccaaagcttcagggtaaatctgcagagaccagagaaagcacacagctgagccctgcagatctcacagaagggaaacccacagatccctctaagctggaaagtccgtcattcacaggaactggtgacacagaaatagctcatgcaactgaggatttagagaataatggcagtaagaaagatggcgtgtgtggtcctcctccatcaaagaaaatgaagttatttggatttaaagaagatccatttgtatttattcctgaagatgacccattatttccacctattgagaaattttatgctttggatccttcattcccaaggatgaatttgttaactcggactacagaagggaagaaaaggcagctctacatggtttctaaggagttgcggaatgtgctgctgaataacagtgagaagatgaaggttattaacacggggatcaaagtctggtgtagaaataacagcggtgaagagtttgactgtgctttccggctggcacaggagggaatatatacattgtatccatttattaactcaagaattattactgtatcaatggaagatgttaagatactgttgacccaggaaaatcccttttttagaaaactcagcagtgagacctacagtcaagcaaaggacctggcaaagggaagcatcgtgctgaagtatgaaccagattctgcgaatccagacgctctacagtgtcccatcgtcttatgcggatggcggggaaaggcctccattcgaacttttgtgcccaagaatgaacggcttcactatctcaggatgatggggctggaggtattgggagaaaagaagaaggaaggggttatcctcacaaatgagagtgcagccagcaccggacagccagacaatgacgtgactgagggacagagagcaggagagcccaacagcccagatgcagaagaggccaacagtccagacgtgacagcaggctgtgacccggcgggggtccatccaccccggtgagcaggcccaaggcagcgggggcccacacccctcacacgcaaaactggcttcttctggtcactggtgtctgaaaccaaatccagagcagcctgtggcctgtaaagcatatatttctagtgactgcagactggtgggatcataggagccttctgaatgaccaggactgctttctttggagctgatgaaaatgtactcttttagcgtgttagaaatcacttgttttattttgttttctttggccaagctgggtctagtgtttcttttgctgggaatagactttcaaaagttgtacttctatcaagaaacaaaactgcccttgcagaaatttcaggtcttttgttaagcctgtattggtcttaaggtgcagtattttttaaattattatttatagaaagaatctataaattcttggggaagtgtgttataagctttaataattacattgagctgcacctcagtggtgtgtcattaacatgcagtggggttaatatctgaggcctcagatgactttgtgccttttggaataaagggtaaaataaactctcccagagtaagagctgtatcgtgaattgtcatactaattattgagggggacttatgtgcttttattgaatggagtgctttacaatttttatttttaaatggggttgggatccttggaatatttcaataaaattgataaaatataaaaaaaaaaaaaaaaaaaaaaaaaaaaaaaaaaaaaaaaaaaaaaaaaaaaaaaaaaa

SEQ ID NO: 4172 - protein, 531 aa, Homo sapien
MVVNHDASSIPRLQIDVDGRKEILFYDRILCDVPCSGDGTMRKNIDVWKKWTTLNSLQLHGLQLRIATRGAEQLAEGGRVVYSTCSLNPIEDEAVIASLLEKSEGALELADVSNELPGLKWMPGITQWKVMTKDGQWFTDWDAVPHSRHTQIRPTMFPPKDPEKLQAMHLERCLRILPHHQNTGGFFVAVLVKKSSMPWNKRQPKLQGKSAETRESTQLSPADLTEGKPTDPSKLESPSFTGTGDTEIAHATEDLENNGSKKDGVCGPPPSKKMKLFGFKEDPFVFIPEDDPLFPPIEKFYALDPSFPRMNLLTRTTEGKKRQLYMVSKELRNVLLNNSEKMKVINTGIKVWCRNNSGEEFDCAFRLAQEGIYTLYPFINSRIITVSMEDVKILLTQENPFFRKLSSETYSQAKDLAKGSIVLKYEPDSANPDALQCPIVLCGWRGKASIRTFVPKNERLHYLRMMGLEVLGEKKKEGVILTNESAASTGQPDNDVTEGQRAGEPNSPDAEEANSPDVTAGCDPAGVHPPR

SEQ ID NO: 4173 - DNA, 3183 bp, Homo sapien
  Unsure 3069: Unknown base
  Unsure 3105: Unknown base
tgccggcgtccccgaggcgggggacggccggccgcgggcccggctgccgccgcgcgactccacccgtggtggggcgggggcggctggccggcggagcccctcgcgcggggcctgtccagctctccttcggagatcttgcaggagctgggcaaggggagcacgcatccccagcccggggtgtcgccacccgctgccccggcggcgcccggccccaaggacggccccggggagacggacgcgtttggcaacagcgagggcaaagagctggtggcctcaggtgaaaacaaaataaaacagggtctgttacctagcttggaagatttgctgttctatacaattgctgaaggacaagagaaaatacctgttcataaatttattacagcactcaaatctacaggattgcgaacgtctgatcccaggttgaaagagtgtatggatatgttaagattaactcttcaaacaacatcagatggtgtcatgctagacaaagatctttttaaaaaatgtgttcagagcaacattgttttgttgacacaagcatttagaagaaagtttgtgattcctgactttatgtcttttacctcacacattgatgagttatatgaaagtgctaaaaagcagtctggaggaaaggttgcagattatattcctcaactggccaaattcagtcccgatttgtggggtgtgtctgtttgtacagcagatggacagaggcattctactggagataccaaagttcccttctgtcttcagtcctgtgtaaaacctttgaaatatgccattgctgttaatgatcttggaactgaatatgtgcatcgatatgttggaaaagagccgagtggactaagattcaacaaactatttttgaatgaagatgataaaccacataatcctatggtaaatgctggagcaattgttgtgacttcactaataaagcaaggagtaaataatgctgaaaaatttgactatgtcatgcagtttttgaataagatggctggtaatgaatatgttggattcagtaatgcaacgtttcagtctgaaagagaaagtggagatcgaaattttgcaataggatattacttaaaagaaaagaagtgttttccagaaggcacagacatggttggtatattagacttctacttccagctgtgctccattgaagtgacttgtgaatcagccagtgtgatggctgcgacactggctaatggtggtttctgcccaattactggtgaaagagtactgagccctgaagcagttcgaaatacattgagtttgatgcattcctgtggcatgtatgacttctcagggcagtttgctttccatgttggtcttcctgcaaaatctggagttgctgggggcattcttttagttgtccccaatgttatgggtatgatgtgctggtctcctcctctggataagatgggcaacagtgttaagggaattcacttttgtcacgatcttgtttctctgtgtaatttccataactatgataatttgagacactttgcaaaaaaacttgatcctcgaagagaaggtggtgatcaaaggcattcctttggaccattggactatgaaagtctccaacaagaacttgctttaaaagagacagtatggaaaaaagtgtcacctgagtcaaatgaggacatctctacaactgtagtatatagaatggaaagtctgggagagaaaagctaaagaaatgggttctagtttcagaatgtttcttcatttaatctttcaaacatctttagcttttttttgcaagttataaatatttatttgaggtattttttgttctcaatcttgggtgctggagccataaagcttttttttccttttaatctttgtataaaggcagtagattaagaagtgcatttgttggtctttaaaaagtatttacaagtacataaatttgctttatttttaaaaatacaaaaaggaaaaatttaaattttttttgatgtaattaaaatgttaactatgtggtcagataatcccattttacaatagtaacagaaaattgtaattcttagttctaaaattcacaaattaaactcataagctttgttgcattttgttttttcttttccatttttaaaactaatgtgatgtctttagtggcaatagaaggtacttctatgctaaatacaaaactaaaaaggcaaaataatgaaccccaaattattttatttaaaatagcagtggattataaaattagcttgtgtttacatttatgccatttttggtgatagattggctttacattttaaaaaatttatttaaaaatttatcaaatgctttaaaatatgactcctactttttttattttgcaactcctctgttctgtcagagttgttatatacaggagtgtcttatgttactaaaacattccagccaaagaatttcagatgtgagataatgatgtttcatcaataaaaagctataatggttagttactcagaaggagaaacagtgagtgtcttcaagtgaattgttcacctaaacaattttattttcatattatccacataactttttctatgttatatttaaatatgaatggcaaattttggtttttagcttttacattttattatcttaattttataaatgctaatatttcttttgtgataagttatagcatctcataaagtttgttctatttgaagttttttagagtacttgagaaatgaatttagtctgcaggtagtaagtatgctactaaaatacgttagatctaaatccttttatttggtataaaaatgcaatattgagaatcaaaacttgtttttaagagaactatagattctacacaacctgatttcaagtaattattcatagtatttatagttgtcttggcaaagtgattgtaaaattctgtaggacctattcacacttcttccttcttccatatacttctctggttttccccatagttcccctataatttcaagtttgttgaaacctgttaattttagtgggggattagaagaaaaacttggtggtttcttagcatgatggtgtatgtatgtggtaatggaaagtctgtaaaagtaaatatagtgtagnaaaaaagatttcactgagtattttagatactagtgnaaataaagatagaaaatcttgatcataatgtcttaagtttgggaactgtgatattaagaaaagaaattcccttctaga

SEQ ID NO: 4174 - protein, 527 aa, Homo sapien
LSSSPSEILQELGKGSTHPQPGVSPPAAPAAPGPKDGPGETDAFGNSEGKELVASGENKIKQGLLPSLEDLLFYTIAEGQEKIPVHKFITALKSTGLRTSDPRLKECMDMLRLTLQTTSDGVMLDKDLFKKCVQSNIVLLTQAFRRKFVIPDFMSFTSHIDELYESAKKQSGGKVADYIPQLAKFSPDLWGVSVCTADGQRHSTGDTKVPFCLQSCVKPLKYAIAVNDLGTEYVHRYVGKEPSGLRFNKLFLNEDDKPHNPMVNAGAIVVTSLIKQGVNNAEKFDYVMQFLNKMAGNEYVGFSNATFQSERESGDRNFAIGYYLKEKKCFPEGTDMVGILDFYFQLCSIEVTCESASVMAATLANGGFCPITGERVLSPEAVRNTLSLMHSCGMYDFSGQFAFHVGLPAKSGVAGGILLVVPNVMGMMCWSPPLDKMGNSVKGIHFCHDLVSLCNFHNYDNLRHFAKKLDPRREGGDQRHSFGPLDYESLQQELALKETVWKKVSPESNEDISTTVVYRMESLGEKS

SEQ ID NO: 4175 - DNA, 2005 bp, Homo sapien
aaaaaaaaaaaagagggaggtggcggcagcggctagcggactcgagtctcaaccgggctgaggcggacacttctgtggagcgaagcagtgggagcatcgagcactagaggcggcaccgggatccccggctccggggaggggggcgccggaccgggaggaggggagggggcgatgctggaagccatggcggagcccagtcccgaagatccacctccgacccttaagccagagactcagccaccagagaaacggcggagaacaattgaggatttcaacaaattctgcagttttgttttggcatatgctggttacattccccctagcaaagaggaaagtgactggccagcctctggctccagctctccattgcgaggagagagtgcggccgacagtgatggctgggactcggccccctcagatcttcgaaccatccagacttttgttaagaaagcaaagtcatccaagagaagggcagctcaagcaggtcccacccagccaggacccccaaggtccactttctctcgtctgcaggcccccgacagtgctaccttgcttgagaagatgaagctcaaggactctctctttgatctggatgggcccaaagtggcatctcctttgtcccccacatccctgacacatacctcccggccccctgctgctcttacccccgtgcccctttcccagggggacctctcccatcctcctcgaaagaaggaccgaaagaaccgaaagttggggccaggagctggggctggctttggggtgcttcggaggcctcggccaactcctggggatggggaaaagagatctcgaatcaagaagagcaagaagcggaagttaaaaaaggcagaacggggggatagactcccacctcctgggcctccccaggcacccccagtgatacagactctgaagaggaggaggaagaggaggaagaggaagaagaagaagagatggcaacagtggtagggggtgaagccccagtccctgtgctgccaacaccccctgaggctcctaggccccctgccacagtgcaccctgaaggagtccctcctgctgacagtgaaagcaaggaggtgggcagcactgaaacaagccaagatggagatgccagctccagtgaaggcgagatgcgggtcatggacgaggacatcatggtagaatcaggtgatgactcatgggatctgatcacatgttactgtcgaaagccctttgcagggcggcccatgattgagtgcagcctgtgtgggacgtggatccacctctcctgtgctaagattaagaagaccaacgtccccgacttcttttattgccagaaatgcaaggaactgaggccagatgcccggcggttaggggggccccccaaatctggagagccctgatggcaccaactttagcctggaacttccaaatgacaacatgatttgggaactgagcctcagggtcctcagcctatcccctggagcttggatactgtctgcacttcaaggcaggaattctcaagggagacttgtttgaaaatgagtgtctcactttcccaccctatccttcctccccactctgtggacttgaaattgaatccattacggttggggatgggaggctgtctgtgtcccgacacataatctctgtctcttggacctgccaccatcactttctgggtcaggattggaattgggatggaatgggacagttgtctataaaactctagtgtaaatattagcactcccctccctcatcttttcttctatttcactccccatttattttcttctacaccggttgtatttttaattttggacttcccctattgggcatggcagctcaaaggtggagtactagagcctggccaagtgaggaaggaaagcagaaaggtgacgattctcactcacctcttttgtttttaataatatcggccgctgtttgtacagacagcctgcgtgttgtaaataaagcagggtgggctctttaaaaaaaaaaaaaaaaaaaaaaaaaaaaaaaaaaa

SEQ ID NO: 4176 - protein, 265 aa, Homo sapien
MLEAMAEPSPEDPPPTLKPETQPPEKRRRTIEDFNKFCSFVLAYAGYIPPSKEESDWPASGSSSPLRGESAADSDGWDSAPSDLRTIQTFVKKAKSSKRRAAQAGPTQPGPPRSTFSRLQAPDSATLLEKMKLKDSLFDLDGPKVASPLSPTSLTHTSRPPAALTPVPLSQGDLSHPPRKKDRKNRKLGPGAGAGFGVLRRPRPTPGDGEKRSRIKKSKKRKLKKAERGDRLPPPGPPQAPPVIQTLKRRRKRRKRKKKKRWQQW

SEQ ID NO: 4177 - DNA, 2483 bp, Homo sapien
gtctgtaatccgtgtctccagtagtagctgcagtgactgtaggtatcggtgttcctattatgttagcttatgtctatggcgtagttccaatttctctttgtcgaagcggaggttgtggagtctcagcaggcaatggaaaaggagttaggattgaatttgatgatgaaaatgatataaatgttggtggaactaacacagctgtagacacaacatcagtagcagaagcaagacacaacccaagcataggggagggaagtgttggtgggctgactggcagtttgagtgcaagtggaagccacatggatcgaataggagccatccgagacaacctgagtgaaacggccagcaccatggcactagctggagccagtataacggggagtctgtcaggaagtgccatggtaaactgttttaacaggttggaagtacaagcagatgtacagaaagaacggtacagtctaagtggagaatctggcacagtcagcttgggaacagttagtgataatgccagcaccaaagcaatggcaggatccattctgaattcctacatcccattggacaaagaaggcaacagtatggaggtgcaagtagatattgagtcaaagccatccaaattcaggcacaacagtggaagcagtagtgtggatgatggcagtgccacccgaagtcatgctggcggttcatccagtggcttgcctgaaggtaaatctagtgccaccaagtggtccaaagaagcaacagcagggaaaaaatcaaaaagtggtaaactgaggaaaaagggtaacatgaagataaatgagacgagagaggacatggatgcacagttgttagaacaacaaagcacgaactcaagtgaatttgaggctccatccctcagtgacagtatgccttctgtagcagattctcactctagtcatttttctgaatttagttgttctgacctagaaagcatgaaaacttcttgtagtcatggttccagtgattatcacacccgctttgctactgttaacattcttcctgaggtagaaaatgaccgtctggaaaattccccacatcagtgtagcatttctgtggttacccaaactgcttcctgttcagaagtttcacagttgaatcatattgctgaagaacatggtaacaatggaataaaacctaatgttgatttatattttggcgatgcactaaaagaaacaaataacaaccactcacatcagacaatggaattaaaagttgcaattcagactgaaatttaggcccataaatgctgcagaataattaccactgtacaaccgtgtttggagctggttgaactacatgtgactacttaagtttcaggttaccagcaaaagccgggtttcattatcataatgcagatacattttctgtgttcagcaaggcattgtgtgtcatgtggatcttagttaccaaactatgaagtgaaggctttaaaagtgcattattttaaggataataaatttgaagagcaaagcatgttttgtgtgtttgccacaaaacattgcttgaagcacatacttagatagaaattggtcttaatttatataatcaatataaaatactaatgcaattctacagcattcaaatgaagaaaacttgaggctttagggataagtggttagtgatattttattgaaaccactaaagagataagtttaaaagaactgcataggttactctcagtatatgatactctgtaacatttctatttatatcggcataaatttcattttttttcttcatatgcaatgtggttatataaagcttaatgcagctcatttgctaccatttggatacttagacactttgagcaagattgtggcagtttttgcacaactttgaaatagaaatacctggtactctatcttgtttattgttgatgccatcttagaggaaaaaatgtaaaggtaagtaattaagcatatgacagcaacaaataagatacataaaactacaaaataaagtcccattaggttataagtattacaaaaaatccacctttctctaaggggaagtttgtaccccattgattcttggtgcctttgggatcgactgggttttaatggcctagttatttgaggattttgctgtgttgttttccatgtcttctctggtcaccttggattatatataaaaatacaggaaataggtaaacatgaatgtgattaataatgctgaaaaagtattagcctaccaaagacacactcaggctttagtgaataactttacataacctcagtttttaacacatgcatatcttctccaaccatgaaatcaaagcacggtgcagaacttgtaccaagtacaaaaggtccatgtatgattagcattattttcttttgcttttgtttatggacaatgttcagctgacataagcagaagttggccaaaatactgcctgtactgttaatttcctgtataattcacttaaataaaagcaggttaacctcaaaaaaaaaaaaaaaaaa

SEQ ID NO: 4178 - protein, 397 aa, Homo sapien
MLAYVYGVVPISLCRSGGCGVSAGNGKGVRIEFDDENDINVGGTNTAVDTTSVAEARHNPSIGEGSVGGLTGSLSASGSHMDRIGAIRDNLSETASTMALAGASITGSLSGSAMVNCFNRLEVQADVQKERYSLSGESGTVSLGTVSDNASTKAMAGSILNSYIPLDKEGNSMEVQVDIESKPSKFRHNSGSSSVDDGSATRSHAGGSSSGLPEGKSSATKWSKEATAGKKSKSGKLRKKGNMKINETREDMDAQLLEQQSTNSSEFEAPSLSDSMPSVADSHSSHFSEFSCSDLESMKTSCSHGSSDYHTRFATVNILPEVENDRLENSPHQCSISVVTQTASCSEVSQLNHIAEEHGNNGIKPNVDLYFGDALKETNNNHSHQTMELKVAIQTEI

SEQ ID NO: 4179 - DNA, 676 bp, Homo sapien
cggatggggcgtaggtgggcggtgcgcccacagctgcctgggtaaggcccaagatggctgtcttcgccttagtactcgtgtgaagttggcggggacggttcctgtcatcttcttgggcttatttggtgtgctgttgaaggggggagactagagaaatggcagggaacctcttatccggggcaggtaggcgcctgtgggactgggtgcctctggcgtgcagaagcttctctcttggtgtgcctagattgatcggtataaggctcactctcccgccccccaaagtggttgatcgttggaacgagaaaagggccatgttcggagtgtatgacaacatcgggatcctgggaaactttgaaaagcaccccaaagaactgatcagggggcccatatggcttcgaggttggaaagggaatgaattgcaacgttgtatccgaaagaggaaaatggttggaagtagaatgttcgctgatgacctgcacaaccttaataaacgcatccgctatctctacaaacactttaaccgacatgggaagtttcgatagaagagaaagctgagaacttcggaaaaggctcatctgtcaccctggagaagggaaactgtacttttccctgtgaggaaacggctttgtattttctctgtaataaaatggggcttctttggaaaaaaaaaaaaaaa

SEQ ID NO: 4180 - protein, 128 aa, Homo sapien
MAGNLLSGAGRRLWDWVPLACRSFSLGVPRLIGIRLTLPPPKVVDRWNEKRAMFGVYDNIGILGNFEKHPKELIRGPIWLRGWKGNELQRCIRKRKMVGSRMFADDLHNLNKRIRYLYKHFNRHGKFR

SEQ ID NO: 4181 - DNA, 2765 bp, Homo sapien
aagcacttcctgtctgcggcatacaaaatgtatggcacggaattttaagcttactgagctttataaacacgtcacattcacacattcaagacacacactggatattcggataaaaacaaacaaacaaaaaacaggctaaatacccattcccctcaataacttggataagatacctaaaaaaggtcgacttcggtacctttctgtcttctcccctctcgctatttgcctacactggcttcctcacctccactttttctcacgtttatctgagcgaaaacaagcacggttcggcagcctcctttcccagccctacctttgtgctgcaaaagcgaaaattcaaaagccaagtacaataggagaccgcccaccctggctccctcgtgacacgagggagcgcgaagcggagggcgcctcgcggcaggagcgggatttccggggtcacgggaaccggcaggggaacgggataaagttcctggagaaaggaaaggagagcgtgggatagtaaaagagaagacgcggagaagaggagaggacctacaagaacggaggacaggggcgcacgatggtcccggggggagcggaaacaaaggcacgcaaaacggaaaagcgtgtgtaggggagcggaaaaggaagtcaccaccgtggcctgcgacgaaatggcgaaaagtcttttgaagacagcctctctgtctggaaggacaaaattgctacatcaaacaggattgtcactttatagtacatcccatggattttatgaggaagaagtgaaaaaaacacttcagcagtttcctggtggatccattgaccttcagaaggaagacaatggcattggcattcttactctgaacaatccaagtagaatgaatgccttttcaggtgttatgatgctacaacttctggaaaaagtaattgaattggaaaattggacagaggggaaaggcctcattgtccgtggggcaaaaaatactttctcttcaggatctgatctgaatgctgtgaaatcactaggaactccagaggatggaatggccgtatgcatgttcatgcaaaacaccttaacaagatttatgagacttcctttaataagtgttgcgctggttcaaggttgggcattgggtggaggagcagaatttactacagcatgtgatttcaggttaatgactccagagagtaagatcagattcgtccacaaagagatgggcataataccaagctggggtggcaccacccggctagttgaaataatcggaagtagacaagctctcaaagtgttgagtggggcccttaaactggattcaaaaaatgctctaaacataggaatggttgaagaggtcttgcagtcttcagatgaaactaaatctctagaagaggcacaagaatggctaaagcaattcatccaagggccaccggaagtaattagagctttgaaaaaatctgtttgttcaggcagagagctatatttggaggaagcattacagaacgaaagagatcttttaggaacagtttggggtgggcctgcaaatttagaggctattgctaagaaaggaaaatttaataaataattggtttttcgtgtggatgtactccaagtaaagctccagtgactaatatgtataaatgttaaatgatattaaatatgaacatcagaattactttgaaggctactattaatatgcagacttacttttaatcatttgaatatctgaactcatttacctcatttcttgccaattactcacttgggtatttactgcgtaatctggaacatttagctaaaatatacacttttggcttaaaaattattgctgtcaattccaataataattcttagcttataaccaaagagcagtgtttaaaaggagagcttctatacaaaacctattcctggcgttacttttcatacaatttttgttctgttttacctggaaataatttaccaaaataactgagtgttgctgctaaagaacaaaagtggggaggtatcagggaacaagaaaacaagaaagggtatgatcaatcattttcttctgctccaaacagctggagtaaaattcatgggaaatggcccttcatttaaaaaaagatgtacctcactacccactacaaatttggaactttgttcttttcaataattagttttctattgtaaattacctactaaacagtggtagccatgacatggaaagtcaactgattctacaattggacattcatttgtgtgccctggaatttccaactagtaataaacaactactgttgatgtagttttaaaccacttgaagggactcatgaagcatcctgcaacataaatttgcatttttacatcagatttcttttttttcctgaaaaacaactaaccttctaacaactatctttcaaaagtaaatgtaataaaaatgcacaacataaaatgtttatgatcccagcaatacactttttaaaaaatgtgaaagtcaaagaattaagttctagttctgactcatcacaagaggtcaaaagtatttgctactgtaacattcaattcacatttgagaatcatggtaaaaataacttgcatttgccttaccatcatgatcctactgttgagttaggaaaatatggttagacagactcacattactttttttcagaggtaaactctagattactgtgtcaacccaatactatttggccatagatgtaaaaactaccaaataaaagtggattttgtggtctacaacattttgtgtaaagtgaattcatgtctgctaacaccgttaagtctg

SEQ ID NO: 4182 - protein, 519 aa, Homo sapien
  unsure 46: unknown amino acid
STSCLRHTKCMARNFKLTELYKHVTFTHSRHTLDIRIKTNKQKTGXIPIPLNNLDKIPKKGRLRYLSVFSPLAICLHWLPHLHFFSRLSERKQARFGSLLSQPYLCAAKAKIQKPSTIGDRPPWLPRDTREREAEGASRQERDFRGHGNRQGNGIKFLEKGKESVGSKREDAEKRRGPTRTEDRGARWSRGERKQRHAKRKSVCRGAEKEVTTVACDEMAKSLLKTASLSGRTKLLHQTGLSLYSTSHGFYEEEVKKTLQQFPGGSIDLQKEDNGIGILTLNNPSRMNAFSGVMMLQLLEKVIELENWTEGKGLIVRGAKNTFSSGSDLNAVKSLGTPEDGMAVCMFMQNTLTRFMRLPLISVALVQGWALGGGAEFTTACDFRLMTPESKIRFVHKEMGIIPSWGGTTRLVEIIGSRQALKVLSGALKLDSKNALNIGMVEEVLQSSDETKSLEEAQEWLKQFIQGPPEVIRALKKSVCSGRELYLEEALQNERDLLGTVWGGPANLEAIAKKGKFNK

SEQ ID NO: 4183 - DNA, 1402 bp, Homo sapien
ggcacgagcggcacgagcggagggcgcctcgcggcaggagcgggatttccggggtcacgggaaccggcaggggaacgggataaagttcccggagaaaggaaaggagagcgtgggatagtaaaagagaagacgcggagaagaggagaggacctacaagaacggaggacaggggcgcacgatggtcccggggggagcggaaacaaaggcacgcaaaacggaaaagcgtgtgtaggggagcggaaaaggaagtcaccaccgtggcctgcgacgaaatggcgaaaagtcttttgaagacagcctctctgtctggaaggacaaaattgctacatcaaacaggattgtcactttatagtacatcccatggattttatgaggaagaagtgaaaaaaacacttcagcagtttcctggtggatccattgaccttcagaaggaagacaatggcattggcattcttactctgaacaatccaagtagaatgaatgccttttcaggtgttatgatgctacaacttctggaaaaagtaattgaattggaaaattggacagaggggaaaggcctcattgtccgtggggcaaaaaatactttctcttcaggatctgatctgaatgctgtgaaaatcaccataggaatctcccagaggagacttcctttaataagtgttgcgctggttcaaggttgggcattgggtggaggagcagaatttactacagcatgtgatttcaggttaatgactccagagagtaagatcagattcgtccacaaagagatgggcataataccaagctggggtggcaccacccggctagttgaaataatcggaagtagacaagctctcaaagtgttgagtggggcccttaaactggattcaaaaaatgctctaaacataggaatggttgaagaggtcttgcagtcttcagatgaaactaaatctctagaagaggcacaagaatggctaaagcaattcatccaagggccaccggaagtaattagagctttgaaaaaatctgtttgttcaggcagagagctatatttggaggaagcattacagaacgaaagagatcttttaggaacagtttggggtgggcctgcaaatttagaggctattgctaagaaaggaaaatttaataaataattggtttttcgtgtggatgtactccaagtaaagctccagtgactaatatgtataaatgttaaatgatattaaatatgaacatcagttaaaaaaaaaattctttaaggctactattaatatgcagacttacttttaatcatttgaaatctgaactcatttacctcatttcttgccaattactcccttgggtatttactgcgtaattggaacatttactaaaataacacttttggcttaaaaaaaaaaaaaaaaaaaaaaaaaaaaaaaaa

SEQ ID NO: 4184 - protein, 286 aa, Homo sapien
MAKSLLKTASLSGRTKLLHQTGLSLYSTSHGFYEEEVKKTLQQFPGGSIDLQKEDNGIGILTLNNPSRMNAFSGVMMLQLLEKVIELENWTEGKGLIVRGAKNTFSSGSDLNAVKITIGISQRRLPLISVALVQGWALGGGAEFTTACDFRLMTPESKIRFVHKEMGIIPSWGGTTRLVEIIGSRQALKVLSGALKLDSKNALNIGMVEEVLQSSDETKSLEEAQEWLKQFIQGPPEVIRALKKSVCSGRELYLEEALQNERDLLGTVWGGPANLEAIAKKGKFNK

SEQ ID NO: 4185 - DNA, 2338 bp, Homo sapien
actcccgccttcatttcccatcgtgctgaggcgggtggcatggcggagaaggatgacaccggagtttgacgaagaggtggtttttgagaattctccactttaccaatacttacaggatctgggacacacagactttgaaatatgttcttctttgtcaccaaaaacagaaaaatgcacaacagagggacgacaaaagcctcctacaagagtcctaccaaaaggatctctcagtgctatttgccttcattagcttgctcgttatgcttcccgcttggtggattgtgtcttcctggctggtatggggagtgattctatttgtgtatctggtcataagagctttgagattatggaggacagccaaactacaagtgaccctaaaaaaatacagcgttcatttggaagatatggccacaaacagccgagcttttactaacctcgtgagaaaagctttacgtctcattcaagaaaccgaagtgatttccagaggatttacactggtcagtgctgcttgcccatttaataaagctggacagcatccaagtcagcatctcatcggtcttcggaaagctgtctaccgaactctaagagccaacttccaagcagcaaggctagctaccctatatatgctgaaaaactaccccctgaactctgagagtgacaatgtaaccaactacatctgtgtggtgccttttaaagagctgggccttggacttagtgaagagcagatttcagaagaggaagcacataactttacagatggcttcagcctgcctgcattgaaggttttgttccaactctgggtggcacagagttcagagttcttcagacgggtaataattcttgaagatgaacttgaaaagcttgtttgtactaaagaaacacaagaactagtgtcagaggcttatcccatcctagaacagaaattaaagttgattcagccccacgttcaagcaagcaacaattgctgggaagaggccatttctcaggtcgacaaactgctacgaagaaatacagataaaaaaggcaagcctgaaatagcatgtgaaaacccacattgtacagtagtacctttgaagcagcctactctacacattgcagacaaagatccaatcccagaggagcaggaattagaagcttatgtagatgatatagatattgatagtgatttcagaaaggatgatttttattacttgtctcaagaagacaaagagagacagaagcgtgagcatgaagaatccaagagggtgctccaagaattaaaatctgtgctgggatttaaagcttcagaggcagaaaggcagaagtggaagcaacttctatttagtgatcatgccgtgttgaaatccttgtctcctgtagacccagtggaacccataagtaattcagaaccatcaatgaattcagatatgggaaaagtcagtaaaaatgatactgaagaggaaagtaataaatccgccacaacagacaatgaaataagtaggactgagtatttatgtgaaaacgctctagaaggtaaaaataaagataattcttcaaatgaagtcttcccccaaggagcagaagaaagaatgtgttaccaatgtgagagtgaagatgaaccacaagcagatggaagtggtctgaccactgcccctccaactcccagggactcattacagccctccattaagcagaggctggcacggctacagctgtcaccagattttaccttcactgctggccttgctgcagaagtggctgctagatctctctcctttaccaccatgcaggaacagacttttggtgatgaggaggaagaacaaataatagaagaaaataaaaatgagatagaagaaaagtaagaaccaagattcatatgaagtgatattagattgttccttttacaaaagtgtttagcttcaagactggaaagggaatatgagtgtaagtttactatatataaagctaagatgtggatttacaggaagaaccctggtttgaataactgatctgaaattagtagttacctgtaaatggcagatcttttaggaaaataagagaaaggtaagggctcttttgaataaactgctgttttatttgtggcacaactgatcaatcttggaaattctttaagtatttttaataagaaatgaattatcatttcttgccagaatttgctaccttaaggtgattgggaaaattctgttgcaagaacattaacatttagtatgactcctttttactgtattcttgcagttaataactgcagctattatgttaataacaagttgtttgtattttatttttgtttataccagtcttaaagatccaggttctgaataaaaaaattaattgatac

SEQ ID NO: 4186 - protein, 526 aa, Homo sapien [sequence omitted]

SEQ ID NO: 4187 - DNA, 1590 bp, Homo sapien
atgttggtgctgtttgaaacgtctgtgggttacgccatctttaaggttctaaatgagaagaaacttcaagaggttgatagtttatggaaagaatttgaaactccagagaaagcaaacaaaatagtaaagctaaaacattttgagaaatttcaggatacagcagaagcattagcagcattcacagctctgatggagggcaaaatcaataagcagctgaaaaaagttctgaagaaaatagtaaaagaagcccatgaaccgctggcagtagctgatgctaaactaggaggggtcataaaggaaaagctgaatctcagttgtatccatagtcctgttgttaatgaacttatgagaggaattcgttcacaaatggatggattaatccctggggtagaaccacgtgaaatggcagctatgtgtcttggattggctcacagcctgtctcgatatagattgaagtttagcgctgataaagtagacacaatgattgttcaggcaatttccttgttagatgacttggataaagaactaaacaactacattatgcgatgtagagaatggtatggctggcatttccctgaattaggaaaaattatttcagataatttaacatactgcaagtgtttacagaaagttggcgataggaagaactatgcctctgccaagctttctgagttgctgccagaagaagttgaagcagaagtgaaagcagctgcagagatatcaatgggaacagaggtttcagaagaagatatttgcaatattctgcatctttgcacccaggtgattgaaatctctgaatatcgaacccagctctatgaatatctacaaaatcgaatgatggccattgcacccaatgttacagtcatggttggggaattagttggagcacggcttattgctcatgcaggttctcttttaaatttggccaagcatgcagcttctaccgttcagattcttggagctgaaaaggcacttttcagagccctcaaatctagacgggatacccctaagtatggtctcatttatcatgcttcactcgtgggccagacaagtcccaaacacaaaggaaagatttctcgaatgctggcagccaaaaccgttttggctatccgttatgatgcttttggtgaggattcaagttctgcaatgggagttgagaacagagccaaattagaggccaggttgagaactttggaagacagagggataagaaaaataagtggaacaggaaaagcattagcaaaaacagaaaaatatgaacacaaaagtgaagtgaagacttacgatccttctggtgactccacacttccaacctgctctaaaaaacgcaaaatagaacaggtagataaagaggatgaaattactgaaaagaaagccaaaaaagccaagattaaagttaaagttgaagaagaggaagaagaaaaagtggcagaagaagaagaaacatctgtgaagaagaagaagaaaaggggtaaaaagaaacacattaaggaagaaccactttctgaggaagaaccatgtaccagcacagcaattgctagtccagagaaaaagaagaaaaagaaaaaaaagagagagaacgaggattaa

SEQ ID NO: 4188 - protein, 529 aa, Homo sapien
MLVLFETSVGYAIFKVLNEKKLQEVDSLWKEFETPEKANKIVKLKHFEKFQDTAEALAAFTALMEGKINKQLKKVLKKIVKEAHEPLAVADAKLGGVIKEKLNLSCIHSPVVNELMRGIRSQMDGLIPGVEPREMAAMCLGLAHSLSRYRLKFSADKVDTMIVQAISLLDDLDKELNNYIMRCREWYGWHFPELGKIISDNLTYCKCLQKVGDRKNYASAKLSELLPEEVEAEVKAAAEISMGTEVSEEDICNILHLCTQVIEISEYRTQLYEYLQNRMMAIAPNVTVMVGELVGARLIAHAGSLLNLAKHAASTVQILGAEKALFRALKSRRDTPKYGLIYHASLVGQTSPKHKGKISRMLAAKTVLAIRYDAFGEDSSSAMGVENRAKLEARLRTLEDRGIRKISGTGKALAKTEKYEHKSEVKTYDPSGDSTLPTCSKKRKIEQVDKEDEITEKKAKKAKIKVKVEEEEEEKVAEEEETSVKKKKKRGKKKHIKEEPLSEEEPCTSTAIASPEKKKKKKKKRENED

SEQ ID NO: 4189 - DNA, 1129 bp, Homo sapien
tggcaccggcatcggctgacactgctgcctccagctagttatttcgtcctcttccgttcttcacccctacaccttggaggtgaacttctcacctgagggctgtaaagactcgtttgaaaatggagagccaagaaccaacggaatcttctcagaatggcaaacagtatatcatttcagaggagttaatttcagaaggaaaatgggtcaagcttgaaaaaacaacgtacatggatcctactggtaaaactagaacttgggaatcagtgaacgtaccaaccaggaaagagcagactgcggatggtgtcgcggtcatccccgtgctgcagagaacacttcactatgagtgtatcgttctggtgaaacagttccgaccaccaatggggggctactgcatagagttccctgcaggtctcatagatgatggtgaaaccccagaagcagctgctctccgggagcttgaagaagaaactggctacaaaggggacattgccgaatgttctccagcggtctgtatggacccaggcttgtcaaactgtactatacacatcgtgacagtcaccattaacggagatgatgccgaaaacgcaaggccgaagccaaagccaggggatggagagtttgtggaagtcatttctttacccaagaatgacctgctgcagagacttgatgctctggtagctgaagaacatctcacagtggacgccagggtctattcctacgctctagcgctgaaacatgcaaatgcaaagccatttgaagtgcccttcttgaaattttaagcccaaatatgacactggccatttttgtaaacgagaccaccaggccttcttcactaagactttgtattcaacttagtttaatgtagatttgccattagctttttcgtaaaataaaagcacagaacagatgtggtggtggtatggaattgtaattacaggtaggttgtgaccttcctttaaatttgttataactccagctaaaattaacaaagaatataaatgcaagtatgtttactccaatttttttaaagctcaacagagttaactacagctcagttacttttctagtccagtctggaacacaggggtatttggtattgagaaatagacctgagttctcaattaggtca

SEQ ID NO: 4190 - protein, 219 aa, Homo sapien
MESQEPTESSQNGKQYIISEELISEGKWVKLEKTTYMDPTGKTRTWESVNVPTRKEQTADGVAVIPVLQRTLHYECIVLVKQFRPPMGGYCIEFPAGLIDDGETPEAAALRELEEETGYKGDIAECSPAVCMDPGLSNCTIHIVTVTINGDDAENARPKPKPGDGEFVEVISLPKNDLLQRLDALVAEEHLTVDARVYSYALALKHANAKPFEVPFLKF

SEQ ID NO: 4191 - DNA, 1041 bp, Homo sapien; identical to SEQ ID NO: 3852

SEQ ID NO: 4192 - protein, 153 aa, Homo sapien; identical to SEQ ID NO: 3853

SEQ ID NO: 4193 - DNA, 1439 bp, Homo sapien
atcttcaagtatggggtctgctggcttgtcgcggctgcatgggcttttcgcggtctataagcccccggggctaaaatggaagcacctgcgggatacagtggagctacaacttctgaagggtctcaatgccaggaagcctcccgctcctaaacagcgtgttcgcttcttgctgggccccatggaaggcagcgaagagaaggagctgaccctcacagccaccagcgtaccctctttcatcaaccatccactggtatgtggaccagcattcgcccatctcaaggttggcgtgggacatcggttggatgcccaggcttctggagtacttgtgctcggcgtgggacatggatgcaggctcctcaccgatatgtacaatgctcatcttaccaaggattacacagtgcgtggcctcctgggcaaagctacagatgacttccgtgaggacgggaggctggtagagaagacaacctatgaccacgtgaccagagagaagctggaccgcattctggccgttatccaaggctcccatcagaaggccctggtgatgtactccaacctcgacctgaagacccaggaggcctatgagatggccgtgagaggcctgatccggcccatgaacaagtccccgatgctgataactggcatccgatgcctctactttgcacctccggaattcctcttagaggtgcagtgcatgcatgagacgcagaaagagctgcggaagttggttcatgaaatcggcctggaactaaagaccactgctgtctgcacccaagtgcggcgcacgcgcgacggcttcttcacgctagacagtgccctcctgaggacccagtgggacctaaccaacatccaggatgctatccgggctgctacccctcaggtagctgcagagctggagaagagcttgagcccggggctggacaccaagcagctccccagtccgggatggtcctgggactcccagggcccgagctctaccttggggctggagaggggtgcggggcagtgaatgcccaggcagctcctggggcagtggatggataaatagaagaactgctatgagctggacctgatagctgtgcagaaagtgagagcaggggcaccttttctacgtaagacacaaaactcaagctgtaacagaaaggtcaatggacttgacccaactgagaaggaaaaacttctgtatggaggaaaagacagtaaacatgacagactgatagaaagtattggcagaccaggcgtggtggcgggcacttgtaatcccagctactcccaaggctgaggcaggagaattgcttgagcccaggagtttaaggttgtagtgcgctagacggcgcctgtgaatagccactgcactctagtctggggaacatatgagacccctgccatctcaaaaaaaaaaaaattctcaataaactatgtgcccacgaaaattaaaaatt

SEQ ID NO: 4194 - protein, 331 aa, Homo sapien
MGSAGLSRLHGLFAVYKPPGLKWKHLRDTVELQLLKGLNARKPPAPKQRVRFLLGPMEGSEEKELTLTATSVPSFINHPLVCGPAFAHLKVGVGHRLDAQASGVLVLGVGHGCRLLTDMYNAHLTKDYTVRGLLGKATDDFREDGRLVEKTTYDHVTREKLDRILAVIQGSHQKALVMYSNLDLKTQEAYEMAVRGLIRPMNKSPMLITGIRCLYFAPPEFLLEVQCMHETQKELRKLVHEIGLELKTTAVCTQVRRTRDGFFTLDSALLRTQWDLTNIQDAIRAATPQVAAELEKSLSPGLDTKQLPSPGWSWDSQGPSSTLGLERGAGQ

SEQ ID NO: 4195 - DNA, 1635 bp, Homo sapien; identical to SEQ ID NO: 3807

SEQ ID NO: 4196 - protein, 445 aa, Homo sapien; identical to SEQ ID NO: 3808

SEQ ID NO: 4197 - DNA, 2814 bp, Homo sapien
gcggccgcggggccccggacaagggtccgcagagctgcagccttcgagggccagccctctccgagtccggggctgggtcccaccagtgacaaggcggcagccccgcgcacaccaaagagaaggcggctgtggcggcagcggcagccccagccatgctgtgttatgtgacgaggccggacgcggtgctgatggaggtggaggtggaggcgaaagccaacggcgaggactgcctcaaccaggcatatctttttcttgcacatcaaggaggccctcttggcaggccacctcttgtgttccccagagcaggcagtggaactcagtgccctcctggcccagaccaagtttggagactacaaccagaacactgccaagtataactatgaggagctctgtgccaaggagctctcctctgccaccttgaacagcattgttgcaaaacataaggagttggaggggaccagccaggcttcagctgaataccaattttgccagattgtgtcggcaatggaaaactatggcatagaatggcattctgtgcgggatagcgaagggcagaaactgctcattggggttggacctgaaggaatctcaatttgtaaagatgactttagcccaattaataggatagcttatcctgtggtgcagatggccacccagtcaggaaagaatgtatatttgacggtcaccaaggaatctgggaacagcatcgtgctcttgtttaaaatgatcagcaccagggcggccacgcggctctaccgagcgataacagagacgcacgcattctacaggtgtgacacagtgaccagcgccgtgatgatgcagtatagccgtgacttgaagggccacttggcatctctgtttctgaatgaaaacattaaccttgggccaagaaattatgtctttgatatttaaaagaacatcaaaggaggtgtatgaccatgccaggaggctctgtacaatgctggcgttgtggacctcgtttcaagaacaaccagagcccttcacactcgcctctgaagtcctcagaaagcagcatgaactgcagcagctgcgagggcctcagctgccagcagacccgggtgctgcaggagaagctacgcaagctgaaggaagccatgctgtgcatggtgtgctgcgaggaggagatcaactccaccttctgtccctgtggccacactgtgtgctgtgagagctgcgccgcccagctacagtcatgtcccgtctgcaggtcgcgtgtggagcatgtccagcacgtctatctgccaacgcacaccagtcttctcaatctgactgtaatctaatctgttgtgcttttgttggacttggcatgtttccatgaactgcactattataaactattaaaatgatagattgtggagaaagtaattattccaacacccatctgccatgcgatgttaaaaaaaaaaaaaaaggaagaaaaataacacagctactcctcactgcaaaaacatatccatgcgtagaatcaacaactccagtcatgggaccaggaggagctctgggacgcagacacattccttggatgttgattttttttatgatctagtaaaggaataggtaaagtctttgatgtcagtgaagtggcaacatagccaaaaagttgggtaccttttaggaaatgatgttgtaagtctccttaatgtatcctgaggtaagtttcctactggcagcagattttgtaagaattacttttaagaatttcattctttttgtatggtcatggagctccaaccatttttaataggaaagtcttttgtaaaattgttgtcgttttaatgtcatttctgtctttataacttgatcaagaatgattggaaggcaaacaggtttacaaatcaattctgtgacttttaaaaagttgacaatgttgtcagatttaaaccagtgtggctagtaaaaagcagctcactcaatgttgggtggctccctattcctttacgctccccctatccctaccccacaagcctttcgattataaaatactaccaatcttgttataagattactgtggagtagtcaagtactccccgggccttctgagctggtggaatattttatttcagactgaaaacagagagcactctccttgggaagggaaagcggcttgctgagtgagagatggagcctcatggtgtacaactgagggtagttaactcatcacttctcccaagcactcgatcccagcttcacccactggtgttgctttgcttgaactgttcaagccttttatagccttaccataagtatttagatatggtgtccttttctgtttttggggggggagttttgttgtgtttttttaaagtaagtgcttaagtattaactttgggttgtcccctctgtatgtttcgaaggggttttggttctttttgcttctgttttcttaaacatgttttccactcccacttgggcattttggaagctggtcagctagcaggttttctgggatgtcgggagacctagatgaccttatcgggtgcaatactagctaaggtaaagctagaaacctacactgtcactttactgagatttctgagtatacttttcatattgccttaatgtagcagtaatgtgtttatgcatttgtttctttgcacagacattttgtcaaatattaaaactctacttttttatggcacatattagcatataagcctttattccaagaggtatttattttttcacttgtaaaaaaataatgtttccacgtaaagaactctgttatatcctagaggactctgtcttttatattcgggataataaagactttaaagcaaaaaaaaaaaaaaaaaa

SEQ ID NO: 4198 - protein, 135 aa, Homo sapien [sequence omitted]

SEQ ID NO: 4199 - DNA, 3600 bp, Homo sapien
cacgaggggcttccgggcccggacgccatttccagcggttgctggttctgacgggttgtagtctgccaggacaatgagttatgactaccatcagaactggggccgtgatgggggtccccgcagctccggtgggggctatggaggggggccagcagggggtcatggaggtaaccgaggctccggaggaggcggcggcggcggagggggtggtcgaggcggcaggggccggcatcccgggcacctgaaaggccgcgaaatcggcatgtggtacgcgaaaaaacaggggcagaagaacaaggaagcggagaggcaagagagagctgtagtacacatggatgaacgacgagaagaacaaattgtacagttactgaattctgttcaagcgaagaatgataaagagtcagaagcacagatatcctggtttgctcctgaggatcatggatacggtactgaagtttctactaagaacacaccatgctcagagaacaaacttgacatccaggaaaagaagttgataaatcaagaaaaaaaaatgtttagaatcaggaacagatcatatattgaccgagattctgagtatctcttgcaagaaaatgaaccagatggaactttagaccaaaaattattggaagatttacaaaagaaaaaaaatgaccttcggtatattgaaatgcagcatttcagagaaaagctgccttcgtatggaatgcaaaaggaattggtaaatttaattgataaccatcaggtaacagtaataagtggtgaaactggttgtggcaaaaccactcaagttactcagttcattttggataactacattgaaagaggaaaaggatctgcttgcagaatagtttgtactcagccaagaagaattagtgccatttcagttgcggaaagagtagctgcagaaagggcagaatcttgtggcagtggtaatagtactggatatcaaattcgtctccagagtcggttgccaaggaaacagggttctatcttatactgtacaacaggaatcatccttcagtggctccagtcagacccgtatttgtccagtgttagtcatatcgtacttgatgaaatccatgaaagaaatctgcagtcagatgttttaatgactgttgttaaagaccttctcaattttcgatctgacttgaaagtaatattgatgagtgcaacattgaatgcagaaaagttttcagaatattttggtaactgtccaatgatacatatacctggttttacctttccggttgtggaatatcttttggaagatgtaattgaaaaaataaggtatgttccagaacaaaaagaacacagatgccagtttaagaggggtttcatgcaagggcatgtaaatagacaagaaaaagaagaaaaagaagcaatatataaagaacgttggccagattatgtaagggaactgcgaagaaggtattctgcaagtactgtagatgttatagaaatgatggaggatgataaagttgatctgaatttgattgttgccctcatccgatacattgttttggaagaagaggatggtgcgatactggtctttctgccaggctgggacaatatcagcactttacatgatctcttgatgtcacaagtaatgtttaaatcagataaatttttaattatacctttacattcactgatgcctacagttaaccagacacaggtgtttaaaagaacccctcctggtgttcggaaaatagtaattgctaccaacattgcggagactagcattaccatagatgatgtcgtttatgtgatagatggaggaaaaataaaagagacgcattttgatactcagaacaatatcagtacaatgtccgctgagtgggttagtaaagctaatgccaaacagagaaaaggtcgagctggaagagttcaacctggtcattgctatcatctgtataatggtcttagagcaagtcttctagatgactatcaactgccagaaattttgagaactcctttggaagaactttgtttacaaataaagattttaaggctaggtggaattgcttattttctgagtagattaatggacccaccatcaaatgaggcagtgttactctccataagacacctgatggagctgaacgctttggataaacaagaagaattgacacctcttggagtccacttggcacgattacccgttgagccacatattggaaaaatgattctttttggagcactgttctgctgcttagacccagtactcactattgctgctagtctcagtttcaaagatccatttgtcattccactgggaaaagaaaagattgcagatgcaagaagaaaggaattggcaaaggatactagaagtgatcacttaacagttgtgaatgcgtttgagggctgggaagaggctaggcgacgtggtttcagatacgaaaaggactattgctgggaatattttctgtcttcaaacacactgcagatgctgcataacatgaaaggacagtttgctgagcatcttcttggagctggatttgtaagcagtagaaatcctaaagatccagaatctaatataaattcagataatgagaagataattaaagctgtcatctgtgctggtttatatcccaaagttgctaaaattcgactaaatttgggtaaaaaaagaaaaatggtaaaagtttacacaaaaaccgatggcctggttgctgttcatcctaaatctgttaatgtggagcaaacagactttcactacaactggcttatctatcacctaaagatgagaacaagcagtatatacttgtatgactgcacagaggtttccccatactgtctcttgttttttggaggtgacatttccatccagaaggataacgatcaggaaactattgctgtagatgagtggattgtatttcagtctccagcaagaattgcccatcttgttaaggaattaagaaaggaactagatattcttctgcaagagaagattgaaagtcctcatcctgtagactggaatgacactaaatccagagactgtgcagtactgtcagctattatagacttgatcaaaacacaggaaaaggcaactcccaggaactttccgccacgattccaggatggatattacagctgacagcttttcaggggtggtctgaaaagccagtttgacagccattcttcatcattgtttaaattttggctggatgccaaaccctgggacatgaacaattttcatgtgtaaggtagaagccttcagtaggtagtaaagacttaatgtgcatgacttgatgttatatgtagagatatatatatatatatatataccataaaagcaatatgttctctgatcatatactctgctgtggtcatgcccactctttgggagtatattccctttatatatattgagtattgtaccacttgagaaattcctttgttctgttatacaaaattaatctttctgctcataatgattgatgataccaccagtaaaaataggatgtttaccccaaaacaagtgtcaattaagaatttgaacacaaccacattttttaaaatgaaacttctatcggaagtaaattaatttgttgtaataaagtccagtatttaataaaatgtacaatgttaaatctc

SEQ ID NO: 4200 - protein, 1008 aa, Homo sapien
MSYDYHQNWGRDGGPRSSGGGYGGGPAGGHGGNRGSGGGGGGGGGGRGGRGRHPGHLKGREIGMWYAKKQGQKNKEAERQERAVVHMDERREEQIVQLLNSVQAKNDKESEAQISWFAPEDHGYGTEVSTKNTPCSENKLDIQEKKLINQEKKMFRIRNRSYIDRDSEYLLQENEPDGTLDQKLLEDLQKKKNDLRYIEMQHFREKLPSYGMQKELVNLIDNHQVTVISGETGCGKTTQVTQFILDNYIERGKGSACRIVCTQPRRISAISVAERVAAERAESCGSGNSTGYQIRLQSRLPRKQGSILYCTTGIILQWLQSDPYLSSVSHIVLDEIHERNLQSDVLMTVVKDLLNFRSDLKVILMSATLNAEKFSEYFGNCPMIHIPGFTFPVVEYLLEDVIEKIRYVPEQKEHRCQFKRGFMQGHVNRQEKEEKEAIYKERWPDYVRELRRRYSASTVDVIEMMEDDKVDLNLIVALIRYIVLEEEDGAILVFLPGWDNISTLHDLLMSQVMFKSDKFLIIPLHSLMPTVNQTQVFKRTPPGVRKIVIATNIAETSITIDDVVYVIDGGKIKETHFDTQNNISTMSAEWVSKANAKQRKGRAGRVQPGHCYHLYNGLRASLLDDYQLPEILRTPLEELCLQIKILRLGGIAYFLSRLMDPPSNEAVLLSIRHLMELNALDKQEELTPLGVHLARLPVEPHIGKMILFGALFCCLDPVLTIAASLSFKDPFVIPLGKEKIADARRKELAKDTRSDHLTVVNAFEGWEEARRRGFRYEKDYCWEYFLSSNTLQMLHNMKGQFAEHLLGAGFVSSRNPKDPESNINSDNEKIIKAVICAGLYPKVAKIRLNLGKKRKMVKVYTKTDGLVAVHPKSVNVEQTDFHYNWLIYHLKMRTSSIYLYDCTEVSPYCLLFFGGDISIQKDNDQETIAVDEWIVFQSPARIAHLVKELRKELDILLQEKIESPHPVDWNDTKSRDCAVLSAIIDLIKTQEKATPRNFPPRFQDGYYS

SEQ ID NO: 4201 - DNA, 3600 bp, Homo sapien; identical to SEQ ID NO: 4199

SEQ ID NO: 4202 - protein, 1008 aa, Homo sapien; identical to SEQ ID NO: 4200

SEQ ID NO: 4203 - DNA, 1286 bp, Homo sapien
ggcacgaggctgccgcgctgtccgcgttatctcctcccggtgagaacgaaccgcagtgtccaccggcgaggagccagccctgtcccggtcagagaaagacgacgaggatacctgggagcgggcggcggccgggctgggccgcgccggtgcgggctggcgactctgctcctccgcttgctgctgtctctgggaactgggtgccagcgctgaggggcttccagcggacagggacccccttccccggctcccctgcccaccctgccggggagggcggaagatgccggtgaagaagaagagaaaatcccctggggtggcagcagcagtagcggaagacggaggcctcaaaaagtgtaaaatctccagctattgcagatcccaaccccctgctagactaataagtggagaggaacatttttcaagcaagaagtgcctggcttggttttatgaatatgcaggtcctgatgaagttgtagggccagaaggaatggaaaaattttgtgaagacattggtgttgaacctgaaaatattattatgttagttttagcgtggaaattggaggctgaaagcatgggattttttaccaaggaagaatggttaaagggaatgacttcattacagtgtgactgcacagaaaagttacaaaacaaatttgactttttgcgctcacagttgaatgatatttcgtcatttaagaatatctacagatatgcctttgattttgcaagggataaagatcagagaagccttgatattgatactgctaaatctatgttagctcttctgcttgggaggacatggccactgttttcagtattttaccagtacctggagcaatcaaagtatcgtgttatgaacaaagatcaatggtacaatgtattagaattcagcagaacagtccatgctgatcttagtaactatgatgaagatggtgcttggcctgttcttcttgatgaatttgttgagtggcaaaaagtccgtcagacatcatagcaagaactatgtgaagaaaatgcaaacctttcaattcccacgtgtatacaagctaatgtgatgagggggaaaaaaatccaacgggtgcattttcattcatatgaaagacttctcatagtacttttttttcctttttttaaaggaggtttttcttgttacatgtgatgggcattgagccacacctcttcttagactgaatattgaagtttttgttttgagttatgtttataacatttatttcagaacaataaagattcagatttgtgaaaaaaaaaaaaaaaaaaaaaaaaaaaaa

SEQ ID NO: 4204 - protein, 237 aa, Homo sapien
MPVKKKRKSPGVAAAVAEDGGLKKCKISSYCRSQPPARLISGEEHFSSKKCLAWFYEYAGPDEVVGPEGMEKFCEDIGVEPENIIMLVLAWKLEAESMGFFTKEEWLKGMTSLQCDCTEKLQNKFDFLRSQLNDISSFKNIYRYAFDFARDKDQRSLDIDTAKSMLALLLGRTWPLFSVFYQYLEQSKYRVMNKDQWYNVLEFSRTVHADLSNYDEDGAWPVLLDEFVEWQKVRQTS

SEQ ID NO: 4205 - DNA, 903 bp, Homo sapien
tagtcacgctcggtaccaggcgcagatcatggcaggcagccggctggaaaccgtagggagcatcttctctcggactcgggacctggttcgggccggggtgctgaaggagaagcccctgtggtttgacgtatatgacgcctttcccccgctgagggagcccgtcttccaaaggcctcgagtgcgatatggcaaagccaaagctcccatccaagacatctggtaccacgaggatcggattagagcgaagttttattcagtgtatgggtctggtcaaagagcttttgatctattcaatccaaacttcaagtctacctgtcaacggtttgtggagaagtacactgagctacagaaacttggagaaacagatgaagagaagttatttgtggaaacagggaaggctttattggcagaaggtgtcattttaagacgagtaggcgaagcaaggactcaacacggaggtagtcacgtttcccggaaatccgaacacttgagtgtcagaccacagactgcgttggaagaaaacgagactcagaaagaagttccacaggaccagcatttggaggcacctgcagaccagtcgaaaggtctcttgcctccctgaaggacctgtatactgtgtatgctggcattcacactctactcactggctgaatgttgagctatttttaaacagttgaactgtgtaaatgtttcttgatctctaaggtattatgtttgccttctcttagttatttctgggttgtcacaaagctcagtatcatggtttgacagaagcagttatgtgaacttttatgttaggacattactaaataaagaattccctagctgcttataaagtaaatttactttgaattgtaaataacatgaagaaacctttataaagattgttcaaatgggactcaa

SEQ ID NO: 4206 - protein, 190 aa, Homo sapien
MAGSRLETVGSIFSRTRDLVRAGVLKEKPLWFDVYDAFPPLREPVFQRPRVRYGKAKAPIQDIWYHEDRIRAKFYSVYGSGQRAFDLFNPNFKSTCQRFVEKYTELQKLGETDEEKLFVETGKALLAEGVILRRVGEARTQHGGSHVSRKSEHLSVRPQTALEENETQKEVPQDQHLEAPADQSKGLLPP

SEQ ID NO: 4207 - DNA, 937 bp, Homo sapien
acggcgcccgccaggagcgccccccactcccaggccagcccaccccggcggaccgggccccgcgcgcccaggcgaggcactgggctccctctgctccccgtgggccgctccccgcgtggggccactgcccccggcccccgccatggtgcggatttcaaagcccaagacgtttcaggcctacttggatgattgtcaccggaggtatagctgtgcccactgccgcgctcacctggccaaccacgacgacctcatctccaagtccttccagggcagtcaggggcgtgcctacctcttcaactcagtggtgaacgtgggctgcgggccagccgaggagcgggtgctgctgaccggcctccatgctgtcgccgacatccactgcgagaactgcaagaccactttgggctggaaatatgaacaggcctttgagagcagccagaagtacaaagaggggaagtacatcattgaactcaaccacatgatcaaagacaacggctgggactgacccccgctcccccgacgcatgtggctccagcccggcctggccgccagggagcgccactggcttcccgccacccgaagggagctctggaccctcagagcccctgcagaggacggatctagctcctgtatatatattttattgcatgcactgtgaccttggggggagaacagaagggggacgacgcccccgcacctcctgcgatctggctggcttggatctcgtttttaacccgttcctgccccacctgccctatagttatggcctgtgttctgctctcctggtcccagtgcaccgtctgctctgtgaactcctcccaccaggcccttcttaccccacgcgtgtctgtccccctcgttctgtagcgtttgtacataataaaacaatggagtggagacaaaaaaaaaaaaaaaaaaaaaaaaaaaaaaaaaaaaaaaa

SEQ ID NO: 4208 - protein, 119 aa, Homo sapien
MVRISKPKTFQAYLDDCHRRYSCAHCRAHLANHDDLISKSFQGSQGRAYLFNSVVNVGCGPAEERVLLTGLHAVADIHCENCKTTLGWKYEQAFESSQKYKEGKYIIELNHMIKDNGWD

SEQ ID NO: 4209 - DNA, 1343 bp, Homo sapien
agaagggaaggtagacatcaggttctccctggagacttttcgttttcatttacgctgcggaaactgacgtttttgcctaacaccccatgtaatgtaaacgtataggcttgagtacgtgtccggccgcatgtgtagtgaaccctaaagctttcctaattgtagttagcatcgtccctaagcggaacgattttccgtgaacatgatttgtacttttctacgagccgtacagtatacggagaagctgcacaggtcctcggcaaagcgattgcttttgccatacatcgtgcttaacaaagcgtacttgaagactgagcccagtttgagatgtgggcttcaatatcaaaagaaaacgctgcgacctagatgtattcttggagtcacccagaaaaccatctggacgcagggaccgagcccccgaaaagcaaaggaggatggcagcaaacaagtgtctgtgcacaggagtcagagagggggaaccgccgtcccaacatcacaaaaagtgaaagaagccggaagagattttacctatttaatagtggtgctttttggaatcagcattacaggtggcttgttttacacgattttcaaagaacttttttcttcatccagtcctagcaagatatatgggagagccttagaaaaatgcagatcacatcctgaggtgatcggtgtctttggtgagtctgttaaaggctatggggaggtgacaaggcggggtcgccggcagcatgtcaggttcactgaatatgtaaaagatgggctgaaacacacgtgtgtgaaattctacattgagggctctgagccagggaagcaaggaacggtgtatgcgcaagtgaaagagaacccaggaagtggtgaatatgattttcgatatatatttgtagaaattgaatcttatcctagaagaactattatcattgaagataatcgatcccaagatgattaataatcaagcaagcaggtttctgatggatgttgaatggcgtggactcgctactccgttcttcacagctgccttccagaatgtgttcaaaagaaagacaagaaggagtgtatggcttataaagtgaatctaatacagtatttgttgcatttaaacaaactagacattttcttacggaaaaattatgaaatacagcatattttatgttctcccattgactcaatcatgacaatatttctgctttaacaccatctttcgtgattagaaatgtttgttattggaaatgttacaccatgtaaataaaggaaatagattttagtattgtattcattttatattatagaactgcataatgtctgcagaataaaattaaaactaacaaataaaaaaaaaaaaaaaa

SEQ ID NO: 4210 - protein, 248 aa, Homo sapien
MICTFLRAVQYTEKLHRSSAKRLLLPYIVLNKAYLKTEPSLRCGLQYQKKTLRPRCILGVTQKTIWTQGPSPRKAKEDGSKQVSVHRSQRGGTAVPTSQKVKEAGRDFTYLIVVLFGISITGGLFYTIFKELFSSSSPSKIYGRALEKCRSHPEVIGVFGESVKGYGEVTRRGRRQHVRFTEYVKDGLKHTCVKFYIEGSEPGKQGTVYAQVKENPGSGEYDFRYIFVEIESYPRRTIIIEDNRSQDD

SEQ ID NO: 4211 - DNA, 1215 bp, Homo sapien; identical to SEQ ID NO: 3850

SEQ ID NO: 4212 - protein, 190 aa, Homo sapien; identical to SEQ ID NO: 3851

SEQ ID NO: 4213 - DNA, 4935 bp, Homo sapien
aattcgggaacgtgcctgcgcgtgcttggatagttcatttaaagcccccatccctgcaaggtggtgctttctaccaatatgaatcttttcaacctggaccgttttcgctttgagaaaaggaataagattgaggaagcgcccgaagcaacccctcaaccttcccagcctggcccttcttcaccaatttctcttagtgctgaagaggagaatgctgaaggggaagttagcagggcaaacactcctgattcagatataactgaaaaaacagaagattctagtgttccagaaactccagataatgaaagaaaagcaagtatatcatatttcaaaaatcaaagaggaatacagtatattgatttgtcttctgatagtgaagatgtcgtttccccaaattgctccaatacagttcaagagaaaacattcaacaaagatacagtgattatagtttctgagccatctgaagatgaagagtcccaaggccttcctaccatggcacgtagaaatgatgatatttcagaactggaagacctttcggaattggaagaccttaaagatgctaaacttcagactttgaaggaactttttccacaaagaagtgacaatgatttacttaagttgattgaatcaacaagcactatggatggagcaattgctgctgccttgctgatgtttggtgatgcaggtggtgggcccaggaaaagaaaattatcttcttcttcagagccatatgaggaagatgaatttaatgatgatcaatctataaaaaagacaagactggatcatggagaggaatcaaatgagtctgcagaatctagcagtaattgggaaaagcaggaaagtattgtactgaaattgcaaaaggaatttcccaattttgataaacaggaacttagagaagtactcaaggaacatgaatggatgtacacagaagctttagaatctctaaaagtgtttgcagaagaccaagatatgcaatatgcatcacaaagtgaggttccaaatggaaaagaagtttcttcaagaagtcaaaattaccctaaaaatgcaactaaaacaaaactaaaacagaaattttcaatgaaagcacaaaatggctttaacaagaaacgtaaaaaaaatgtttttaatccaaagagagttgttgaagactctgaatatgattcaggttctgatgtcggtagttcactagatgaggactatagtagtggtgaagaagtgatggaggatggctataaaggtaaaattcttcacttccttcaagatgcttcaattggtgaacttactttgattcctcagtgttctcagaaaaaggctcagaagataacagaactccggccctttaatagttgggaggctctgttcacaaagatgtccaaaactaatggcttatcagaagatttgatatggcactgtaaaacactgatccaagaaagagatgtagttataaggcttatgaacaaatgtgaagacatttcaaataaattgaccaaacaagttaccatgcttactggaaatggaggtggatggaacatagaacaaccttccattctaaaccaaagtttgtcactcaagccctatcagaaggttggtttgaattggctggcattggtacataaacatggacttaatggcattttggcagatgaaatgggcctaggaaaaactattcaagccattgcatttctggcatacctctatcaggagggtaataatggtcctcatttgatcgttgttccagcttcaactatagataactggttaagggaagttaatttatggtgccctactttgaaggtcctctgttactatggttctcaagaagaacgtaaacaaattagatttaacattcatagtagatatgaagattacaatgtaattgtgaccacatataactgtgcgatcagcagttctgatgatcgtagtctgtttcgacggctgaaacttaattacgcaatttttgatgagggccatatgctgaagaatatgggctccattcgctaccagcaccttatgacaattaatgcaaataaccgtttgctgctcacaggcacacctgtacagaacaatctgttagaactcatgtcgctgttgaattttgttatgccacacatgtttagtagtagcaccagtgaaatacgaagaatgttttcctctaagacaaaatcagcagatgagcaaagcatatatgaaaaggagagaatagcacatgcaaaacaaattataaagccatttattctcagaagagtaaaagaagaggttctcaagcagttaccccccaagaaagatcgaattgagttgtgtgcaatgtcggagaagcaggagcaactctatttgggtcttttcaacagattgaaaaaatctatcaataacttggaaaaaaacacagaaatgtgcaatgtcatgatgcagttgaggaaaatggccaatcatcctttattacatcgccaatattacacagctgaaaaactcaaggaaatgtctcagcttatgctaaaggaacctacacattgtgaggctaaccctgacctgatctttgaagatatggaagttatgacagacttcgaactacatgtactttgtaaacagtaccgacacattaataactttcagttagacatggacttgattttagattctggaaaatttcgagttttaggatgcatcttgtctgaattgaaacagaagggtgatagagttgtgttatttagccaatttaccatgatgctggatatcttagaggttctattaaaacatcatcagcataggtacctcagattagatggaaagactcagatttctgaaaggattcatctaattgatgagtttaataccgatatggatatctttgtgtttctgctatcaacaaaagctggtggattaggaataaatctgacttcagcaaatgttgttatacttcacgatattgactgtaatccttataatgacaaacaagcagaagatagatgccatagagtaggccagactaaagaagtactagttataaaactaataagccaagggacgattgaagaatccatgctaaaaattaaccaacagaaattgaaactagaacaggatatgactacagtagatgaaggtgatgaagggagtatgccagcagatatagccacattactaaaaacatcaatgggcctgtgaaataagaactgtgaactctcaattgatgaggaaatatcaactttggtgcactcaaggacatttacatttatgatgaccatgggggtttatgaacatttataactttttataatttccatattacatttctcatagtatggacaactttttgccactaactgaattcttcaaatactcacacgtgaaatttcaaaaaagaagccacaaatatgtagttctgaagatgttgaataatcattttacaaagcagttttctgaatggggattagttggtgattgtttgtaacaaatatgctaatgctttagaaatgtcagtatttttgtaattatttctacctccaaatatatatatattgtctttcactggataatgtgtgtagatttttacatgtgccttatttgacaatgcttatgtcttgtttttgcttgtctcatttgaagttcttttttattatgttaaagaatgcagctgtatagattatatagctttcattttattgctatttgaagcagatgttcaccaatgtcagcaagaactcaacctgaatttaaaggtggcattccatatactaacatcccccaggtcctctcaagtacttctgctgaaacaaatttatttggctaggcactaagttgttttccagtgaatagtaactaaagaagcccctaccttgctccatggattaattccttctgttcattttccaactgcactaattgtgcatattactctgcctaatcttgtgcatgttttcattgatttccctctcccggcttttgcttctcttgaaactgttgcccagtcacttctgctccaattctcttcctctctaaatagtagtttaattactgccacatctccatgcatcagcaaaatgttggtgacatttttctagcctggcagaacagattacttaaagctatttcacttcaaagcagactgaatgtgacttcatctaaaggcagcattaggtactgcatggaaataggtcattaacttgaaactcttatcaaaatatattttaccagtttccagaatttccagtacaggaccgcctgaagagagagccattgttcaattccaattcagtgtgagtgacaaagtgaaatttagaagtgaagttgtctatttgatatttaacccttattaaatctttctttaaatttctgcctgtcagtctatattgctgtttttattatacatcagtttctttgaataacttgtgagttcccatgtgttttgtttttattatgtaaatatcattataaataaacttatttataaatcaaagatttgttaatttttggaaatcatgcttttcaaagcatcctaacttgctaagatgctaggtagtacgaccctctggatttggaaggcaaataaaactcttacagtgattatttagatattaaagactgagaactcacggcttaaccccagtcttgatggtatattgaacagactgaatatattttaccattacagggctaaaaggagtcttcgtgtgttaatactacctccttgtacatcactatacccaaatcagttattcaaattgttaggaattttaccttttaaaatctcataatggatatctcatgttttctgtattaatgtattttcaatgataggctgtttctttttttgttgttattgttgttgttgttatatccatacttttatctctaatgaaatgtagttgggttcttcctgtaatgcgctattatgtcttgggcttaataaaaatatttgtgatcataaaaaaaaaaaaaaaa

SEQ ID NO: 4214 - protein, 1026 aa, Homo sapien
MNLFNLDRFRFEKRNKIEEAPEATPQPSQPGPSSPISLSAEEENAEGEVSRANTPDSDITEKTEDSSVPETPDNERKASISYFKNQRGIQYIDLSSDSEDVVSPNCSNTVQEKTFNKDTVIIVSEPSEDEESQGLPTMARRNDDISELEDLSELEDLKDAKLQTLKELFPQRSDNDLLKLIESTSTMDGAIAAALLMFGDAGGGPRKRKLSSSSEPYEEDEFNDDQSIKKTRLDHGEESNESAESSSNWEKQESIVLKLQKEFPNFDKQELREVLKEHEWMYTEALESLKVFAEDQDMQYASQSEVPNGKEVSSRSQNYPKNATKTKLKQKFSMKAQNGFNKKRKKNVFNPKRVVEDSEYDSGSDVGSSLDEDYSSGEEVMEDGYKGKILHFLQDASIGELTLIPQCSQKKAQKITELRPFNSWEALFTKMSKTNGLSEDLIWHCKTLIQERDVVIRLMNKCEDISNKLTKQVTMLTGNGGGWNIEQPSILNQSLSLKPYQKVGLNWLALVHKHGLNGILADEMGLGKTIQAIAFLAYLYQEGNNGPHLIVVPASTIDNWLREVNLWCPTLKVLCYYGSQEERKQIRFNIHSRYEDYNVIVTTYNCAISSSDDRSLFRRLKLNYAIFDEGHMLKNMGSIRYQHLMTINANNRLLLTGTPVQNNLLELMSLLNFVMPHMFSSSTSEIRRMFSSKTKSADEQSIYEKERIAHAKQIIKPFILRRVKEEVLKQLPPKKDRIELCAMSEKQEQLYLGLFNRLKKSINNLEKNTEMCNVMMQLRKMANHPLLHRQYYTAEKLKEMSQLMLKEPTHCEANPDLIFEDMEVMTDFELHVLCKQYRHINNFQLDMDLILDSGKFRVLGCILSELKQKGDRVVLFSQFTMMLDILEVLLKHHQHRYLRLDGKTQISERIHLIDEFNTDMDIFVFLLSTKAGGLGINLTSANVVILHDIDCNPYNDKQAEDRCHRVGQTKEVLVIKLISQGTIEESMLKINQQKLKLEQDMTTVDEGDEGSMPADIATLLKTSMGL

SEQ ID NO: 4215 - DNA, 1545 bp, Homo sapien
ggcacgagggctgcctggcgctgcgggcggcgggccatggtggtttggattgagccgggcccggccggggcgccgagtcggagggggtggcagtgagcggcggcagaggctacggggctcggtttggctgactggggagtcggcaggcggcaggaaccatgcgaggccagcggagcctgctgctgggcccggcccgcctctgcctccgcctccttctgctgctgggttacaggcgccgctgtccacctctactccggggtctagtacagcgctggcgctacggcaaggtctgcctgcgctccctgctctacaactcctttgggggcagtgacaccgctgttgatgctgcctttgagcctgtctactggctggtagacaacgtgatccgctggtttggagtgggcaggaatgatatcgccaccgtctccatctgtaagaagtgcatttaccccaagccagcccgaacacaccactgcagcatctgcaacaggtgtgtgctgaagatggatcaccactgcccctggctaaacaattgtgtgggccactataaccatcggtacttcttctctttctgctttttcatgactctgggctgtgtctactgcagctatggaagttgggaccttttccgggaggcttatgctgccattgagacttatcaccagaccccaccacccaccttctcctttcgagaaaggatgactcacaagagtcttgtctacctctggttcctgtgcagttctgtggcacttgccctgggtgccctaactgtatggcatgctgttctcatcagtcgaggtgagactagcatcgaaaggcacatcaacaagaaggagagacgtcggctacaggccaagggcagagtatttaggaatccttacaactacggctgcttggacaactggaaggtattcctgggtgtggatacaggaaggcactggcttactcgggtgctcttaccttctagtcacttgccccatgggaatggaatgagctgggagccccctccctgggtgactgctcactcagcctctgtgatggcagtgtgagctggactgtgtcagccacgactcgagcactcattctgctccctatgttatttcaagggcctccaagggcagcttttctcagaatccttgatcaaaaagagccagtgggcctgccttagggtaccatgcaggacaattcaaggaccagcctttttaccactgcagaagaaagacacaatgtggagaaatcttaggactgacatccctttactcaggcaaacagaagttccaaccccagactaggggtcaggcagctagctacctaccttgcccagtgctgacccggacctcctccaggatacagcactggagttggccaccacctcttctacttgctgtctgaaaaaacacctgactagtacagctgagatcttggcttctcaacagggcaaagataccaggcctgctgctgaggtcactgccacttctcacatgctgcttaagggagcacaaataaaggtattcgatttttaaagataaaaaaaaaaaaaaaaaa

SEQ ID NO: 4216 - protein, 296 aa, Homo sapien
MRGQRSLLLGPARLCLRLLLLLGYRRRCPPLLRGLVQRWRYGKVCLRSLLYNSFGGSDTAVDAAFEPVYWLVDNVIRWFGVGRNDIATVSICKKCIYPKPARTHHCSICNRCVLKMDHHCPWLNNCVGHYNHRYFFSFCFFMTLGCVYCSYGSWDLFREAYAAIETYHQTPPPTFSFRERMTHKSLVYLWFLCSSVALALGALTVWHAVLISRGETSIERHINKKERRRLQAKGRVFRNPYNYGCLDNWKVFLGVDTGRHWLTRVLLPSSHLPHGNGMSWEPPPWVTAHSASVMAV

SEQ ID NO: 4217 - DNA, 2068 bp, Homo sapien; identical to SEQ ID NO: 3872

SEQ ID NO: 4218 - protein, 513 aa, Homo sapien; identical to SEQ ID NO: 3873

SEQ ID NO: 4219 - DNA, 3243 bp, Homo sapien
gggcttcgtgttcctgggtgctgaccgtgcactccccgccgcccgaggacttagagctctggaagtagctctccagcttccttcgtactcgggggccggacttgtacacccgcacgaggagcggggacggcgggcgcagaagtgggccaccatatctggaaactacagtctatgctttgaagcgcaaaagggaataaacatttaaagactcccccggggacctggaggatggacttttccatggtggccggagcagcagcttacaatgaaaaatcaggtaggattacctcgctctcactcttgtttcagaaagtctttgctcagatctttcctcagtggagaaaggggaatacagaagaatgtctcccctacaagtgctcagagactggtgctcttggagaaaactatagttggcaaattcccattaaccacaatgacttcaaaattttaaaaaataatgagcgtcagctgtgtgaagtcctccagaataagtttggctgtatctctaccctggtctctccagttcaggaaggcaacagcaaatctctgcaagtgttcagaaaaatgctgactcctaggatagagttatcagtctggaaagatgacctcaccacacatgctgttgatgctgtggtgaatgcagccaatgaagatcttctgcatgggggaggcctggccctggccctggtaaaagctggtggatttgaaatccaagaagagagcaaacagtttgttgccagatatggtaaagtgtcagctggtgagatagctgtcacgggagcagggaggcttccctgcaaacagatcatccatgctgttgggcctcggtggatggaatgggataaacagggatgtactggaaagctgcagagggccattgtaagtattctgaattatgtcatctataaaaatactcacattaagacagtagcaattccagccttgagctctgggatttttcagttccctctgaatttgtgtacaaagactattgtagagactatccgggttagtttgcaagggaagccaatgatgagtaatttgaaagaaattcacctggtgagcaatgaggaccctactgttgctgcctttaaagctgcttcagaattcatcctagggaagagtgagctgggacaagaaaccaccccttctttcaatgcaatggtcgtgaacaacctgaccctccagattgtccagggccacattgaatggcagacggcagatgtaattgttaattctgtaaacccacatgatattacagttggacctgtggcaaagtcaattctacaacaagcaggagttgaaatgaaatcggaatttcttgccacaaaggctaaacagtttcaacggtcccagttggtactggtcacaaaaggatttaacttgttctgtaaatatatataccatgtactgtggcattcagaatttcctaaacctcagatattaaaacatgcaatgaaggagtgtttggaaaaatgcattgagcaaaatataacttccatttcctttcctgcccttgggactggaaacatggaaataaagaaggaaacagcagcagagattttgtttgatgaagttttaacatttgccaaagaccatgtaaaacaccagttaactgtaaaatttgtgatctttccaacagatttggagatatataaggctttcagttctgaaatggcaaagaggtccaagatgctgagtttgaacaattacagtgtcccccagtcaaccagagaggagaaaagagaaaatgggcttgaagctagatctcctgccatcaatctgatgggattcaacgtggaagagatgtgtgaggcccacgcatggatccaaagaatcctgagtctccagaaccaccacatcattgagaataatcatattctgtaccttgggagaaaggaacatgacattttgtctcagcttcagaaaacttcaagtgtctccatcacagaaattatcagcccaggaaggacagagttagagattgaaggagcccgggctgacctcattgaggtggttatgaacattgaagatatgctttgtaaagtacaggaggaaatggcaaggaaaaaggagcgaggcctttggcgctcgttaggacagtggactattcagcaacaaaaaacccaagacgaaatgaaagaaaatatcatatttctgaaatgtcctgtgcctccaactcaagagcttctagatcaaaagaaacagtttgaaaaatgtggtttgcaggttctaaaggtggagaagatagacaatgaggtccttatggctgcctttcaaagaaagaagaaaatgatggaagaaaaactgcacaggcaacctgtgagccataggctgtttcagcaagtcccataccagttctgcaatgtggtatgcagagttggctttcaaagaatgtactcgacaccttgcgatccaaaatacggagctggcatatacttcaccaagaacctcaaaaacctggcagagaaggccaagaaaatctctgctgcagataagctgatctatgtgtttgaggctgaagtactcacaggcttcttctgccagggacatccgttaaatattgttcccccaccactgagtcctggagctatagatggtcatgacagtgtggttgacaatgtctccagccctgaaacctttgttatttttagtggcatgcaggctatacctcagtatttgtggacatgcacccaggaatatgtacagtcacaagattactcatcaggaccaatgagaccctttgcacagcatccttggaggggattcgcaagtggcagccctgttgattaatctctacatcattttaacagctggtatggccttaccttgggtgaactaaccaaataatgaccatcgatggctcaaagagtggcttgaatatatcccatgggttatctgtatggactgactgggttattgaaaggactagccacatactagcatcttagtgcctttatctgtctttatgtcttggggttggggtaggtagataccaaatgaaacactttcaggaccttccttcctcttgcagttgttctttaatctcctttactagaggagataaatattttgcatataatgaagaaatttttctagtatataacgcaggccttttattttctaaaatgatgatagtataaaaatgttaggataacagaatgattttagattttccagagaatattataaagtgctttaggtatgaaaataaatcatctttgtctgattaaaaaaaaaaaa

SEQ ID NO: 4220 - protein, 854 aa, Homo sapien
MDFSMVAGAAAYNEKSGRITSLSLLFQKVFAQIFPQWRKGNTEECLPYKCSETGALGENYSWQIPINHNDFKILKNNERQLCEVLQNKFGCISTLVSPVQEGNSKSLQVFRKMLTPRIELSVWKDDLTTHAVDAVVNAANEDLLHGGGLALALVKAGGFEIQEESKQFVARYGKVSAGEIAVTGAGRLPCKQIIHAVGPRWMEWDKQGCTGKLQRAIVSILNYVIYKNTHIKTVAIPALSSGIFQFPLNLCTKTIVETIRVSLQGKPMMSNLKEIHLVSNEDPTVAAFKAASEFILGKSELGQETTPSFNAMVVNNLTLQIVQGHIEWQTADVIVNSVNPHDITVGPVAKSILQQAGVEMKSEFLATKAKQFQRSQLVLVTKGFNLFCKYIYHVLWHSEFPKPQILKHAMKECLEKCIEQNITSISFPALGTGNMEIKKETAAEILFDEVLTFAKDHVKHQLTVKFVIFPTDLEIYKAFSSEMAKRSKMLSLNNYSVPQSTREEKRENGLEARSPAINLMGFNVEEMCEAHAWIQRILSLQNHHIIENNHILYLGRKEHDILSQLQKTSSVSITEIISPGRTELEIEGARADLIEVVMNIEDMLCKVQEEMARKKERGLWRSLGQWTIQQQKTQDEMKENIIFLKCPVPPTQELLDQKKQFEKCGLQVLKVEKIDNEVLMAAFQRKKKMMEEKLHRQPVSHRLFQQVPYQFCNVVCRVGFQRMYSTPCDPKYGAGIYFTKNLKNLAEKAKKISAADKLIYVFEAEVLTGFFCQGHPLNIVPPPLSPGAIDGHDSVVDNVSSPETFVIFSGMQAIPQYLWTCTQEYVQSQDYSSGPMRPFAQHPWRGFASGSPVD

SEQ ID NO: 4221 - DNA, 1719 bp, Homo sapien
gtctccgaggctcatggcgatgctggtcctagtacccggacgagttatgcggcctctgggtggccaactttggcgcttcttgcctcgcggactcgagttttggggcccagccgaggggactgcgagagtcttgctgaggcagttctgcgcgcggcaagcggaggcgtggcgtgcctcggggcgccctggctattgcctgggaacccggcccctcagcactgcgaggccgccacccccgtggtcgcagaagggccccggagactccacgcgcccctcgaagcccgggcctgtttcctggaagtctttagcaatcacatttgctattggaggagctttactggctggaatgaagcacgtcaagaaagaaaaggcagagaagttagagaaggaacggcagcgacacatcggcaagcctttacttgggggaccgttttccctcacaactcatactggggagcgtaaaactgacaaggactacttgggtcagtggttattgatttattttggcttcactcattgccctgatgtctgtccagaagaactagaaaagatgattcaagtcgtggatgaaatagatagcattacaactctgccagatctaactccacttttcatcagcattgacccagagagggacacaaaagaagccatcgcaaattatgtgaaagaattttctcccaaactggttggcttgactggcacgagagaagaggtcgatcaagtggccagagcatacagagtgtattacagccctggccccaaggacgaagatgaagactacatagtggatcacacaataataatgtacttgattggaccagatggtgagtttctagattattttggccagaacaagaggaagggagaaatagctgcttcaattgccacacacatgaggccatacagaaaaaagagctagccaaagcagtgttgctggatgcagtattctcttgctaagaggaaggaaactgtctcgcataggagcctatataaatataaacatatatacgtgcactctacagaatggccttcataccatgagaacatttctgttttggatggggatgttacccttgcgttcaaccaaaattgattcttggaactgtaaagattacaacccaaagtctcccaggaagctgtggggagaccagaggatcaagctgaagtgaagccagtgaagagcccacctgtggaaggacatggcggggcgaggcacagccagtgcattcctgcctgcgaacaggccctcccagcagctttgccgcctctccatcgtcttgggcccttgctcaaatagctgtgggactgaatttcacagaaaagaatataatttccatagtgctcttgcttgcctcttcttgagttctttgctcttctgagttcttggtggctaataacagtcagattagggtctctgccattcagagttgatgcttgaaaactttagttttccttattaatgaatatcactatcagatttgactaatgaagaggaaatctattgtttgggggaaaaaaaacatcagtttgatttctctaggggttcttttatgtgatttttagctaagtggtgtgccaggttttcagtgacataccaaatggaaataagaggatattgatcacgagtgtgatgctgagtacctttctgcatatactggattgtactttgtgtaaagtaaacatactcagttttgctgttcaaaaaaaaaaaaaaaaaaa

SEQ ID NO: 4222 - protein, 301 aa, Homo sapien
MAMLVLVPGRVMRPLGGQLWRFLPRGLEFWGPAEGTARVLLRQFCARQAEAWRASGRPGYCLGTRPLSTARPPPPWSQKGPGDSTRPSKPGPVSWKSLAITFAIGGALLAGMKHVKKEKAEKLEKERQRHIGKPLLGGPFSLTTHTGERKTDKDYLGQWLLIYFGFTHCPDVCPEELEKMIQVVDEIDSITTLPDLTPLFISIDPERDTKEAIANYVKEFSPKLVGLTGTREEVDQVARAYRVYYSPGPKDEDEDYIVDHTIIMYLIGPDGEFLDYFGQNKRKGEIAASIATHMRPYRKKS

SEQ ID NO: 4223 - DNA, 3492 bp, Homo sapien; identical to SEQ ID NO: 3966

SEQ ID NO: 4224 - protein, 360 aa, Homo sapien; identical to SEQ ID NO: 3967

SEQ ID NO: 4225 - DNA, 928 bp, Homo sapien
gcgcgcagcgctggtaccccgttggtccgcgcgttgctgcgttgtgaggggtgtcagctcagtgcatcccaggcagctcttagtgtggagcagtgaactgtgtgtggttccttctacttggggatcatgcagagagcttcacgtctgaagagagagctgcacatgttagccacagagccacccccaggcatcacatgttggcaagataaagaccaaatggatgacctgcgagctcaaatattaggtggagccaacacaccttatgagaaaggtgtttttaagctagaagttatcattcctgagaggtacccatttgaacctcctcagatccgatttctcactccaatttatcatccaaacattgattctgctggaaggatttgtctggatgttctcaaattgccaccaaaaggtgcttggagaccatccctcaacatcgcaactgtgttgacctctattcagctgctcatgtcagaacccaaccctgatgacccgctcatggctgacatatcctcagaatttaaatataataagccagccttcctcaagaatgccagacagtggacagagaagcatgcaagacagaaacaaaaggctgatgaggaagagatgcttgataatctaccagaggctggtgactccagagtacacaactcaacacagaaaaggaaggccagtcagctagtaggcatagaaaagaaatttcatcctgatgtttaggggacttgtcctggttcatcttagttaatgtgttctttgccaaggtgatctaagttgcctaccttgaatttttttttaaatatatttgatgacataatttttgtgtagtttatttatcttgtacatatgtattttgaaatcttttaaacctgaaaaataaatagtcatttaatgttgaaaaaaaaaaaaaaaaaaaaaaaaaaaaaaa

SEQ ID NO: 4226 - protein, 197 aa, Homo sapien
MQRASRLKRELHMLATEPPPGITCWQDKDQMDDLRAQILGGANTPYEKGVFKLEVIIPERYPFEPPQIRFLTPIYHPNIDSAGRICLDVLKLPPKGAWRPSLNIATVLTSIQLLMSEPNPDDPLMADISSEFKYNKPAFLKNARQWTEKHARQKQKADEEEMLDNLPEAGDSRVHNSTQKRKASQLVGIEKKFHPDV

SEQ ID NO: 4227 - DNA, 2184 bp, Homo sapien
agtcgcctccggaggaaggaagaagaggacgccgggcgcgcagctcggtgctgattatcacaactgtttggtgacctacttcactgacctgtgaggattccttcccttcaagtactggattcttgatctttctgcatcatcaagaatggaaacagactgtaatcccatggagctaagcagtatgtcaggatttgaagaaggttcagagctgaacggttttgaaggaactgacatgaaagacatgaggctcgaagctgaagcagttgtaaatgatgttctctctgctgttaacaacatgtttgtctcgaaaagcctgcggtgtgcggatgatgtggcctatatcaatgtggaaacaaaggaaagaaacagatattgcctagaactcactgaagcagggctcaaggtggtaggctatgcttttgaccaggtagatgatcatttacagactccctaccatgaaacagtctactccttgttggatacactcagccccgcctaccgagaagcatttggaaacgcactgcttcaaagactggaagctttgaaaagagatggacagtcatgactacactttttcctttcagaggggctggtgctggtacagaatgttgatacaaagcttaaaattcttgcatatggtcatagaaaatgcatctttggttttgtgtttttatcacttgcttccaacttaggcttttggctcagaagattattgaataatgatttgtcttagtttctgtttcagtaagggaattctgaggccgttgctatgataccatcattaagacattcacatgtcttcatataatatctcttcatttcaaatcctaatcactatttcatactattacagggctttgatgctgccagcactgtcttttacataggaaattctagatttgcacagtaatagaggaattagaagtacctaactatacactttgattcagcctgctaaatcaggggttcaatactagcttggacaaactttgtagtaattaattgctaccagccttattggaaacaaattatcaactagtttcccctgcacaaattttgaaattcactgcttcacttaatctatttatattactaataatggattaataaagatgaattaattatatattacttaactagtattaaatgaaaaacagggactgaaatagttctgtattccgtgtttgcaacagccagccaactaagcagaggataaaccgttagcaaatgaatgtaataattactcatttccaagatatctaagcacataagcaaatacaggaacagacttcattctttttcttaacaaaaaagcatcttcagtgtgtgatttaaaagaaagaagactctggtttcctagaaaacaatattttggcctgtgttgattcttattctgaatgtgtgtttacataatgtacagtatatattcagaaagtatttttgcttcaacgtttactttctatgatgtagtgctttggtattcctacagcaccccaccttccccaacagatgtacagtgttcagtctccattcgaaatctacaatgtaatatgagtgcattgtatgggtttgaaaccaaaggatgaatgaagcattcagagacttaatatttgaaaaaggaatagtcagtattttatattttattacaggtactgatatttataaatttaataaactgtaccatgctgctgcatgttttcaagtacatgttgaacagtaaggattggggagttgttttttaatggtcacctaaagcagctgctatagaaatgttgaactaaaattttgcatctggtcataccttcatgcatttatcatttgcagatatttttccatcattattaaaaaacaggaacttttaggctctgaagatcatgtggaccagagcaaattaaagttcagtttgtgtcacaattcattgccagacttcattggaatgctttgtttgatgatgtatgttcattctcagctttattttcagatgcttaactgggcaatgaagtctaacttcaggttgaactttctcatgtttaatctcaggctaaatgtaaatgatatttgtaaagtttgaataaaattctgtttactcattttgagttagtatgaaaaaaagtgattgtatgtttaagaattgaaattgttcattttgtgataaatgattaattccaaaaaaaaaaaaaaaaa

SEQ ID NO: 4228 - protein, 139 aa, Homo sapien [sequence omitted]

SEQ ID NO: 4229 - DNA, 2004 bp, Homo sapien
aacaataggaaacgtcaaaattgggatagtcggcagttctggcccctgcagctggaggtaccctgagttctgagggtcgtagtgctgtttctggtattctcatcgcggtcacctctaccggtgtggacaagtaaagtttgaatcagcttctccatggcctgggcaccagttcccggctgagccattttccttttggctaaaagtccccgcccagaggccaattcgtcgcggcggcggtggagatcgcaggtcgctcaggcttgcagatgggtcaagggttgtggagagtggtcagaaaccagcagctgcaacaagaaggctacagtgagcaaggctacctcaccagagagcagagcaggagaatggctgcgagcaacatttctaacaccaatcatcgtaaacaagtccaaggaggcattgacatatatcatcttttgaaggcaaggaaatcgaaagaacaggaaggattcattaatttggaaatgttgcctcctgagctaagctttaccatcttgtcctacctgaatgcaactgacctttgcttggcttcatgtgtttggcaggaccttgcgaatgatgaacttctctggcaagggttgtgcaaatccacttggggtcactggtccatatacaataagaacccacctttaggattttcttttagaaaagtgtatatgcagctggatgaaggcagcctcacctttaatgccaacccagatgagggagtgaactactttatgtccaagggtatcctggatgattcgccaaaggaaatagcaaagtttatcttctgtacaagaacactaaattggaaaaaactgagaatctatcttgatgaaaggagagatgtcttggatgaccttgtaacattgcataattttagaaatcagttcttgccaaatgcactgagagaattttttcgtcatatccatgcccctgaagagcgtggagagtatcttgaaactcttataacaaagttctcacatagattctgtgcttgcaaccctgatttaatgcgagaacttggccttagtcctgatgctgtctatgtactgtgctactctttgattctactttccattgacctcactagccctcatgtgaagaataaaatgtcaaaaagggaatttattcgaaatacccgtcgcgctgctcaaaatattagtgaagattttgtagggcatctttatgacaatatctaccttattggccatgtggctgcataaaaagcacaattgctaggacttcagtttttacttcagactaaagctacccaaggacttagcagatatgggggttacatcagtgctggtcattgtagcctgagtatacaatcaagcttcagtgtgcaacctttttttcttttgccattttctattttagtaatttccttggggaactaaataattttgcagaatttttcctaattttgtttatcacgttttgcacaaagcagagccactgtctaacacagctgttaacgaatgataaactgacattatactctaaaagatggtgtatttgtgcattagatttgcctgaaaaactttatccatttccattctttatacaaataccatgtaatgtgtacatatttaactaaagagatttatagtcataattattttattgtaaagattttaactaaagtttttccttttctctcaaactgagttctgaaatttatttgattctgatctgaaactattgtcttcgtaaaagttagatctgacttcagacagaaaccaataccagcttccttttcctttaaactttgaagagtgttgatttgttactatattactatgcaaaactggcagttatttttataatataaatttataatttgattttttattttaaaaactgggttaatcaagtctcggtaagtcctttaaaccatttaggatttttaaaacatcaaaatttatgatttacattcataggaataaaataaaatattattagaactctggtaaaaaaaaaaaaaaaaaaaaaaaaaaa

SEQ ID NO: 4230 - protein, 319 aa, Homo sapien
MGQGLWRVVRNQQLQQEGYSEQGYLTREQSRRMAASNISNTNHRKQVQGGIDIYHLLKARKSKEQEGFINLEMLPPELSFTILSYLNATDLCLASCVWQDLANDELLWQGLCKSTWGHWSIYNKNPPLGFSFRKVYMQLDEGSLTFNANPDEGVNYFMSKGILDDSPKEIAKFIFCTRTLNWKKLRIYLDERRDVLDDLVTLHNFRNQFLPNALREFFRHIHAPEERGEYLETLITKFSHRFCACNPDLMRELGLSPDAVYVLCYSLILLSIDLTSPHVKNKMSKREFIRNTRRAAQNISEDFVGHLYDNIYLIGHVAA

SEQ ID NO: 4231 - DNA, 926 bp, Homo sapien
gtcgcgaccctggtccggacctgacctgaattgcgaccccaacctggactgctcccctgaccgcaacccctacccccgcccaccagtatggcccggcacgtgttcctaacggggcccccaggagttggaaaaacaacattgatccataaagccagtgaggttttaaaatcctctggtgtgcctgttgatggattttataccgaagaagtcagacagggagggagaagaataggattcgatgtcgtcacgttgtccggcacccgggggcctttatcgagagttgggttagagcctccacctggaaaacgtgaatgccgagttgggcagtatgtggtcgacctgacttcttttgagcagttggcactacccgtcttgaggaatgccgactgcagcagtggcccagggcaaagagtgtgcgtcatcgatgagattgggaagatggagctcttcagtcagcttttcattcaagctgttcgtcagacgctgtctaccccagggactataatccttggcacaatcccagttcctaaaggaaagccactggctcttgtagaagaaatcagaaacagaaaggatgtgaaggtgtttaatgtcaccaaggaaaacagaaaccaccttctgccagatatcgtgacgtgcgtgcagagcagcaggaagtgaagacacgtgcattcctgccttccgtgaaggagtgcccagttcaagaggagcctgatggagccctgcctgtcgaggctgtatgcctatggggttatggaaccttgtgggcttttctagagaaaactcaacagctgtttcccataaaatgtttaaaagatcaaattagccttaatgctggattgtctgtacaagattaactatccattgtggcttatctatgcttaaagatttcttgtttatttaaaaaaaaaaaaaaaaaaaaaaaa

SEQ ID NO: 4232 - protein, 190 aa, Homo sapien
MARHVFLTGPPGVGKTTLIHKASEVLKSSGVPVDGFYTEEVRQGGRRIGFDVVTLSGTRGPLSRVGLEPPPGKRECRVGQYVVDLTSFEQLALPVLRNADCSSGPGQRVCVIDEIGKMELFSQLFIQAVRQTLSTPGTIILGTIPVPKGKPLALVEEIRNRKDVKVFNVTKENRNHLLPDIVTCVQSSRK

SEQ ID NO: 4233 - DNA, 1176 bp, Homo sapien
agcggatttccgcctccgggtggcgcttcccggtgtcgtgttctggaagcttagcggtcaccatggagctgctgggagagtacgtcgggcaggaagggaagccgcagaagctgcgggtgtcctgtgaggcgccgggtgacggcgaccctttccagggcctgttgtctggcgtggcccagatgaaggacatggtaacggaattattcgaccctctggtacagggggaagtgcagcaccgggtggcggcggctccagacgaggacttggacggtgatgatgaagatgatgcagaagatgaaaataacattgataacagaactaacttcgatggaccatctgcaaaacggccaaaaacaccgtcttaacaatagccttcatgacatttaaaagatggctgttgtatccttattgtcacactaggacatttaaggaagacttatgctctaatttggaaaaagcatttgtgttgttctcctgggacaattttgtcaaagagaaaactggtttttctgtttctagcaaagatagtaaaggcttagaaataaaatctgttttcttgagaaataaatttcagaccctggaaggaaaatagaacacttcataatgtataaaatcctctaagttggcaactgaatttttatcattgttttctatttttaaaataatcattgatttgtgtgatgtctacatcttttaacttctggttctgttataaagagtacatgtcacggttcataggcagtaacatttcagagaactgacatgaacaagtagtgaaaattgggcattaaatataaaaataacagttcttcataaacagaaggaaaataaggaaatagaaataccaacgagaaaggagagtccttgaaagagacccaaggaaaccctgaattcatacccacgtcaaatatgcacatatcctgagatgatgccactttgatgaatgtgcattagtctgatttatcatgtaccttaagagagccagatggggtatgtttttgtgctgtgatatggtatttatacaggtacaaatataaggccttaagtaaacaatctgcattgattacaatttggatatttcctctcctcctgtagccatactttgattttgctttaaaaagattattgaatccttttaaaaatatatattcctaaaatatgaaaaaaaaaaaaaaa

SEQ ID NO: 4234 - protein, 71 aa, Homo sapien
MTFKRWLLYPYCHTRTFKEDLCSNLEKAFVLFSWDNFVKEKTGFSVSSKDSKGLEIKSVFLRNKFQTLEGK

SEQ ID NO: 4235 - DNA, 2308 bp, Homo sapien
ggcacgagggctgcttgcactctgaatttgggctattcaggtagtgtgctcaaagttgaaaccgcatacagcacaactcaagtttgcatcagactgggaagcgaacttaagccagcggtgcgtggcccaggagtgggaaaggaaatggatgcctgaagtggaagaggtggtgcagagggggcaccgcccatgctgccctgcttccaactgctgcgcatagggggcggcaggggcggtgatctctacaccttccacccccccgccggggctggctgcacctatcgcttgggccacagggccgacctgtgtgatgtggccctgcggccccagcaggagcctggcctcatctctgggatccacgccgaactgcatgccgagccccggggtgatgactggagggtcagcctggaagaccacagcagccaaggtactttggtcaataatgtccgactcccaagaggtcacaggctggaattgagtgatggagacctcctgacctttggccctgaagggcccccaggaaccagcccctcggagttctacttcatgttccaacaagtacgagtcaagcctcaggactttgctgccattaccatcccacggtctaggggagaagcccgggttggggctggtttccggcctatgctgccctcccagggggctccacagcggcctctcagcaccttctcccctgcccccaaggccacactgatcctaaactccataggcagcctcagcaagctccggccccagcccctcaccttctcccctagttggggtggaccaaagagcctgcctgttcccgccccacctggggaagtggggaccacgccttctgctccaccccaacgcaatcggaggaaatctgttcaccgagtgttggcggaactggatgatgagagtgagcctcttgagaacccgccaccggtccttatggagcccaggaagaaactccgtgtagacaaagccccactgactcccactggaaatcgacgtggccgtcctcggaagtacccagtgagcgctcccatggctccccctgcagttgggggcggggagccctgtgcagctccttgttgctgcctgccccaggaagagacagtggcctgggttcagtgtgatggctgtgacgtctggttccatgtggcctgtgttggctgcagcatccaggctgccagggaggccgacttccgatgcccagggtgccgggctggcattcagacctaaggtccaccgccaaggcaccatcggacacacctgcccatgagtagacacagcagcgagcaaataggtctgataaataccccccttcccttccctccccaggagggaatgactacagggaagaaggatggattgatgtggactcattcagggcctggagcagaccctggtggccaagacagaagagatggtttcctgccaaagatattgccacctccaggaaattgccagtgagctggaagttcccactattacaagccataaggccatgttgccatggacaccagaatatctgtagtcagagcacctatcagttgcaaaagccatgcctgcaaccgatggaaaatgtaagagggagttcttaaggttcttgatggcatcacccaaggcattctgggaaaacctagggcctggccccaaaacttccctactctgtggctagtcctgctgccaacaaaatcgtagcgacctggcttttcacagctttgcttttatttccaagtcaaggacaagccgcttcattcactcctgggcatttactcttcttgtgggtctgtgatattccttgctttccagggagaatgtgcttggcaaggtctggagaactaattcagaatcttaggggaaggggagagatggaaatacaaacctgcttactggaaaggtgcaaatatatgggttgagctggaggtaggaatacaggtaattaaggtttctggtttaagggaaaacagatctattgccatttaaataaggtaactgggatttggttaagttcacaaagttagcagaagatttatttacaggcttcacctgtactgtcagggcaagagaaagcctggtaaaccagctacagcagtttaccagtgtgatggctgtgacacagctccactccacgggtggacacagcagagggcaactgggctggcctggttcagtgtgaatcaaaccgcttaacccacacatggtacatgtgattttcttttgtgagccttacaccaagccaaactattgtcaaagcatcatttctatagaaataaagccttatcttgacctgttctattaaaaaaaaaaaaaaaaaaaa

SEQ ID NO: 4236 - protein, 345 aa, Homo sapien [sequence omitted]

SEQ ID NO: 4237 - DNA, 2506 bp, Homo sapien
agatggcgcggagcgggaggcggccctggagcgaccccggaggactaagcgggaacgggaccagctgtactacgagtgctactcggacgtttcggtccacgaggagatgatcgcggaccgcgtccgcaccgatgcctaccgcctgggtatccttcggaactgggcagcactgcgaggcaagacggtactggacgtgggcgcgggcaccggcattctgagcatcttctgtgcccaggccggggcccggcgcgtgtacgcggtagaggccagcgccatctggcaacaggcccgggaggtggtgcggttcaacgggctggaggaccgggtgcacgtcctgccgggaccagtggagactgtagagttgccggaacaggtggatgccatcgtgagcgagtggatgggctacggactcctgcacgagtccatgctgagctccgtcctccacgcgcgaaccaagtggctgaaggagggcggtcttctcctgccggcctccgccgagctcttcatagcccccatcagcgaccagatgctggaatggcgcctgggcttctggagccaggtgaagcagcactatggtgtggacatgagctgcctggagggcttcgccacgcgctgtctcatgggccactcggagatcgttgtgcagggattgtccggcgaggacgtgctggcccggccgcagcgctttgctcagctagagctctcccgcgccggcttggagcaggagctggaggccggagtgggcgggcgcttccgctgcagctgctatggctcggcgcccatgcatggctttgccatctggttccaggtgaccttccctggaggggagtcggagaaacccctggtgctgtccacctcgccttttcacccggccactcactggaaacaggcgctcctctacctgaacgagccggtgcaagtggagcaagacacggacgtttcaggagagatcacgctgctgccctcccgggacaacccccgtcgcctgcgcgtgctgctgcgctacaaagtgggagaccaggaggagaagaccaaagactttgccatggaggactgagcgttgccttttctcccagctacctcccaaagcagcctgacctgcgtgggagaggcgtagcgaggtcggaggggaaagggagatcccacgtgcaagtagggggaatatctcccccttttccctcatagcctctagggagggagagtgacttcattctccatttgaagagattcttctggtgatgtttacttaaaaagtgatccccctcaacaacggatacagcgtgcttattattgggcatttagcctcaaaagcatgtagtaccaagcacttgtatttccgtatattttgtttcgcgggggagtgagggggaagaacacggatgaaaatgtcagtttttgaagggtccatgcacatccctgacacctcacaccttatctaagtctgaagctggggagaaaggggttcatttagacttcatacatttccagtacgactttagtatctctccagagccatattttctcagtccgaattaattccccctccctaggtgcctgtaggctatggtacttcttcctcattgttttctaggtaaacttcactactggtaattaaggggaaggatatgaggaagcagtttaaatagccctgttctcattactctgaccacatacatcatagggtgctaaagttgatgaacacattaatccgttaagtaaaatggactttgtaattgtacagcatacctaagaaactcagaaggtgcatttaagagagagacctgaaagaaatagtatggatttttaaaaattcttgtctctactattataaccaaaaaatatttcttgtatgtcccataaaaatatttgtgtaattcttatgaaacaggctggtagaggaggtttctgagcctagcccaagggcttattcatcaccatgggtaaattatttaaactcacttaattaaggaaaatattttcccagctagaaaagtatactcattctcatttaaactctctcatttggagggatcatgtgagttggcctacttacaagtagtgaaagttcccttttcagttttgttttgttttgttttgtttttctctttcactcagccaaatgtgaaagttgtgaatttaggaaaatcacttgtaatgaagtgtgaatcttgttatcaaatttatttctctgatgtttccttccttatccttgtagccaataaaacattgacattctcacgttttatagatgaggtaaaaagtcttgtgtgctgtgagttataatgcttttgcctttttaatattattagttcttaagtgttacagccccttcagaatataacttcaggacaattcaaactatgcttaatgtatgattttcgagcttctgtatgctaagaaaataggtgtgaaaaactggtgttctgaaatagcctaacatttattgtaattctgaattttctgcccttttattcattgcatattaaagtattagagtataaaaact

SEQ ID NO: 4238 - protein, 316 aa, Homo sapien
MIADRVRTDAYRLGILRNWAALRGKTVLDVGAGTGILSIFCAQAGARRVYAVEASAIWQQAREVVRFNGLEDRVHVLPGPVETVELPEQVDAIVSEWMGYGLLHESMLSSVLHARTKWLKEGGLLLPASAELFIAPISDQMLEWRLGFWSQVKQHYGVDMSCLEGFATRCLMGHSEIVVQGLSGEDVLARPQRFAQLELSRAGLEQELEAGVGGRFRCSCYGSAPMHGFAIWFQVTFPGGESEKPLVLSTSPFHPATHWKQALLYLNEPVQVEQDTDVSGEITLLPSRDNPRRLRVLLRYKVGDQEEKTKDFAMED

SEQ ID NO: 4239 - DNA, 2858 bp, Homo sapien
gtgacgacaacagggacaaggactccgagaagaccaagaggtggtccaagcccaggaagcgctccctgatggagatggaggggaaggaggatgccctttaaggtgctgaagtgcatgtactgtggacactcctttgagtccttgcaggacctcagcgtccacatgatcaaaaccaagcattaccagaaagtgcctctgaaggagccagtgccagccatcaccaaactggtcccctccaccaaaaagcgggcgcttcaggacctggcgcccccctgctcccctgagccagcaggaatggccgcagaggtggccctgagtgagtcagccaaggatcagaaagcagcgaacccgtacgtcacgcccaataaccgctatggctaccagaatggcgccagctacacctggcagtttgaggcccgcaaggcgcagatcctcaagtgcatggagtgtggcagctcccacgacacgctgcagcagctcaccgcccacatgatggtcaccgggcacttcctgaaagtgaccacctcggcttctaagaagggcaagcagttggtgctggaccctgtggtggaagagaagatccagtccatcccactaccgcccaccacccacacgcggctgccggcctccagcatcaaaaagcagcccgactctcccgcggggtccacgacttctgaagaaaagaaagagccagagaaggagaagccgcctgtggctggcgacgcggagaagatcaaggaggagagtgaggacagcttggagaaatttgagcccagcaccctgtacccgtacctgcgtgaggaggacctggacgacagccccaagggagggctggacattctcaagtccctggagaataccgtctccacggccattagcaaagctcagaatggtgcgccctcatggggtggctaccccagcatccatgcagcctaccagctcccgggcaccgtgaagccactgccggcggccgtgcagagcgtgcaggtgcagccgtcctatgctggcggcgtgaagtcgctgtcttccgccgagcacaacgccctcctgcactccccagggagcctcacgcccccaccgcacaagagcaacgtgtctgccatggaggagctggtggagaaggtcacgggcaaggtcaacatcaagaaggaggagagaccccctgagaaggagaagagctccctggccaaggctgcgtcccccatagcaaaagagaataaagatttcccgaaaacggaggaagtcagcggcaaaccacagaagaagggccctgaggccgagactgggaaggccaaaaaggagggaccgctggacgttcacaccccaaatggcacagagcctctcaaagcaaaggtcaccaacggctgtaacaacctggggatcatcatggaccactcaccggagccttccttcatcaacccgctgagcgctttgcagtccatcatgaacacccacctgggcaaggtgtccaagcccgtgagtccctcgctggacccgctggcgatgctgtacaagatcagcaacagcatgctggacaagccggtgtaccccgccacccctgtgaagcaggccgatgccatcgaccgctactattatgaaaacagcgaccagcccattgacttaaccaagtccaagaacaagccgctggtgtccagcgtggctgattcggtggcatcacctctgcgggagagcgcactcatggacatctccgacatggtgaaaaacctcacaggccgcctgacgcccaagtcctccacgccctccacagtttcagagaagtccgatgctgatggcagcagctttgaggaggcgttggacgagctgtcaccggtccacaagaggaagggccggcagtccaactggaacccgcagcaccttctcatcctgcaggcccagttcgcctcgagcttgcgggagaccacagagggcaagtacatcatgtcggacttgggcccgcaggagagggtgcacatctcgaagtttactgggctctccatgaccaccatcagccactggctggccaatgtgaagtaccagttgaggaggacagggggaacgaaattcctaaagaacctggacacagggcatcctgttttcttttgcaacgattgtgcctctcagttcagaactgcttctacatacataagtcatttggagacacacttgggcttcagcctgaaggatctctccaagctgccactcaatcagattcaagaacagcagaatgtttcgaaagtcctcaccaacaaaactctgggcccactgggggccaccgaggaagacttgggctccacattccaatgtaagctctgcaaccggacttttgcgaagcaagcacgcagtcaaactgcaccttagtaagacccacggcaagtctcccgaggaccacctgatctatgtgactgagttggagaaacagtagcgtccaggtatgcaagagaccgcggaacattgcactaaacgtcgtcgagctgcactaggcctggcctgagcctctgaaatcagtctttcctttgttgctggcccgcctctctggaccttggttttcttacacatattttgtatatttatatgctctctgtccgatctgtgcatgttatttttctttttccgtgagtcaaagtctgacctttattctcaacatctgtttttggtgttaagctatcttttgtaggaaatagtggggcacactactcagagacattatttagcagtaaagaaagacacaaataacaatgataaaaagacatcctaaaatggtgaagttgccatgacaataaaggtcatagaacctggtagtgtcaaatttaaccctttgaggactgtaattgcatttctgtgcctttcacttgaaaaaa

SEQ ID NO: 4240 - protein, 687 aa, Homo sapien
MAAEVALSESAKDQKAANPYVTPNNRYGYQNGASYTWQFEARKAQILKCMECGSSHDTLQQLTAHMMVTGHFLKVTTSASKKGKQLVLDPVVEEKIQSIPLPPTTHTRLPASSIKKQPDSPAGSTTSEEKKEPEKEKPPVAGDAEKIKEESEDSLEKFEPSTLYPYLREEDLDDSPKGGLDILKSLENTVSTAISKAQNGAPSWGGYPSIHAAYQLPGTVKPLPAAVQSVQVQPSYAGGVKSLSSAEHNALLHSPGSLTPPPHKSNVSAMEELVEKVTGKVNIKKEERPPEKEKSSLAKAASPIAKENKDFPKTEEVSGKPQKKGPEAETGKAKKEGPLDVHTPNGTEPLKAKVTNGCNNLGIIMDHSPEPSFINPLSALQSIMNTHLGKVSKPVSPSLDPLAMLYKISNSMLDKPVYPATPVKQADAIDRYYYENSDQPIDLTKSKNKPLVSSVADSVASPLRESALMDISDMVKNLTGRLTPKSSTPSTVSEKSDADGSSFEEALDELSPVHKRKGRQSNWNPQHLLILQAQFASSLRETTEGKYIMSDLGPQERVHISKFTGLSMTTISHWLANVKYQLRRTGGTKFLKNLDTGHPVFFCNDCASQFRTASTYISHLETHLGFSLKDLSKLPLNQIQEQQNVSKVLTNKTLGPLGATEEDLGSTFQCKLCNRTFAKQARSQTAP

SEQ ID NO: 4241 - DNA, 1404 bp, Homo sapien
ggcacgaggctcgcggggggcttgtgggtcctcctccccctcccactgacaactgccccaactgctcttcccgccccggtcacagtgaaaatgtagacggggtcgttgtccactatgttaggtcttaatggtgggaggacgcccgagtgctcggcccgtttcaccccgaggaggaaggacactgggtcatgacgccatcagagggcgccagagcagggaccggacgcgagttggagatgttggactcgctgttggccttgggcggcctggtgctgcttcgggattccgtggagtgggaggggcgcagtctcttgaaggcgcttgtcaagaaatctgcactgtgtggggagcaagtgcatatcctgggctgtgaagtgagcgaggaagagtttcgtgaaggttttgactctgatatcaacaatcggctggtttaccatgacttcttcagagaccctctcaactggtcaaaaactgaggaggcctttcctggggggccgctgggagccttgagagccatgtgcaagaggacagatcctgttcctgtcaccattgctctcgattcactcagctggctgctacttcgccttccctgcaccacactctgccaggtcctgcatgctgtgagccatcaggactcttgtcctggtgacagctcctcagtggggaaagtgagtgtgctgggcttgctacatgaagagcttcatggaccaggccctgtgggagctctcagcagccttgctcagactgaggtgaccctgggcggtaccatgggccaggcctcggcccacatcctgtgtcggaggccccgacagcgcccaactgaccagactcagtggttctccatccttccggacttcagcctggatctccaagaggggccctctgtagagtcccagccctactccgatcctcatatacccccggtggatcccacaactcatttgacctttaaccttcacctgtccaagaaagagagagaagccagagatagcctgatcctgcccttccagttcagttctgaaaaacagcaggctctcctgcggcctaggccagggcaggctaccagccacatcttctatgagccagatgcttattatgacctggaccaagaagacccagatgacgacctggatatttgactggccagatttgattagattgtaattggagggggcgcgggaagactttgggcccagaaccatctttctattgtttgtgttagccttaccctgtccctgccccaccttggttccccttgtctatggagccccgccttgtgagccaggaagcagcgtctcatcaggacagaaggtaggatgaagacatggggtaatgtgagagagtagaacacccccgtacctaataaaaatctttatttttttattaaaaaaaaaaaaaaaaaaa

SEQ ID NO: 4242 - protein, 300 aa, Homo sapien
MLDSLLALGGLVLLRDSVEWEGRSLLKALVKKSALCGEQVHILGCEVSEEEFREGFDSDINNRLVYHDFFRDPLNWSKTEEAFPGGPLGALRAMCKRTDPVPVTIALDSLSWLLLRLPCTTLCQVLHAVSHQDSCPGDSSSVGKVSVLGLLHEELHGPGPVGALSSLAQTEVTLGGTMGQASAHILCRRPRQRPTDQTQWFSILPDFSLDLQEGPSVESQPYSDPHIPPVDPTTHLTFNLHLSKKEREARDSLILPFQFSSEKQQALLRPRPGQATSHIFYEPDAYYDLDQEDPDDDLDI

SEQ ID NO: 4243 - DNA, 4954 bp, Homo sapien
atcacagcttggtgctggggctcagcatggccaggtggctaaccagggcttggtgtcaactacatttgggatgatgacacttggaggacacagagccactgtgcagcaggagtcgccactgctaacagccagagtgtcccagaagcttttgttgacaattccagtttccgaacaaaacatttcggcaatggtgagggcttcgatcccttctctgatttgctgtcagccatgaacggatggatgtgatgcctgctagccaaaaggcttccctctgtgtgttgcagtcctgtggcattatgcatgccccctcccagtgaccccaggctttttatggctgtgagacacgttaaaatttcaggggtaagacgtgaccttttgaggtgactataactgaagattgctttacagaagccaaaaaaggtttttgagtcatgatgcaagaatctgggactgagacaaaaagtaacggttcagccatccagaatgggtcgggcggcagcaaccacttactagagtgcggcggtcttcgggaggggcggtccaacggagagacgccggccgtggacatcggggcagctgacctcgcccacgcccagcagcagcagcaacaggcacttcaggtggcaagacagctccttcttcagcagcaacagcagcagcaagttagtggattaaaatctcccaagaggaatgacaaacaaccagctcttcaggttcccgtgtcagtggctatgatgacacctcaagttatcactccccagcaaatgcagcagatcctccagcaacaagtgctgagccctcagcagctccaggttctcctccagcagcagcaggccctcatgcttcaacagcagcagcttcaagagttttataaaaaacaacaggaacagttgcagcttcaacttttacaacaacaacatgctggaaaacagcctaaagagcaacagcaggtggctacccagcagttggcttttcagcagcagcttttacagatgcagcagttacagcagcagcacctcctgtctttgcagcgccaaggccttctgacaattcagcccgggcagcctgcccttccccttcaacctcttgctcaaggcatgattccaacagaactgcagcagctctggaaagaagtgacaagtgctcatactgcagaagaaaccacaggcaacaatcacagcagtttggatctgaccacgacatgtgtctcctcctctgcaccttccaagacctccttaataatgaacccacatgcctctaccaatggacagctctcagtccacactcccaaaagggaaagtttgtcccatgaggagcacccccatagccatcctctctatggacatggtgtatgcaagtggccaggctgtgaagcagtgtgcgaagatttccaatcatttctaaaacatctcaacagtgagcatgcgctggacgatagaagtacagcccaatgtagagtacaaatgcaggttgtacagcagttagagctacagcttgcaaaagacaaagaacgcctgcaagccatgatgacccacctgcatgtgaagtctacagaacccaaagccgcccctcagcccttgaatctagtatcaagtgtcactctctccaagtccgcatcggaggcttctccacagagcttacctcatactccaacgaccccaaccgcccccctgactcccgtcacccaaggcccctctgtcatcacaaccaccagcatgcacacggtgggacccatccgcaggcggtactcagacaaatacaacgtgcccatttcgtcagcagatattgcgcagaaccaagaattttataagaacgcagaagttagaccaccatttacatatgcatctttaattaggcaggccattctcgaatctccagaaaagcagctaacactaaatgagatctataactggttcacacgaatgtttgcttacttccgacgcaacgcggccacgtggaagaatgcagtgcgtcataatcttagtcttcacaagtgttttgtgcgagtagaaaacgttaaaggggcagtatggacagtggatgaagtagaattccaaaaacgaaggccacaaaagatcagtggtaacccttcccttattaaaaacatgcagagcagccacgcctactgcacacctctcaatgcagctttacaggcttcaatggctgagaatagtatacctctatacactaccgcttccatgggaaatcccactctgggcaacttagccagcgcaatacgggaagagctgaacggggcaatggagcataccaacagcaacgagagtgacagcagtccaggcagatctcctatgcaagccgtgcatcctgtacacgtcaaagaagagcccctcgatccagaggaagctgaagggcccctgtccttagtgacaacagccaaccacagtccagattttgaccatgacagagattacgaagatgaaccagtaaacgaggacatggagtgactatcggggcgggccaaccccgagaatgaagattggaaaaaggaaaaaaaaaaaacacgtcaaaagttagcagtgaaattgttctccatttgttgtacagtctggaggattttcactacgttttgacaactctgaaatgtgttaactcttagtgccatcaagaaccccatttgggagtatttttgatttttctactttttgttgaaaaaaggaatttgtactctgtgcattggatggacttgtttggtacttgggattttcctctcttaaccgtcaacatcagtgttgtaaatttgctaaactgattcacttttagcagcagactttgaactgcagtcctgccaacgttggacactgaggacgcccgacagagcttgtgcacctaagctgcagaccaagcctttgcccagaatttaaggattccaatggacgacctatttgcacagtactgcatgttgattatcactgcctttactccttttttttttttttttttttttttgcttccagttgggatggggaaggcctttgtgtgtgtattggggggaggggttaaaaaataattatcccaaactttttaatgtattgctttttttttttttttccttctactataccattttaagttctgacctcaggcctccatttgggccgatggcctcttggaggcttaaagttttctgtaccttgtgatgaatgttaataggtgtttttattatacaaagctgaatgtcatttctcgtttgtagctttctgtcactcattccatcttccttcagacatcaccacgtttctctaaagtcagaaaacattccgttttggtctttttcaaaaaggtcccaaatgctgcactctacacatgaaggccctctcacacagacgtgacgtcctgccagaaagagaatgaatgacagaaaaaaaaaagagagacaaactctaggaacaatgccgattcattccacgcagcagtattgggggtggttcgggggaggggtgtttcggattttctttttttcttttcttttatttttttttttttgcagcaaccattaataaatgccaccacattctaccagcacaaggaaacataggcagcactgaaaaaaaaaaaaaagctcatattaattagactgacaatatggccttggaaggctctcccttgtggaaccaagttgccatgggccttgggtgctctgcgataacgggtgtgggttggttttgtttgcaaaatggccaaaaaaaaaaccggcttccccgagcagctgccctgaaagtaggggtggcggcggcggcgctgagtttatacattagttcagacctacttggtggcattaaactgtttgaatgcaaattcgatttcagattgaacttgttaagggagttaacgagggctgagttcagcaaatgctaaagtgttaatttcaaatatgcaaatttggtactgcagtttgttatgcaatattatatcaccaacccagtatcacaaaaactcatagaagatatcatgtaggccctgggctttgggggggtcccaaacatggtatgcagaaatgtgatggttacaggtcagtacaacctcagtccttagaacccctccacacttcagctctgcacccactttcctgtcatttatttatataggactgtagttttttttagttcgagagcctttcgaagcttaatttatattctttctttgtaccttttttctaaaattaccaaagatattacacaaaggtaaattatgttctctgttttatgctttatctgatgaagccaaatatcctcttattgttgatcaaaggaggcaaaagaatttagaggcaaatgacaagcgataggctattgcaacctgagaaagagaactgctccttcatcgtaaatttagaagaccaagtagataatggaaccaaagttgtacttttttctagtagttatttttcctttttctttttgtgtacctctacagagaccaaaactcattctcttaaagagattttatggggctactgcagataaaaataggacacaatattaaaggagctacagaaggaagggagtcccatctcaaaaaaaaaatgaatgtatgccactgcaattagagtatccaataaaggagacagtttagagtcaggacagaaaagcttccataattgaactagattacataatagtatttctagaaaaagagatatttttagattgtatgccacttttgtttaagaactgtgctgtgatcactgtattaattttggtttatcttggcatatatccttcagtttgtttttatttttaatttttcctttttttccgattaggctttggtcagcatttttcatttaaagaaaagtaacactcccatccactcataagcttggtacaaaaacttctctggcagttacttttgaagcttcactctgctttctgtataaagggcagtctgtggtcacgcaagacttaaaaaaaaaaaaaaaaaaaaaaaaaaaaaa

SEQ ID NO: 4244 - protein, 677 aa, Homo sapien
MMQESGTETKSNGSAIQNGSGGSNHLLECGGLREGRSNGETPAVDIGAADLAHAQQQQQQALQVARQLLLQQQQQQQVSGLKSPKRNDKQPALQVPVSVAMMTPQVITPQQMQQILQQQVLSPQQLQVLLQQQQALMLQQQQLQEFYKKQQEQLQLQLLQQQHAGKQPKEQQQVATQQLAFQQQLLQMQQLQQQHLLSLQRQGLLTIQPGQPALPLQPLAQGMIPTELQQLWKEVTSAHTAEETTGNNHSSLDLTTTCVSSSAPSKTSLIMNPHASTNGQLSVHTPKRESLSHEEHPHSHPLYGHGVCKWPGCEAVCEDFQSFLKHLNSEHALDDRSTAQCRVQMQVVQQLELQLAKDKERLQAMMTHLHVKSTEPKAAPQPLNLVSSVTLSKSASEASPQSLPHTPTTPTAPLTPVTQGPSVITTTSMHTVGPIRRRYSDKYNVPISSADIAQNQEFYKNAEVRPPFTYASLIRQAILESPEKQLTLNEIYNWFTRMFAYFRRNAATWKNAVRHNLSLHKCFVRVENVKGAVWTVDEVEFQKRRPQKISGNPSLIKNMQSSHAYCTPLNAALQASMAENSIPLYTTASMGNPTLGNLASAIREELNGAMEHTNSNESDSSPGRSPMQAVHPVHVKEEPLDPEEAEGPLSLVTTANHSPDFDHDRDYEDEPVNEDME

SEQ ID NO: 4245 - DNA, 1214 bp, Homo sapien
gtcaatcacctcagatctctcaagcagtccagcctacgcaacagtactccacctctgcgcctgtgcggggagggtaaggcggggccagcaacttcctcagctggagggagagcgcacggtggagccgccagttgagaaggactctgatccggctcagctttccaatcagctgcggaaggagccacgctttcgggggttgcaagatggcggccaccagtggaactgatgagccggtttccggggagttggtgtctgtggcacatgcgctttctctcccagcagagtcgtatggcaacgatcctgacattgagatggcttgggccatgagagcaatgcagcatgctgaagtctattacaagctgatttcatcagttgacccacagttcctgaaactcaccaaagtagatgaccaaatttactctgagttccggaaaaattttgagacccttaggatagatgtgttggacccagaagaactcaagtcagaatcagccaaagagaagtggaggccattctgcttgaagtttaatgggattgttgaagacttcaactatggtactttgctgcgactagattgttctcagggctacactgaggaaaacaccatctttgcccccaggatacaattctttgccattgaaattgctcggaaccgggaaggctataacaaagctgtttatatcagtgttcaggacaaagaaggagagaaaggagtcaacaatggaggagaaaaaagagctgacagtggagaagaagagaacaccaagaatggaggagagaaaggagctgatagtggagaagaaaaagaggaaggaatcaacagagaagacaaaactgacaaaggaggagaaaaagggaaagaagctgacaaagaaatcaacaaaagtggtgaaaaagctatgtaaggtatacagggaacagcactctagaagctatgactcaattgagactacaagtaccacggtgctacttgcacagacccctttggttaaatgtaaattcttgtacaattgaaggatacgcagaaggacatctttctagtctaacagtcaggagctgctctggtcattcccttgtatgaactggtctaaagactgttagtggggtgttagttgatttttcctggtatactgtttcttggctgacactactggtcaagtaagaaatttgtaaataaatttcttttggttcttataaaaaaaaaaaaaaaaaaa

SEQ ID NO: 4246 - protein, 233 aa, Homo sapien
MAATSGTDEPVSGELVSVAHALSLPAESYGNDPDIEMAWAMRAMQHAEVYYKLISSVDPQFLKLTKVDDQIYSEFRKNFETLRIDVLDPEELKSESAKEKWRPFCLKFNGIVEDFNYGTLLRLDCSQGYTEENTIFAPRIQFFAIEIARNREGYNKAVYISVQDKEGEKGVNNGGEKRADSGEEENTKNGGEKGADSGEEKEEGINREDKTDKGGEKGKEADKEINKSGEKAM

SEQ ID NO: 4247 - DNA, 1430 bp, Homo sapien
ggcacgaggctaaaccttcacccctgagcacgctcagtgagactggtcatgcaagcatttacagtgccatgctcctcaagccgattttttcttgtagaaatgttgccctatttgtcttctccaatgtatggtatgttattttattttattattttattttattttattttattttatcgagggggggtacgatacctgccatttaagaaaatgaatagaaaattttaaaacccgagaaatgggggaaaaaaaatcagtgcacaagaattgggctggttaggcccagcaccacactgaagtgggctcagtggtttttggagtgaagaagccttactccctgcacattccctcatgctcccacacaagtccagcaatggaaatgcttgggttcctcttgctttgtcaggggactcaggagtcgaccaagggaaaccatttggccccgtgaggaatgggcattgtcagtatccgtcctgaacggggcctagtcaggaagcggtctagaagtgtacggtcacggtcgcctcatgaaagtgtgtagcaggtggctctcaggaaaaataccaagtctggatcatccatgtggcagctttgcatagggagaggatagctccgaactggaactgaactgccttctctgcacgcttgaccaaagcagtgatgagggcggccagtacctgcggtgtgcgtggtaggtttaaagaaaagggaatgttttctgctgagtgtttcctttgtccttgggctgctcgagctggacagtaggtaaccactgttttcaaggaccagcccaatttctctggcttggttcggagttcgtttcatccctagctgtgagtgccttttggtctggaaagttggcttgtctcataatacccacagctaggacattctctctgtaattatgaattgtccttgttttacattaaaagagaatgtctttgatcactagagtctgtcggtgttggattatttccactgtgagattcttaaaacttttttgcttcataataataaaacaactcatgttagagaccctttcaacatgaaaggtttgtagttgagacattacatatattttattgtttataataaaaatcatctatacaaaagaagtcctgggtgttaatattttgcacaagatctgttttccatgatgtgttgacatctacaatttcactaactgttgacgttattttctattgagattctggagcctagggagctatgtgttctttttgttcatttcgttcttacttccctgaagcaagagactatatggccttcagtgcaaagacttcagaccaattctttgtattacacttggttgcctcttggctatataacttctgagtgcaaatcattgaacactttaacgaagtattgtagagaataaatcataatggataaaaaaaaaaaaaaaaaaaaaa

SEQ ID NO: 4248 - protein, 29 aa, Homo sapien
MGIVSIRPERGLVRKRSRSVRSRSPHESV

SEQ ID NO: 4249 - DNA, 2973 bp, Homo sapien
gcggagccggggctggagagcggcgaccactgcggatctcggaaggaagaaatgatgtaaatcactcatccaaactttaaggtcaaaggtgagaaggaaggtcaggaagaacatggcctggccaaatgtttttcaaagagggtctctgctgtcccagttcagccatcatcatgttgtagtgttcctgctcactttcttcagttattcgttgctccatgcttcacgaaaaacatttagcaatgtcaaagtcagtatctctgagcagtggaccccaagtgcttttaacacgtcagttgagctgcctgtggagatctggagcagcaaccatttgttccccagtgcagagaaagcgactcttttcctcggcacactggataccattttcctcttctcctatgctgtgggcctattcatcagtggcatcgttggggatcggttgaatttgcgatgggttctgtcttttggcatgtgctcttctgcattagtggtgtttgtctttggtgcgctcacagaatggctgcgtttctacaacaaatggctgtactgctgcctgtggattgtgaacggcctgctgcagtccactggttggccctgtgtggttgctgttatgggcaactggtttgggaaagccggacgaggagttgtttttggtctctggagtgcctgtgcttcggtgggcaacattttgggagcgtgcctagcttcttctgttcttcagtatggttatgagtatgcctttctggtgacggcgtctgtgcagtttgctggtgggatcgttatcttctttggactcctggtgtcaccagaagaaattggtctctcgggtattgaggcagaagaaaactttgaagaagactcacacaggccattaattaatggtggtgaaaatgaagacgaatatgagccgaattattcaatccaagatgatagttctgttgcccaagtcaaggcgataagcttctaccaggcatgttgccttcctggagtcataccgtactcactggcctacgcctgcttgaagttagtgaattactccttcttcttctggctccccttttatctgagtaacaacttcggctggaaggaggcggaagccgacaagctgtccatttggtacgacgttggagggatcatagtatttagtgtctctgatccgggacaagctaggatggatgtgggttttctactttttcattctcatgacaagttgtacaattgtgtttatctcgccattaatagtgagggaaatattctctctcgtgctaaggagacaggctcacatattgagggagtgaccggtgcccgcgagacagaaagaacaatgtcagccacatcaggaccgctggggcttcgagtctgccctaatttgggtttgtctaggagctccagcctgatcttggattgtcaggcgtctctcaacactgccagccacctgagatgctgaccagcagtgaaggctgcactagttttctacactacaggaattactgttgatgatttttgctgttgtttcatgaatgtgccgagtgacttctgactctgccagcatctttgacctctgactctgcccgcgtctttgtttggcctattgaggtttagcgttttaaccttaactgttgttttggacttgaactttctctagccttgaaaatggagtgaacaggaggcaaagccacgcgtggtttgtgttggtggtatgttccacaaatggaagagatcattgcattttgctttggtaatgagtttacagagagtgggtcatctttgaagcatcaaatcctgatcaaatgctcaagctggaccgagctgcaagcctgccttggacaaagaatccctctgttcactgtggtgggaaagatcacactacatgcctgttgattggctcagtcactctgtgtctgatctaaacgtcattcagccctagaagcatgaattgcttcaaattattgtcaacttgttctcttccattttcattcaaattaactttgactcctggaagtattgagtcttcctttcaaggaccataaggtacatcagttatcttgaacattctgacgtgtaaaggaccataaggtacatcatttatcttgaacattccgacgtgtaactcacagccgaagcactccatcccagatttgttgtctgggaactttaggatcctctaggaagctaatctgcttagtctatttttagaggattgatctctggcacaaccagcttcctggagttacctcagcagaagactagaattagagaaaagggaaagaccttttcttctagtaagtgtcaagtacagatgctctttgacttatgatggggttatgtcccagtaaacccattggaagtcaaatgcatttaatacccctgactggacaccacagcttagcctcgtccaccctaaatgtactcagaacacttagaattgcccacagttgggcagaatcatctaacacaaactctattttataatcgagtgttgaatatatcatgtaatttattgaatattgtacattatgttgaaattgcaaccatttcacaccattgtaaagtccaaaaatcagaagctgaggactgtctgtacatgacattgaatcacatgaatggattactagggcctgaggggtgtccgttctttagaaaaatgtagagtatatatatcttcagggctgtgaattccatactagttatcaatattttaagatcattctgtatatacatattttaaattatgcaagcaaactaggaggagaatgtgcaattttgagggatacctaatttgcattcggttaggggatatttttcaacctcttgctttatactctgatatggggtgtgtttatgaacttgttaatgttatttaatcatgcagatttccaatcagtgtattgctcatttactgacaaaaagggaaaatacgaaacacagaaagggaaaataaactgacttttataatgaaaaaaaaaaaaaaaaaaa

SEQ ID NO: 4250 - protein, 443 aa, Homo sapien
MAWPNVFQRGSLLSQFSHHHVVVFLLTFFSYSLLHASRKTFSNVKVSISEQWTPSAFNTSVELPVEIWSSNHLFPSAEKATLFLGTLDTIFLFSYAVGLFISGIVGDRLNLRWVLSFGMCSSALVVFVFGALTEWLRFYNKWLYCCLWIVNGLLQSTGWPCVVAVMGNWFGKAGRGVVFGLWSACASVGNILGACLASSVLQYGYEYAFLVTASVQFAGGIVIFFGLLVSPEEIGLSGIEAEENFEEDSHRPLINGGENEDEYEPNYSIQDDSSVAQVKAISFYQACCLPGVIPYSLAYACLKLVNYSFFFWLPFYLSNNFGWKEAEADKLSIWYDVGGIIVFSVSDPGQARMDVGFLLFHSHDKLYNCVYLAINSEGNILSRAKETGSHIEGVTGARETERTMSATSGPLGLRVCPNLGLSRSSSLILDCQASLNTASHLRC

SEQ ID NO: 4251 - DNA, 1148 bp, Homo sapien; identical to SEQ ID NO: 3898

SEQ ID NO: 4252 - protein, 268 aa, Homo sapien; identical to SEQ ID NO: 3899

SEQ ID NO: 4253 - DNA, 796 bp, Homo sapien
cgttccccaaccctgccctctctcatgaccccgctccgggattatggccgggactgggctgctggcgctgcggacgctgccagggcccagctgggtgcgaggctcgggcccttccgtgctgagccgcctgcaggacgcggccgtggtgcggcctggcttcctgagcacggcagaggaggagacgctgagccgagaactggagcccgagctgcgccgccgccgctacgaatacgatcactgggacgcggccatccacggcttccgagagacagagaagtcgcgctggtcagaagccagccgggccatcctgcagcgcgtgcaggcggccgcctttggccccggccagaccctgctctcctccgtgcacgtgctggacctggaagcccgcggctacatcaagccccacgtggacagcatcaagttctgcggggccaccatcgccggcctgtctctcctgtctcccagcgttatgcggctggtgcacacccaggagccgggggagtggctggaactcttgctggagccgggctccctctacatccttaggggctcagcccgttatgacttctcccatgagatccttcgggatgaagagtccttctttggggaacgccggattccccggggccggcgcatctccgtgatctgccgctccctccctgagggcatggggccaggggagtctggacagccgcccccagcctgctgacccccagctttctacagacaccagatttgtgaataaagttggggaatggacagcctaaaaaaaaaaaaaaaaaaaaaaaaaaaaaaa

SEQ ID NO: 4254 - protein, 221 aa, Homo sapien
MAGTGLLALRTLPGPSWVRGSGPSVLSRLQDAAVVRPGFLSTAEEETLSRELEPELRRRRYEYDHWDAAIHGFRETEKSRWSEASRAILQRVQAAAFGPGQTLLSSVHVLDLEARGYIKPHVDSIKFCGATIAGLSLLSPSVMRLVHTQEPGEWLELLLEPGSLYILRGSARYDFSHEILRDEESFFGERRIPRGRRISVICRSLPEGMGPGESGQPPPAC

SEQ ID NO: 4255 - DNA, 4193 bp, Homo sapien
agcagcgctcatggcgaagaggcttaaggccacaaaaccgtgggacagcaggaggaagagaagccaggtatctccactccagctgccctgcctcagactcctcagtttcgcacgtgaggatcgtcttgcaggcactgactggagatggaatcctaaagcataggtgaagcggaaatcctccttcagggagagcccactgaggaagccagcggctagcacgaggcaggacaggatacctccctcttcgcccacggcggcctctctgtcatagtagccaccgttctgccactcatgcagctttctaagacacctctcggttccccagcgctttcagtggggcggccggccactcccgagggttgcaagaggaggcccggggtgctgagccagcctcgctgcccccgcgtagaaagccggcccgccggcgagagccagcctaaggcgcggacaaccaacgaggtgtcaggctcggcaggggattgcttctgtctggggcccggccgaggttgcgttcgtgcctcgcgcgcacacgctccgcgttcactcagccaatccggtgctactcgcgcgcccaggagcgatccgcggtcctactcaggctgggccggctccttcccgctcccaatactcagcacccgagctctcactcctcccctcactctccacgagttccacgcctaggggtgtagctccgcccttgtccccgagtccgcccccgcaacctccagagcgtgtgctatcctttcctctcagtcctgccatctagctgccttgggtctcgcgctccgcagagcgttccgacactctccggcctcgttctgccgcctccgcgcgctctccccgtgcggccaccgcgccccccaagcttgcctccttcttgccggacttggggccgcgcgccctgactccttcccctcccgcggacccgcgcactcccggcgcggcctctcccccacgcaggccaccgtgcactctgtggcctccccctccttccccgctctcctcgcgcttctctggctccctagctgtcgcgctctcctcggcgagcgcgctcccggcccgcgcgctccgggctccggtttctcccggctcctgtcagtgcggtgactgcgctgggaaacatggcgaccgagggaatgatccttactaaccacgaccatcaaatccgtgtcggagtccttacagtgagtgatagttgcttcaggaatcttgcagaagaccgcagtgggataaatctcaaagatctcgtacaagatccttctttgttgggtgggactatatcagcatacaagatagtaccagatgaaatagaagaaatcaaggaaaccctgatagattggtgtgatgaaaaggaacttaatttgatattaacaactggaggaacaggatttgcaccacgagatgtcactccagaggccacaaaagaagtaatagaacgggaagcaccagggatggccctggcaatgctgatgggatcacttaatgttacacctctgggcatgctctctaggcctgtatgtggaatcagagggaaaacgctcataattaacctgccaggtagcaagaaaggatctcaggaatgctttcaattcatactgccagctctacctcatgccattgaccttttacgtgatgccattgtaaaagtaaaggaggtgcatgatgaacttgaagatttgccttccccacctccccctctttcccctcctcctactaccagcccccataaacagacagaagacaaaggagttcaatgtgaggaagaggaagaagagaagaaagacagtggtgttgcttcaacagaagatagttcctcatcacatataactgcagcagccattgctgccaagattccagactccatcatttctcgtggtgttcaggtgctcccacgagacacagcctccctcagcactactccttcagaatcgcctcgtgctcaggctacatctcgcctctctacagcttcctgcccaacaccaaaagtccagtccaggtgcagcagcaaggagaacattctcagagccagtcacagtgctgtcgatatcaccaaggtggctagaagacatcgcatgtctccttttcctctgacatctatggacaaagcctttatcacagtcctggagatgactccggtgcttgggacagaaatcatcaattaccgagatggaatggggcgagtccttgctcaagatgtatatgcaaaagacaatttaccccccttcccagcatcagtaaaagatggctatgctgtccgagctgctgatggcccaggagatcgtttcatcattggggaatcccaagctggtgaacagccaactcagacagtaatgccaggacaagtcatgcgggttacaacaggtgctccaataccctgcggtgctgatgcagtagtacaagtggaagataccgaacttatcagggaatcagatgatggcactgaagaacttgaagtgcgaattctggtgcaagctcggccaggccaagatatcagacccatcggccatgacattaaaagaggggaatgtgttttggccaaaggaacccacatgggcccctcagagattggtcttctggcaactgtaggtgtcacagaggttgaagttaataagtttccagtggttgcagtcatgtcaacagggaatgagctgctaaatcctgaagatgacctcttaccagggaagattcgagacagcaatcgttcaactcttctagcaacaattcaggaacatggttaccccacgatcaacttgggtattgtaggagacaacccagatgacttactcaatgccttgaatgagggtatcagtcgtgctgatgtcatcatcacatcagggggtgtatccatgggggaaaaggactatctcaagcaggtgctggacattgatcttcatgctcagatccattttggcagggtttttatgaaaccaggcttgccaacaacatttgcaactttggatattgatggtgtaagaaaaataatctttgcactacctgggaatcctgtatcggctgtggtcacctgcaatctctttgttgtgcctgcactgaggaaaatgcagggcatcttggatcctcggccaaccatcatcaaagcaaggttatcatgtgatgtaaaacttgatcctcgtccagaataccatcggtgtatactaacttggcatcaccaagaaccactaccttgggcacagagtacaggtaatcaaatgagcagccgtctgatgagcatgcgcagtgccaatggattgttgatgctacctccaaagacagaacagtacgtggagctccacaaaggcgaggtggtggatgtcatggtcattggacggctatgatggtcaccagcaggagaaagctttgatgcatgtccacatatcattgactgtatcctgtaatatgcaacggcacagctagttttcccgatttggataaaagttgatctgtatagtcaacatcttgaactatatttcaaatgaatttaaatatcttttaaagaaaaaaacacctaaaaataaatcttaacagaaaattctgttctgattatatcaaggcaaatttttcctttcttgcaaattgctttgtgtgttcaatgctaggtctgatagcgatagcttttagtagacagcggtaggtgcctgcagaacttgtgtttttctcatctttaaaatacaactacttatgctcttaaatcaaggctgtctgcttatttatactagcgtaggcaacacttggatttcccttcttagtatgcttcataactgctttacagagagcttttgcttgttctttctcatgtatctcgtgtttatgtgcacagtgccaaaagaagactgactgggtggaggctctgccttgcctcaagaaccatcccctgcagagcatccagggaggtttctcgccccaatagcctcacggcacagtactcttgggcagtaactggacaccttttatttgaagaaacaaactgaagaaaaaatgcttccttaagtgctgacagcctttttaaccaatacatttaaaattgtacagaacaaaaaaataaaatcaaagactgatcttgtacagatattagtgttaccagcattcatgtggaaatcaagagcaaagacaaaataatgttaaacaattctgtaccataacattttctgtaatgatactgaaacttaatgaataaaaaaattccttgatcattattt

SEQ ID NO: 4256 - protein, 736 aa, Homo sapien
MATEGMILTNHDHQIRVGVLTVSDSCFRNLAEDRSGINLKDLVQDPSLLGGTISAYKIVPDEIEEIKETLIDWCDEKELNLILTTGGTGFAPRDVTPEATKEVIEREAPGMALAMLMGSLNVTPLGMLSRPVCGIRGKTLIINLPGSKKGSQECFQFILPALPHAIDLLRDAIVKVKEVHDELEDLPSPPPPLSPPPTTSPHKQTEDKGVQCEEEEEEKKDSGVASTEDSSSSHITAAAIAAKIPDSIISRGVQVLPRDTASLSTTPSESPRAQATSRLSTASCPTPKVQSRCSSKENILRASHSAVDITKVARRHRMSPFPLTSMDKAFITVLEMTPVLGTEIINYRDGMGRVLAQDVYAKDNLPPFPASVKDGYAVRAADGPGDRFIIGESQAGEQPTQTVMPGQVMRVTTGAPIPCGADAVVQVEDTELIRESDDGTEELEVRILVQARPGQDIRPIGHDIKRGECVLAKGTHMGPSEIGLLATVGVTEVEVNKFPVVAVMSTGNELLNPEDDLLPGKIRDSNRSTLLATIQEHGYPTINLGIVGDNPDDLLNALNEGISRADVIITSGGVSMGEKDYLKQVLDIDLHAQIHFGRVFMKPGLPTTFATLDIDGVRKIIFALPGNPVSAVVTCNLFVVPALRKMQGILDPRPTIIKARLSCDVKLDPRPEYHRCILTWHHQEPLPWAQSTGNQMSSRLMSMRSANGLLMLPPKTEQYVELHKGEVVDVMVIGRL

SEQ ID NO: 4257 - DNA, 782 bp, Homo sapien
ggcacgaggcccaggtaatttgagcaaaggccacagtgaactccggcgtggctgaggaaggaggaggcacccacaggctgctgggaggagagcataaggctcaaaatggaaaatcataaatccaataataaggaaaacataacaattgttgatatatccagaaaaattaaccagcttccagaagcagaaaggaatctacttgaaaatggatcggtttatgttggattaaatgctgctctttgtggcctcatagcaaacagtctttttcgacgcatcttgaatgtgacaaaggctcgcatagctgctggcttaccaatggcagggataccttttcttacaacagacttaacttacagatgttttgtaagttttcctttgaatacaggtgatttggattgtgaaacctgtaccataacacggagtggactgactggtcttgttattggtggtctataccctgttttcttggctatacctgtaaatggtggtctagcagccaggtatcaatcagctctgttaccacacaaagggaacatcttaagttactggattagaacttctaagcctgtctttagaaagatgttatttcctattttgctccagactatgttttcagcataccttgggtctgaacaatataaactacttataaaggcccttcagttatctgaacctggcaaagaaattcactgattttaaacaaatatgtaaacaaaaataaaatggtaaaaacagaaaaaaaaaaaaaaaaaaaaaaaaaaaaaaaaaaaaaaaaaaaaaaa

SEQ ID NO: 4258 - protein, 195 aa, Homo sapien
MENHKSNNKENITIVDISRKINQLPEAERNLLENGSVYVGLNAALCGLIANSLFRRILNVTKARIAAGLPMAGIPFLTTDLTYRCFVSFPLNTGDLDCETCTITRSGLTGLVIGGLYPVFLAIPVNGGLAARYQSALLPHKGNILSYWIRTSKPVFRKMLFPILLQTMFSAYLGSEQYKLLIKALQLSEPGKEIH

SEQ ID NO: 4259 - DNA, 1475 bp, Homo sapien
gctttccagtggacctgggctgttgttgcggttgttttccttctctccgtgcaacgctggcaagtctcaaagtcgccacagaaacatgcccctgattcagtgcctctgcttagctgtaacatgttaatcagaactacctggcatcttcctgaacaagactttcaataggggccagtatgcttcgcttcatccagaagttttctcaagcatcttcaaagatactgaagtactctttcccagtgggactaagaaccagcagaacagatatactttctctcaagatgtctctccagcaaaacttttccccatgtccaaggccttggctttcctctcatttccagcgtatatgagcaagacacagtgctatcatacatccccctgcagctttaaaaagcagcagaagcaagcacttctagccagaccctcaagcaccatcacttacctaactgacagcccaaagccagcattatgtgtaactctggcaggactaatccccttcgttgctccaccactggtcatgctgatgacaaaaacttatattcccatattagcttttactcagatggcttatggagccagtttcctatctttcttgggtgggatcagatggggttttgctctaccagaaggtagtccagccaaaccagactaccttaatttagctagcagtgcagctcctcttttcttttcatggtttgccttccttatttctgaaagacttagtgaagccatagtcacagtaataatgggtatgggagtagcattccaccttgaactttttctcttaccacattatcccaactggtttaaagccctgaggatagtagtcactttattggccactttttcatttataatcactttagtagttaaaagtagttttccagaaaaaggacataagagacctggtcaagtataaaaaatataaaagtctgggaagtgaggagcacctctgcccagctgctgccccgtctgggaagtgaggagcgcctctgcctggccgcctgaccatctgggaagtgtgacaagcgcctctgcccggccgctgtgcaaccttccacgtgtgaagtgacagccttgtgtgtgatcttttctgtcttccccaagtttgcattttcgacattaaagtttactttttagttaaaagtttaaaaatatatatataaatacactgtagataacatttgtatgccagctacacctttttctacttctgtttggctttttttccccacaccaatggtaatttatcttcacagattgttcttcatttctagaaattgttacttcatggtaattacttgagcaaaagcttgaaaatccctgacaagtacttttcatctcatagtatattagttttcactcagtcattttatgaataatatagttatccacttaaacatttcaatattttaaccatcttgaaaattaaagattaaaaatccaaaaaaaaaaaaaaaaaaaaaaaaaaaaaa

SEQ ID NO: 4260 - protein, 203 aa, Homo sapien
MSKALAFLSFPAYMSKTQCYHTSPCSFKKQQKQALLARPSSTITYLTDSPKPALCVTLAGLIPFVAPPLVMLMTKTYIPILAFTQMAYGASFLSFLGGIRWGFALPEGSPAKPDYLNLASSAAPLFFSWFAFLISERLSEAIVTVIMGMGVAFHLELFLLPHYPNWFKALRIVVTLLATFSFIITLVVKSSFPEKGHKRPGQV

SEQ ID NO: 4261 - DNA, 1125 bp, Homo sapien
  Unsure 1108-1109: Unknown base
ataaaaatagactatatatagtctttgaattcatttattttaaataaatgaataaaataaaataaaaaagaatattcagtcgttggcacataaactatgttctcttctgtcatttcagggtaggagtcaatgaagacatcttagtcttaacaagttacagataatctctgactggcatgttttctgcttctagcttggagctaaatgctgctcatgctgaaaagaataatgtctatttctttgtttgggtattagctctattttgatctatagcacagttttgtaattcagatcatcacccctgcactttgtaccacatgggcgtattctttcttcccagtcattgctgcaattatcttgtctgttctttgtgtaatatgttctgtgtgagcctctgcattaaactcgatttcttgggcaattatggaaattccagtgtggctgcagtttaactttgcactctctatgcatatgaggtttcctaaataaatgaggagtagcatagtttaaaatatatatatcttataactttctacaacaaagaattattgagtccaaatgtcatcagtgctcattttgagataccctgctatcgatggtcgctacaaaccaggaaatactcaagttattatgtgtatacattggttttagttttatgaaacaatttaccttcatgatctcatagttaaaattgtaataaatttaggaatataaaggatcaatatgggaagcaaaatttctaaaggcagtttctgttgttttaattagtatttgtgtagttcaaaccaggaaggatttgactatcattagattttgcttaactttatgaaagctaaaatattctctgttataaaggggcaactccatctggtcctatagcatctttactactgatttttttttgtttaatttgaaaatgcaaagaattgttaaatgttcttaaatgttctcactacaaaaaaagaaaaaagataactacgtgaggtgatggatatgttaattagctggattgtggtaatcattttggaatgtatatgtatatcaaaacatgtagtacaccctaaatatatataatttttatttgtcaaatatacctcaataaagaaannaaaaaatcgaaaaaaa

SEQ ID NO: 4262 - protein, 14 aa, Homo sapien
KNRLYIVFEFIYFK

SEQ ID NO: 4263 - DNA, 3979 bp, Homo sapien
ggcggccgcggcagggcgggcgccgcgcggaggcagggcgggcgtattcaatggaagtgtgttaccagctgccggtactgcccctggacaggccggtcccccagcacgtcctcagccgccgaggagccatcagcttcagctccagctccgctctcttcggctgccccaatccccggcagctctctcagaggcgtggagctatttcctatgacagttctgatcagactgcattatacattcgtatgctaggagatgtacgtgtaaggagccgagcaggatttgaatcagaaagaagaggttctcacccatatattgattttcgtattttccactctcaatctgaaattgaagtgtctgtctctgcaaggaatatcagaaggctactaagtttccagcgatatcttagatcttcacgcttttttcgtggtactgcggtttcaaattccctaaacattttagatgatgattataatggacaagccaagtgtatgctggaaaaagttggaaattggaattttgatatctttctatttgatagactaacaaatggaaatagtctagtaagcttaacctttcatttatttagtcttcatggattaattgagtacttccatttagatatgatgaaacttcgtagatttttagttatgattcaagaagattaccacagtcaaaatccttaccataacgcagtccacgctgcggatgttactcaggccatgcactgttacttaaaggaacctaagcttgccaattctgtaactccttgggatatcttgctgagcttaattgcagctgccactcatgatctggatcatccaggtgttaatcaacctttccttattaaaactaaccattacttggcaactttatacaagaatacctcagtactggaaaatcaccactggagatctgcagtgggcttattgagagaatcaggcttattctcacatctgccattagaaagcaggcaacaaatggagacacagataggtgctctgatactagccacagacatcagtcgccagaatgagtatctgtctttgtttaggtcccatttggatagaggtgatttatgcctagaagacaccagacacagacatttggttttacagatggctttgaaatgtgctgatatttgtaacccatgtcggacgtgggaattaagcaagcagtggagtgaaaaagtaacggaggaattcttccatcaaggagatatagaaaaaaaatatcatttgggtgtgagtccactttgcgatcgtcacactgaatctattgccaacatccagattggttttatgacttacctagtggagcctttatttacagaatgggccaggttttccaatacaaggctatcccagacaatgcttggacacgtggggctgaataaagccagctggaagggactgcagagagaacagtcgagcagtgaggacactgatgctgcatttgagttgaactcacagttattacctcaggaaaatcggttatcataacccccagaaccagtgggacaaactgcctcctggaggtttttagaaatgtgaaatggggtcttgaggtgagagaacttaactcttgactgccaaggtttccaagtgagtgatgccagccagcattatttatttccaagatttcctctgttggatcatttgaacccacttgttaattgcaagacccgaacatacagcaatatgaatttggctttcatgtgaaaccttgaatataaagcccagcaggagagaatccgaaaggagtaacaaaggaagttttgatatgtgccacgactttttcaaagcatctaatcttcaaaacgtcaaacttgaattgttcagcaacaatctcttggaatttaaccagtctgatgcaacaatgtgtatcttgtaccttccactaagttctctctgagaaaatggaaatgtgaagtgcccagcctctgctgcctctggcaagacaatgtttacaaatcaactctgaaaatattggttctaaattgccttggagcatgattgtgaaggaaccactcaaacaaatttaaagatcaaactttagactgcagctctttccccctggtttgcctttttcttctttggatgccaccaaagcctcccatttgctatagttttatttcatgcactggaaactgagcatttatcgtagagtaccgccaagctttcactccagtgccgtttggcaatgcaattttttttagcaattagtttttaatttggggtgggaggggaagaacaccaatgtcctagctgtattatgattctgcactcaagacattgcatgttgttttcactactgtacacttgacctgcacatgcgagaaaaaggtggaatgtttaaaacaccataatcagctcaggtatttgccaatctgaaataaaagtgggatgggagagcgtgtccttcagatcaagggtactaaagtccctttcgctgcagtgagtgagaggtatgttgtgtgtgaatgtacggatgtgtgtttggtgatgtttgtgcatgtgtgacgtgcatgttatgtttctccatgtgggcaaagatttgaaagtaagcttttatttattattttagaatgtgacataatgagcagccacactcgggggaggggaaggttggtaggtaagctgtaacagattgctccagttgccttaaactatgcacatagctaagtgaccaaacttcttgttttgatttgaaaaaagtgcattgttttcttgtccctccctttgatgaaacgttaccctttgacgggccttttgatgtgaacagatgttttctaggacaaactataaggactaattttaaacttcaaacattccacttttgtaatttgttttaaattgttttatgtatagtaagcacaactgtaatctagttttaagagaaaccggtgctttcttttagttcatttgtatttcccttgttactgtaaaagactgtttattaattgtttacagtttgttgcaacagccattttcttgggagaaagcttgagtgtaaagccatttgtaaaaggctttgccatactcattttaatatgtgcctgttgctgttaacttttgatgaataaaaacctatcttttcatgaaacttctctctatacaaattgaaatacataatgctttctggttcttcttcaaaccaaaacttgtcaaattcatagacaagataacagtaaaactgatgaaagtgttccattgttggtataccaggaacaaggttatagagatgaaacttcaaagcttcactcttcagtaagctataagccatctctgtaagattgattccaactattgcataagaataccctaattttggatgatttgaacgggaaagaatctgatgagcttcactagtgtaattttcactgaaatacacaagattgattaacccaagtatgcccatgcctctgaagtctgtcttgggatcatcaccctgaaaaccaatttcagcccactgcttggagattctagcgtttaacttcttcgtgggcattagaagattccaaagcttcatgagtagctcttcatgctgtaggttatcagaatcatatggccttttcctcacactttctacatccaaatacagctgtttataaccagttatctgcagtaagcacatcttcatgcatattttaaaactggcatccttctcagggttaatattcttttccttcataatatcatctacatatttgtccacttcactctgaacaacatgtgtcgccttctgtaaaaccttattcttggagtatgtcaaggaattttctatcctgtgtgtcctttgtgcacctacataggtatcaaatattcgctgcaattcacacttcccagtcatctgtcgtaatagccatttcatccaaaatcgaaaaaagtgcccatagaagaactcccacaaagaaataaacatttttttttcctcacaggagcggaagaactagggggagcaggagctgcaatgcggccgc

SEQ ID NO: 4264 - protein, 482 aa, Homo sapien
MEVCYQLPVLPLDRPVPQHVLSRRGAISFSSSSALFGCPNPRQLSQRRGAISYDSSDQTALYIRMLGDVRVRSRAGFESERRGSHPYIDFRIFHSQSEIEVSVSARNIRRLLSFQRYLRSSRFFRGTAVSNSLNILDDDYNGQAKCMLEKVGNWNFDIFLFDRLTNGNSLVSLTFHLFSLHGLIEYFHLDMMKLRRFLVMIQEDYHSQNPYHNAVHAADVTQAMHCYLKEPKLANSVTPWDILLSLIAAATHDLDHPGVNQPFLIKTNHYLATLYKNTSVLENHHWRSAVGLLRESGLFSHLPLESRQQMETQIGALILATDISRQNEYLSLFRSHLDRGDLCLEDTRHRHLVLQMALKCADICNPCRTWELSKQWSEKVTEEFFHQGDIEKKYHLGVSPLCDRHTESIANIQIGFMTYLVEPLFTEWARFSNTRLSQTMLGHVGLNKASWKGLQREQSSSEDTDAAFELNSQLLPQENRLS

SEQ ID NO: 4265 - DNA, 2168 bp, Homo sapien
tccctgtcctgcgcccgcgcgccccgggagcctacccagcacgcgctccgcgcccactggttccctccagccgccgccgtccagccgagtccccactccggagtcgccgctgccgcggggacatggtcctctgcgttcaggggtgagcacccccttgtaagctcagggctactgttgggtgtcagggaacaaagttttagactgctgcgctccaaagcgggcacacacatgtacctagaacacaccagccactgtccccaccatgatgatgacacagccatggacacacccctgcccagacctcgtcctttgctggctgtggagcggactgggcagcggcccctgtgggccccgtccctggaactgcccaagccagtcatgcagcccttgcctgctggggccttcctcgaggaggtggcagagggtaccccagcccagacagagagtgagccaaaggtgctggacccagaggaggatctgctgtgcatagccaagaccttctcctaccttcgggaatctggctggtattggggttccattacggccagcgaggcccgacaacacctgcagaagatgccagaaggcacgttcttagtacgtgacagcacgcaccccagctacctgttcacgctgtcagtgaaaaccactcgtggccccaccaatgtacgcattgagtatgccgactccagcttccgtctggactccaactgcttgtccaggccacgcatcctggcctttccggatgtggtcagccttgtgcagcactatgtggcctcctgcactgctgatacccgaagcgacagccccgatcctgctcccaccccggccctgcctatgcctaaggaggatgcgcctagtgacccagcactgcctgctcctccaccagccactgctgtacacctaaaactggtgcagccctttgtacgcagaagcagtgcccgcagcctgcaacacctgtgccgccttgtcatcaaccgtctggtggccgacgtggactgcctgccactgccccggcgcatggccgactacctccgacagtaccccttccagctctgactgtacggggcaatctgcccaccctcacccagtcgcaccctggaggggacatcagccccagctggacttgggcccccactgtccctcctccaggcatcctggtgcctgcatacctctggcagctggcccaggaagagccagcaagagcaaggcatgggagaggggaggtgtcacacaacttggaggtaaaatgcccccaggccgcatgtggcttcattatactgagccatgtgtcagaggatggggagacaggcaggaccttgtctcacctgtgggctgggcccaaacctccactcgcttgcctgccctggccacctgaactgtatgggcactctcagccctggtttttcaatccccagggtcggtaggacccctactggcagccagcctctgtttctgggaggatgacatgcagaggaactgagatcgacagtgactagtgaccccttgttgaggggtaagccaggctaggggactgcacaattatacactatttatttatttattctccttggggttggtgtcaggggcaaaccaaccccacctctatgccctgagccctggtagtccaaagaccccaactctgccctggcttctctggttcttccctgtggaaagcccatcctgagacatcttgctggaaccaaggcaatcctggatgtcctggtactgacccacccctctgtgaatgtgtccactctcttctgcccccagccatatttggggaggatggacaactacaataggtaagaaaatgcagccggagcctcagtccccagcagagcctgtgtctcaccccctcacaggacagagctgtatctgcataaagctggtctcactgtggcgcaggccccggggggagtgcctgtgctgtcaggaaaagggggtgctggtttgagggccaccactgcagttctgctaggtctgcttcctgcccaggaaggtgcctgcacatgaaaggagagaaatacacgtctgataagacttcatgaaataataattatagcaaagaacagtttggtggtcttttctcttccactgatttttctgtaatgaacattatacctttattacctctttattttattacctctataataaaatgatacctt

SEQ ID NO: 4266 - protein, 258 aa, Homo sapien
MDTPLPRPRPLLAVERTGQRPLWAPSLELPKPVMQPLPAGAFLEEVAEGTPAQTESEPKVLDPEEDLLCIAKTFSYLRESGWYWGSITASEARQHLQKMPEGTFLVRDSTHPSYLFTLSVKTTRGPTNVRIEYADSSFRLDSNCLSRPRILAFPDVVSLVQHYVASCTADTRSDSPDPAPTPALPMPKEDAPSDPALPAPPPATAVHLKLVQPFVRRSSARSLQHLCRLVINRLVADVDCLPLPRRMADYLRQYPFQL

SEQ ID NO: 4267 - DNA, 1857 bp, Homo sapien
ggaatggggcgggacttccagtaggaggcggcaagtttgaaaagtgatgacggttgacgtttgctgatttttgactttgcttgtagctgctccccgaactcgccgtcttcctgtcggcggccggcactgtagattaacaggaaacttccaagatggaaactttgtctttccccagatataatgtagctgagattgtgattcatattcgcaataagatcttaacaggagctgatggtaaaaacctcaccaagaatgatctttatccaaatccaaagcctgaagtcttgcacatgatctacatgagagccttacaaatagtatatggaattcgactggaacatttttacatgatgccagtgaactctgaagtcatgtatccacatttaatggaaggcttcttaccattcagcaatttagttactcatctggactcatttttgcctatctgccgggtgaatgactttgagactgctgatattctatgtccaaaagcaaaacggacaagtcggtttttaagtggcattatcaactttattcacttcagagaagcatgccgtgaaacgtatatggaatttctttggcaatataaatcctctgcggacaaaatgcaacagttaaacgccgcacaccaggaggcattaatgaaactggagagacttgattctgttccagttgaagagcaagaagagttcaagcagctttcagatggtattcaggagctacaacaatcactaaatcaggattttcatcaaaaaacgatagtgctgcaagagggaaattcccaaaagaagtcaaatatttcagagaaaaccaagcgtttgaatgaactaaaattgttggtggtttctttgaaagaaatacaagagagtttgaaaacaaaaattgtggattctccagagaagttaaagaattataaagaaaaaatgaaagatacggtccagaagcttaaaaatgccagacaagaagtggtggagaaatatgaaatctatggagactcagttgactgcctgccttcatgtcagttggaagtgcagttatatcaaaagaaaatacaggacctttcagataatagggaaaaattagccagtatcttaaaggagagcctgaacttggaggaccaaattgagagtgatgagtcagaactgaagaaattgaagactgaagaaaattcgttcaaaagactgatgattgtgaagaaggaaaaacttgccacagcacaattcaaaataaataagaagcatgaagatgttaagcaatacaaacgcacagtaattgaggattgcaataaagttcaagaaaaaagaggtgctgtctatgaacgagtaaccacaattaatcaagaaatccaaaaaattaaacttggaattcaacaactaaaagatgctgctgaaagggagaaactgaagtcccaggaaatatttctaaacttgaaaactgctttggagaaataccacgacggtattgaaaaggcagcagaggactcctatgctaagatagatgagaagacagctgaactgaagaggaagatgttcaaaatgtcaacctgattaacaaaattacatgtctttttgtaaatggcttgccatcttttaattttctatttagaaagaaaagttgaagcgaatggaagtatcagaagtaccaaataatgttggcttcatcagtttttatacactctcataagtagttaataagatgaatttaatgtaggcttttattaatttataattaaaataacttgtgcagctattcatgtctctactctgccccttgttgtaaatagtttgagtaaaacaaaactagttacctttgaaatatatatatttttttctgttaaaaaaaaaaaaaaaaaaaaaa

SEQ ID NO: 4268 - protein, 464 aa, Homo sapien
METLSFPRYNVAEIVIHIRNKILTGADGKNLTKNDLYPNPKPEVLHMIYMRALQIVYGIRLEHFYMMPVNSEVMYPHLMEGFLPFSNLVTHLDSFLPICRVNDFETADILCPKAKRTSRFLSGIINFIHFREACRETYMEFLWQYKSSADKMQQLNAAHQEALMKLERLDSVPVEEQEEFKQLSDGIQELQQSLNQDFHQKTIVLQEGNSQKKSNISEKTKRLNELKLLVVSLKEIQESLKTKIVDSPEKLKNYKEKMKDTVQKLKNARQEVVEKYEIYGDSVDCLPSCQLEVQLYQKKIQDLSDNREKLASILKESLNLEDQIESDESELKKLKTEENSFKRLMIVKKEKLATAQFKINKKHEDVKQYKRTVIEDCNKVQEKRGAVYERVTTINQEIQKIKLGIQQLKDAAEREKLKSQEIFLNLKTALEKYHDGIEKAAEDSYAKIDEKTAELKRKMFKMST

SEQ ID NO: 4269 - DNA, 4310 bp, Homo sapien
  Unsure 2600: Unknown base
cctgcggctcccccggctttcggagcccgggggcggcctgtggcgcgcggagcccgcgccggactgcgcctctttggaccttgaggggaaacatgcgtttgcskwggatcrwttgaaattctgagkytrggatmcsmgsccgccygcctgmytckkccgmsscgcgggytttttcstatttttccttttgctttttttccttttctccctccgggtctcctttttgactccctccccctttatgctcgcccagccctccccctgctgctgagaagtgggggagggtctcggcctccaggttcccgccccaccggggcccgggcgagcatggggggcaagcagagcacggcggcccgctcccggggccccttcccgggggtctccaccgatgacagcgccgtgccgccgccgggaggggcgccccatttcgggcactaccggacgggcggcggggccatggggctgcgcagccgctcggtcagctcggtggcaggcatgggcatggaccccagcacggccgggggggtgccctttggcctctacacccccgcctcccggggcaccggcgactccgagagggcgcccggcggcggagggtctgcgtccgactccacctatgcccatggcaatggttaccaggagacgggcggcggtcaccatagagacgggatgctgtacctgggctcccgagcctcgctggcggatgctctacctctgcacatcgcacccaggtggttcagctcgcatagtggtttcaagtgccccatttgctccaagtctgtggcttctgacgagatggaaatgcactttataatgtgtttgagcaaacctcgcctctcctacaacgatgatgtgctgactaaagacgcgggtgagtgtgtgatctgcctggaggagctgctgcagggggacacgatagccaggctgccctgcctgtgcatctatcacaaaagctgcatagactcgtggtttgaagtgaacagatcttgtccggaacaccctgcggactgacctgcgggcttgcttgctgactcctctcaaagggacagagcgcccctgctccagggaggaggctcaccggaccctggggcagagctgagcttgggacaccagcgggaacagggcaccccttctgcactgacttccagatcatggttctcccttcctccctgaggacaccaaattggatgagagcaagtttgagagaagaatgaatcaactgctatccttcccctcacccctcagcccaggagggaaagggcattttctttttcatctttgaaaggcattgtgggtctgtctttaaagtgtttacaaaaaaaaattatataaaaaaaaagtctagtgtcgactggtgttttccctcgtgatgtttacagcttgctgtttgctgcccagccataacccactcagtgacagacgaacacagctaaggcctcgctgccagccttctgacggcgggcgagcacacggtctcttcccctgccccaactggccctctccaccaccaacttctctactttgggtttgtttggttttttccctctatttttctggctggttttttgctcttttctccccttgagaccctaatatcttgacttcattgccaaaaaacaacccattgagaactttcttcctactgatcccatctcttttcccttctttcctcctggttccggtcagttcagaggatttaacaatcacaagtgtcctgcaaaaatgcctgaacattattcttaggccctcgtggatttttttttttcagaaaacttaaacaaaaaaagacttactaagaaatatgtacagctacccctgttttcaggcactatgtttgagaacattttagccattgatgttcacacgtggcatcagcccatgcaagataggtttctgtatttatatattaaaatacaaaaaaaaacttataaaatgtttaaaaaaatgttcaaagcttgggagaaaagctttcttcattagtcaaggtgttttgatatggtattaaaatgtctaataaaagatggcactgcgtgattttattttaatgraagtgttatacaatcaagaaatgggggcaagggsctgccccccactccctcacctacctccttagcattccttcaggctgctactcggggctccaggtgtgtgaattggtcctcagatagtcaggcctgggtggagggagtggcaagtcargcgtgcctcctacaagcttcctaacctcttaagcatcatggaaccagtcagccctctgtggagtcattgtgccggacctctgaaaagatctgcaggggccaaratgttgcarccaccsgaggctgcarggwtygtgggttcttccaggtgtgggcccagcccccctccttycagcctttgctccccatcccacgttccactckccctgcctggtgkttgcgtctcagtgcttgamtcacgggcatgcttcattgaggcccaggaagaggccctggtttggggctgtgccagcttcagagcccttgaaccagaaccaactgctcaggctcacaaaagttggcaaaatgcgggctgggcaggcagctcggggcagggagcagcagtgcaggcctggcctgtgntccccgtgcccagcgggycscggagcagcattccagagcctcctgcagagccagcgaaggaaagctctagagggagacgactccaccgcctctctgctctgacccttctcaggcccgcctgatgtgctggaccatccccctgctgccacggcccctggctccgcagtcaccctccatcagatgcttccagaagcacctactctgtgcaagggcattcacaacaggccagtgggcaaacgtgagccagggccagcggagaaacactaaagaagacttcggtggttcagagcctgggtctcagcgcgggacccgtctggggttgaagaccttkggggctkttgtgagtyggtggcaggaacgtgggctytagamtgtgcattcaggctctcctacttggcagaatgatcttggggaaacgacttcatctgaacttcagatatttcacatgtgaagcggggacaaaaccatgcagctcagaggtccctgtgggggctgggggagctgccctgcaggtcttggcacatgcacagcaggctccccatagctttgtcaccacaaagggcactgttctattcacagcacctcctgcttctgcctggcaactgtgtctccctgtgctatatttaattccaccagcaaagctgkcggaggcagggcccagcctgaaaggagatctccttgcctgacccctgggacctgggaaatggaggcttcatgtgcccgccttgsskyttaaagcctgctggctttggcagtgccatgggtgagccgagcagctgtgaggtgggtggggcagggctgtagccacgccgggtgctattccaggctctaggggctggtgctcatccccacccccagcgacttccgtcctacctggcatgctgcagccctctgccggctgtggtgtcctgaatttggacccaggttgcctgctcttgttgtgggggtgggattggggctgtctgtgtttcccaggtggagctcatgtttgtgatcctctatctggacagctctccagaatcctgtgttgcccctgttctgcctttctgggatgggagagaaggtgagggagccggcgagccaggttctaccctctctgctaagggcctagcacgctttgatgaggttcctggacgtgagaccctcacaaagaccaaccattcctctaatagccatttaacggtactgcagttcatgggaaaatgtcctcattcttaggagatagatgctggattatataggtgaatgccttcaagaaatgtgtaatttaattccaaatagttccccccaaaatacacaaagcaaataaggccaaaatgttcattgttgaatctgcagtggctggtatttcagtgaacagtgtacttgttctttcaacttttctgtatgtttggaatttttcttaataaaagattgtgggaaatggtcatttgctgagcgcctcctagttgccaggcactggagggcgcatcaaagaagagtcctacccaggagggagagcgcagctgctgcaggattctcgcctggaagagtgggtggctggctggctggctggaaggggaggggcgagagggctgtctcggtgatgagcacacgcgtgctggggtggtttggggagagggctgagatttgtcaccagtgagcccttggcacggtctctgctccccaccagggcagcacgggacagaaacgtcacggaggagtagcctc

SEQ ID NO: 4270 - protein, 227 aa, Homo sapien
MGGKQSTAARSRGPFPGVSTDDSAVPPPGGAPHFGHYRTGGGAMGLRSRSVSSVAGMGMDPSTAGGVPFGLYTPASRGTGDSERAPGGGGSASDSTYAHGNGYQETGGGHHRDGMLYLGSRASLADALPLHIAPRWFSSHSGFKCPICSKSVASDEMEMHFIMCLSKPRLSYNDDVLTKDAGECVICLEELLQGDTIARLPCLCIYHKSCIDSWFEVNRSCPEHPAD

SEQ ID NO: 4271 - DNA, 4310 bp, Homo sapien; identical to SEQ ID NO: 4269
  Unsure 2600: Unknown base

SEQ ID NO: 4272 - protein, 227 aa, Homo sapien; identical to SEQ ID NO: 4270

SEQ ID NO: 4273 - DNA, 1218 bp, Homo sapien
tcgctagaactgcgtctcgcgacccagggccggtttccggaggacagccaacaagcgatgctgccgccgccgtttcctgattggttgtgggtggctacctcttcgttctgattggccgctagtgagcaagatgctgagcaagggtctgaagcggaaacgggaggaggaggaggagaaggaacctctggcagtcgactcctggtggctagatcctggccacgcagcggtggcacaggcacccccggccgtggcctctagctccctctttgacctctcagtgctcaagctccaccacagcctgcagcagagtgagccggacctgcggcacctggtgctggtcgtgaacactctgcggcgcatccaggcgtccatggcacccgcggctgccctgccacctgtgcctagcccacctgcagcccccagtgtggctgacaacttactggcaagctcggacgctgccctttcagcctccatggccagcctcctggaggacctcagccacattgagggcctgagtcaggctccccaacccttggcagacgaggggccaccaggccgtagcatcgggggagcagcgcccagcctgggtgccttggacctgctgggcccagccactggctgtctactggacgatgggcttgagggcctgtttgaggatattgacacctctatgtatgacaatgaactttgggcaccagcctctgagggcctcaaaccaggccctgaggatgggccgggcaaggaggaagctccggagctggacgaggccgaattggactacctcatggatgtgctggtgggcacacaggcactggagcgaccgccggggccagggcgctgagccctcgtgctggaatggttgtctggtatctgaactgagcctgctggctggaccaactgtcctcgaaaagacacagctggcttccctagtacagagaacagggcttgggccactttggagagacagaatctagtcctgggcaacttcacatccgtcctcctgtctcagggctggcagggggagcctggaattaccccctagtgatggaatgacagggtctggtggggactgaattccctggccctggggtcatagcttgggctgttccttctctgatacgggaagagaccccaatcagatttttcaaattaaagccagtcctgggaaaaaaaaaaaaaaaaaaaaaaaaaaaaaaaaaaaaaaaaaaaaaaaaaaaa

SEQ ID NO: 4274 - protein, 236 aa, Homo sapien
MLSKGLKRKREEEEEKEPLAVDSWWLDPGHAAVAQAPPAVASSSLFDLSVLKLHHSLQQSEPDLRHLVLVVNTLRRIQASMAPAAALPPVPSPPAAPSVADNLLASSDAALSASMASLLEDLSHIEGLSQAPQPLADEGPPGRSIGGAAPSLGALDLLGPATGCLLDDGLEGLFEDIDTSMYDNELWAPASEGLKPGPEDGPGKEEAPELDEAELDYLMDVLVGTQALERPPGPGR

SEQ ID NO: 4275 - DNA, 1914 bp, Homo sapien
acgaggatccgggttccaacccagggggaaaaatgcggcctttgactgaagaggagacccgtgtcatgtttgagaagatagcgaaatacattggggagaatcttcaactgctggtggaccggcccgatggcacctactgtttccgtctgcacaacgaccgggtgtactatgtgagtgagaagattatgaagctggccgccaatatttccggggacaagctggtgtcgctggggacctgctttggaaaattcactaaaacccacaagtttcggttgcacgtcacagctctggattaccttgcaccttatgccaagggttttggggtggcagccaaatctacacaagactgcagaaaagtagaccccatggcgattgtggtatttcatcaagcagacattggggaatatgtgcggcatgaagagacgttgacttaaaacgaagccattccaaggacagacggctgtatggaaaggccgagctttgtttcctgtgtttgtgtggactccaccatcatgttgaattttgtcaacactctggcctcttcagggacttcttatttactgtactctctatcactgacaaatgcaggctggattcttattatatacagagatggctcaaaaatggggtttcagatctttgtgacgaaatagaatactgtttcatatttgaatcagaggggcttcttgttctgagaaataggttcaaaatcattggaaccaggaacaagaatagcttattgttatctgtgataacactgttttctaaacacaaggattttcttttttattaatatgcaacatagacattgccataacagaataataaaccacatgtggggttttaaaaatgaaatttggctaataggagcaattcagctatttttctatacagtaattggtgtgtggtatagaagaaaaacgggttcaaaccccacttctgccacctaccagctatatggccttgaatgagtcattcagctttaataaggttcattttcttctgtttaaaaagacacaaaacttgaaaatcagctttggccatctacctgagaattagaaagtctgatttttggaattagaaatcatgattgtaggctgggcacagtggctcgcgcctgtaatcccagcactttgggaggccaaggcggacggatcacttgaggttaggagtttgagaccagcctggccaacatggtgaaaccccatctctactaaaaaaaaaaaaaaattaggtgtggtgacacatggctgtggtcctagttacttgggaggctgaggcaggagaatggcttgaactggggaagcagagcttgcagtgagccaagatggtgccattgcactccagcctgggcgtgacagagtgagactccatctgattgtaaagcatctagtacagtgtccagtgccttggaaatgataggtatggaataaatggtaattatttttatattatatatattatgtattcctgttattaagtgtagagttttatgagtataatttgattttattaccttcttttttacaagctgttttctcagtatttttcttggatgggatgacgctaggctggaaagtttttttcatcactatgattttataaaacaattttttctatgaacctttacttacttgactggattggactaaaagcactgatcagaggccacgacataaaaattcagtccctttgtccttccccgtgcctcccaaagttactttaagatccttagaatatttctttaaatattttatagacaaaaaatttaaagactatctgtattgcaaaattaaactatttctttaatgaatatattgcttattttaagttccaaaggtgaagtctttaagaataaaacattaccaactcctgcttttatatgtaaaaaacaaaaaaaaaaaaaaaaaaaaa

SEQ ID NO: 4276 - protein, 133 aa, Homo sapien
MRPLTEEETRVMFEKIAKYIGENLQLLVDRPDGTYCFRLHNDRVYYVSEKIMKLAANISGDKLVSLGTCFGKFTKTHKFRLHVTALDYLAPYAKGFGVAAKSTQDCRKVDPMAIVVFHQADIGEYVRHEETLT

SEQ ID NO: 4277 - DNA, 2883 bp, Homo sapien
aacagatcttcatgaatgtcgctatctttgaggatgaagtttttgctggagttaccacacaccaggaactctttccacacagcctgctgagtgtgattgccaacttcatccctttctctgatctcaaccagagtccacggaacatgtaccaatgccagatgggtaagcaaactatgggctttccacttctcacttatcaagaccgatcggataacaaactgtatcgtcttcagactcctcagagtcccttggtgagaccctccatgtatgattattatgacatggataactatccaattgggaccaatgccatcgttgctgtgatttcttacactggctatgatatggaagatgccatgattgtgaataaggcctcttgggaacgaggctttgcccatggaagtgtctacaagtctgagttcatagacctctctgaaaaaattaaacaaggagatagtagcctggtgtttggcatcaaacctggtgacccacgcgttctgcagaagttagatgacgatggattgccgtttataggagcaaaactgcagtacggagatccgtattacagctacctcaacctcaacaccggggaaagttttgtgatgtactataagagtaaagaaaattgtgttgtggataacatcaaagtgtgcagtaatgacactgggagtggaaaattcaagtgtgtttgcatcactatgagagtgcctcggaacccaactatcggagataaatttgccagtcgccatgggcagaagggcattttaagcagattgtggccggctgaggacatgccttttactgagagtgggatggtcccagacattctgttcaatccccatggttttccatcccgcatgaccattgggatgttaattgagagtatggccgggaagtctgcagctttgcatggtctctgccatgatgctacacccttcatcttctcagaggagaactcggccttagaatactttggtgagatgttaaaggctgctggctacaatttctatggcaccgagaggttatatagtggcatcagtgggctagaactggaagcagacatcttcataggagtggtttattatcagcgcttacgccatatggtctcagacaaatttcaagtaaggacaactggagcccgagacagagtcaccaaccagcctattgggggaagaaatgtccagggtggaatccgttttggggagatggaacgggatgcgcttttagctcatggtacatcttttctccttcatgaccgcctcttcaactgctcagatcggtcggtagcccatgtgtgtgaagtgtggcagtttactctctccactgttggagaagccacccccttcttggtctgccatgcgcaacagaaaatacaactgtactctgtgtagtcgcagtgacactatcgatactgtttctgtgccttatgtttttcggtattttgtagctgaactggcagctatgaacatcaaagtgaaactggatgttgtttaacttgatgttgaccttttggattaaggggactatcagattaaagcaaaatgtaattttaattcaatgaagatatcattaccaggttactcttgagatttttcaacggtgttagaactctcaaccaagacctgaaaaccaagtatgcaaggtttctgaatctctctggtagattaactattgacaatgattttctgttatctttgttcaaaaagttcatgtcttctcaaaatatgaaatattgataaatggaagagcatacggtgacaagtctcctttccaaccccaggttccctacaccctgctctcagcaggcagtgagtgtcacacacctgttaatccatcttgagcaggacagtactatacaaatagaatgcaagctgtaatgtaattttatattttcttatagccacgttgaagtaaaaacaaacaggtacagtgttttttaccagctttatagaagtacagttgttacatatttaatgaatacaatttgatgggtctgactatatgcacacacctttgataccatcaccacaatcagggtaataaacatacctgtcatctccacaagtttcctcctgcccctttgttttttgctttttggttgctgttgagtttttgttttgtcttctgtggtaagaacacttaactcaagacctaccctcttaacaaatctttaagtgcacgatatagtattgttaattccaggcaccatgttgtacaacagatctttagaccttacttgtcttgcataactgaagctttatacctgttgaacaactctccatttccctggcccctagcaaccacccttctaccctgtttctatgagtttgactattacagatatctcatatagtgggatcatgcaatatttgtcctgtgactggcttatttcacttagcatagtgaaataagattcatccattttggaagccaggcatggtgctgtgcatctatagtccctgctatttgagaggctgaggtgggaggatcatttgagtgcaggagttcaaggacagcctgggtaatataggaagaccctgtcttgaagaccctgacctcaagtgatccacccacctcggcctccgaaagtgctaggattacaggtgtgagccactgtgcctggcctccggtgagtattttatatttagtctacacttccatacttggcttttttctgcttttatgttgatctgctttcatagcagtgtgtagagtgccacttatgttttctttcttgtgtacagtattttattgtatggatttaccatcccctgtgtatttaagttgttccattctttggccattataacttttttctgcaaatattctggtgacttatctttggccattataaactgttgataataaaaaaaaaaaaaaaaa

SEQ ID NO: 4278 - protein, 459 aa, Homo sapien
MNVAIFEDEVFAGVTTHQELFPHSLLSVIANFIPFSDLNQSPRNMYQCQMGKQTMGFPLLTYQDRSDNKLYRLQTPQSPLVRPSMYDYYDMDNYPIGTNAIVAVISYTGYDMEDAMIVNKASWERGFAHGSVYKSEFIDLSEKIKQGDSSLVFGIKPGDPRVLQKLDDDGLPFIGAKLQYGDPYYSYLNLNTGESFVMYYKSKENCVVDNIKVCSNDTGSGKFKCVCITMRVPRNPTIGDKFASRHGQKGILSRLWPAEDMPFTESGMVPDILFNPHGFPSRMTIGMLIESMAGKSAALHGLCHDATPFIFSEENSALEYFGEMLKAAGYNFYGTERLYSGISGLELEADIFIGVVYYQRLRHMVSDKFQVRTTGARDRVTNQPIGGRNVQGGIRFGEMERDALLAHGTSFLLHDRLFNCSDRSVAHVCEVWQFTLSTVGEATPFLVCHAQQKIQLYSV

SEQ ID NO: 4279 - DNA, 4326 bp, Homo sapien; identical to SEQ ID NO: 3856
  Unsure 2587: Unknown base
  Unsure 3487: Unknown base
  Unsure 3493: Unknown base

SEQ ID NO: 4280 - protein, 733 aa, Homo sapien; identical to SEQ ID NO: 3857

SEQ ID NO: 4281 - DNA, 1749 bp, Homo sapien
gtggcctcgaggtggtggcagggccgccccctgcagtccggagacgaacgcacggaccgggcctccggaggcaggttcggctggaaggaaccgctctcgcttcgtcctacacttgcgcaaatgtctccgagcttactcacatagcatattggtatatcaaaatgaaatgcaaggaaccaaaaataacataattgaaggcagtaaaagtgaaattaaataggaagatcatcagtcaaggaagacccactggagaggacagaaaatgaagcagtgttttatcatgtgtatttcagcaggtcttcttgaaatttaactaaaaatatgactgctctctcttcagagaactgctcttttcagtaccagttacgtcaaacaaaccagcccctagacgttaactatctgctattcttgatcatacttgggaaaatattattaaatatccttacactaggaatgagaagaaaaaacacctgtcaaaattttatggaatatttttgcatttcactagcattcgttgatcttttacttttggtaaacatttccattatattgtatttcagggattttgtacttttaagcattaggttcactaaataccacatctgcctatttactcaaattatttcctttacttatggctttttgcattatccagttttcctgacagcttgtatagattattgcctgaatttctctaaaacaaccaagctttcatttaagtgtcaaaaattattttatttctttacagtaattttaatttggatttcagtccttgcttatgttttgggagacccagccatctaccaaagcctgaaggcacagaatgcttattctcgtcactgtcctttctatgtcagcattcagagttactggctgtcatttttcatggtgatgattttatttgtagctttcataacctgttgggaagaagttactactttggtacaggctatcaggataacttcctatatgaatgaaactatcttatattttcctttttcatcccactccagttatactgtgagatctaaaaaaatattcttatccaagctcattgtctgttttctcagtacctggttaccatttgtactacttcaggtaatcattgttttacttaaagttcagattccagcatatattgagatgaatattccctggttatactttgtcaatagttttctcattgctacagtgtattggtttaattgtcacaagcttaatttaaaagacattggattacctttggatccatttgtcaactggaagtgctgcttcattccacttacaattcctaatcttgagcaaattgaaaagcctatatcaataatgatttgttaatattattaattaaaagttacagctgtcataagatcataattttatgaacagaaagaactcaggacatattaaaaaataaactgaactaaaacaacttttgccccctgactgatagcatttcagaatgtgtcttttgaagggctataccagttattaaatagtgttttattttaaaaacaaaataattccaagaagtttttatagttattcagggacactatattacaaatattactttgttattaacacaaaaagtgataagagttaacatttggctatactgatgtttgtgttactcaaaaaaactactggatgcaaactgttatgtaaatctgagatttcactgacaactttaagatatcaacctaaacatttttattaaatgttcaaatgtaagcaagaaaaaaaaaa

SEQ ID NO: 4282 - protein, 338 aa, Homo sapien
MTALSSENCSFQYQLRQTNQPLDVNYLLFLIILGKILLNILTLGMRRKNTCQNFMEYFCISLAFVDLLLLVNISIILYFRDFVLLSIRFTKYHICLFTQIISFTYGFLHYPVFLTACIDYCLNFSKTTKLSFKCQKLFYFFTVILIWISVLAYVLGDPAIYQSLKAQNAYSRHCPFYVSIQSYWLSFFMVMILFVAFITCWEEVTTLVQAIRITSYMNETILYFPFSSHSSYTVRSKKIFLSKLIVCFLSTWLPFVLLQVIIVLLKVQIPAYIEMNIPWLYFVNSFLIATVYWFNCHKLNLKDIGLPLDPFVNWKCCFIPLTIPNLEQIEKPISIMIC

SEQ ID NO: 4283 - DNA, 2952 bp, Homo sapien
cagtttcattaggctctgaagccattacaaaggttgcttaacttctaattatttgatcactgaggaaaatccagaaagctacacaacactgaaggggtgaaataaaagtccagcgatccagcgaaagaaaagagaagtgacagaaacaactttacctggactgaagataaaagcacagacaagagaacaatgccctggacatggctccagagatccacatgacaggcccaatgtgcctcattgagaacactaatggggaactggtggcgaatccagaagctctgaaaatcctgtctgccattacacagcctgtggtggtggtggcaattgtgggcctctaccgcacaggaaaatcctacctgatgaacaagctagctgggaagaataagggcttctctctgggctccacagtgaaatctcacaccaaaggaatctggatgtggtgtgtgcctcaccccaaaaagccagaacacaccttagtcctgcttgacactgagggcctgggagatgtaaagaagggtgacaaccagaatgactcctggatcttcaccctggccgtcctcctgagcagcactctcgtgtacaatagcatgggaaccatcaaccagcaggctatggaccaactgtactatgtgacagagctgacacatcgaatccgatcaaaatcctcacctgatgagaatgagaatgaggattcagctgactttgtgagcttcttcccagattttgtgtggacactgagagatttctccctggacttggaagcagatggacaacccctcacaccagatgagtacctggagtattccctgaagctaacgcaaggtaacaggaagcttgcccagcttgagaaactacaagatgaagagctggaccctgaatttgtgcaacaagtagcagacttctgttcctacatctttagcaattccaaaactaaaactctttcaggaggcatcaaggtcaatgggccttgtctagagagcctagtgctgacctatatcaatgctatcagcagaggggatctgccctgcatggagaacgcagtcctggccttggcccagatagagaactcagccgcagtgcaaaaggctattgcccactatgaccagcagatgggccagaaggtgcagctgcccgcagaaaccctccaggagctgctggacctgcacagggttagtgagagggaggccactgaagtctatatgaagaactctttcaaggatgtggaccatctgtttcaaaagaaattagcggcccagctagacaaaaagcgggatgacttttgtaaacagaatcaagaagcatcatcagatcgttgctcagctttacttcaggtcattttcagtcctctagaagaagaagtgaaggcgggaatttattcgaaaccagggggctattgtctctttattcagaagctacaagacctggagaaaaagtactatgaggaaccaaggaaggggatacaggctgaagagattctgcagacatacttgaaatccaaggagtctgtgaccgatgcaattctacagacagaccagattctcacagaaaaggaaaaggagattgaagtggaatgtgtaaaagctgaatctgcacaggcttcagcaaaaatggtggaggaaatgcaaataaagtatcagcagatgatggaagagaaagagaagagttatcaagaacatgtgaaacaattgactgagaagatggagagggagagggcccagttgctggaagagcaagagaagaccctcactagtaaacttcaggaacaggcccgagtactaaaggagagatgccaaggtgaaagtacccaacttcaaaatgagatacaaaagctacagaagaccctgaaaaaaaaaaccaagagatatatgtcgcataagctaaagatctaaacaacagagcttttctgtcatcctaacccaaggcataactgaaacaattttagaatttggaacaagtgtcactatatttgataataattagatcttgcatcataacactaaaagtttacaagaacatgcagttcaatgatcaaaatcatgttttttccttaaaaagattgtaaattgtgcaacaaagatgcatttacctctgtaccaacagaggagggatcatgagttgccaccactcagaagtttattcttccagacgaccagtggatactgaggaaagtcttaggtaaaaatcttgggacatatttgggcactggtttggccaagtgtacaataggtcccaatatcagaaacaaccatcctagcttcctagggaagacagtgtacagttctccattatatcaaggctacaaggtctatgagcaataatgtgatttctggacattgcccatggataattctcactgatggatctcaagctaaagcaaaccatcttatacagagatctagaatcttatattttccataggaaggtaaagaaatcattagcaagagtaggaattgaatcataaacaaattggctaatgaagaaatcttttctttcttgttcaattcatctagattataaccttaatgtgacacctgagacctttagacagttgaccctgaattaaatagtcacatggtaacaattatgcactgtgtaattttagtaatgtataacatgcaatgatgcactttaactgaagatagagactatgttagaaaattgaactaatttaattatttgattgttttaatcctaaagcataagttagtcttttcctgattcttaaaggtcatacttgaaatcctgccaattttccccaaagggaatatggaattttttttgactttcttttgagcaataaaataattgtcttgccattacttagtatatgtagacttcatcccaattgtcaaacatcctaggtaagtggttgacatttcttacagcaattacagattatttttgaactagaaataaactaaactagaaacaaaaaaaaaaaaaaaaaaa

SEQ ID NO: 4284 - protein, 563 aa, Homo sapien
MAPEIHMTGPMCLIENTNGELVANPEALKILSAITQPVVVVAIVGLYRTGKSYLMNKLAGKNKGFSLGSTVKSHTKGIWMWCVPHPKKPEHTLVLLDTEGLGDVKKGDNQNDSWIFTLAVLLSSTLVYNSMGTINQQAMDQLYYVTELTHRIRSKSSPDENENEDSADFVSFFPDFVWTLRDFSLDLEADGQPLTPDEYLEYSLKLTQGNRKLAQLEKLQDEELDPEFVQQVADFCSYIFSNSKTKTLSGGIKVNGPCLESLVLTYINAISRGDLPCMENAVLALAQIENSAAVQKAIAHYDQQMGQKVQLPAETLQELLDLHRVSEREATEVYMKNSFKDVDHLFQKKLAAQLDKKRDDFCKQNQEASSDRCSALLQVIFSPLEEEVKAGIYSKPGGYCLFIQKLQDLEKKYYEEPRKGIQAEEILQTYLKSKESVTDAILQTDQILTEKEKEIEVECVKAESAQASAKMVEEMQIKYQQMMEEKEKSYQEHVKQLTEKMERERAQLLEEQEKTLTSKLQEQARVLKERCQGESTQLQNEIQKLQKTLKKKTKRYMSHKLKI

SEQ ID NO: 4285 - DNA, 1608 bp, Homo sapien
ctagatccggggaagggttttgcagaagtacccagaactgtgtccaaggtttcctcagatttgggctgttccgcagcggcaggtcccgggaaccaaggcaacagacatcttcctaggctcgcgagagcgcccccttgtcccacggctgctggggccccccagtagccatggctccggtgtccggctcacgcagcccggatagggaggcctcgggctcggggggaagacgtcgcagttcgtcgaagagtccgaagcccagcaaatctgcccgctccccgcggggccgccgctctcgctcgcactcttgctctcggtccggggaccggaatggactcgcccatcagctgggtggcctcagccaaggctcccgaaaccagtcctaccgctcacgctcgcggtcgcgttctagagagcggccctctgcgccccggggcatccccttcgcttctgcctcctcgtcagtctattacggcagctactcgcgcccctacgggagcgacaagccttggcctagcctcctcgacaaggagagggaggagagcctgcggcagaagagattaagtgagagagagagaattggagaattgggagctcctgaagtatggggactttctccaaagaatcctgaaccagattctgatgaacatacaccagtggaggatgaagagccaaagaaaagcactacttcagcttctacttcagaagaagaaaaaaagaagaagtctagccgttcaaaagaaaggtccaagaaaaggagaaagaaaaaatcatcgaaaagaaaacataagaagtattctgaagatagcgacagtgactctgattctgaaacagactccagtgatgaagataacaaaaggagagcaaagaaagccaagaaaaaggaaaagaagaagaaacacagatcgaagaaatataagaaaaagaggtctaagaagagcagaaaagagtccagtgattcaagctctaaagaatcccaagaagagtttctggaaaatccctggaaggatcgaacaaaggctgaagaaccatcagatttaattggcccagaggctccaaaaacacttacctctcaagatgataaacctttgaactatggccatgctctgttacctggtgaaggtgcagctatggctgaatatgtaaaagctggaaaacgtatcccacgaagaggtgaaattggcttgacaagtgaagaaattgcatcatttgaatgctcaggttatgtaatgagtggtagcaggcatcgccgaatggaggctgtgcgactgcgaaaagagaaccagatctacagtgctgatgagaagagagcccttgcatcctttaaccaagaagagagacgaaagagagagaacaagattctggccagttttcgagaaatggtttacagaaagaccaaagggaaggatgacaaataaagattttctgattgtccagaagacatttttaacaacaaaaaagaaagtctgggttccacacatacatagaaaaagattattatgttctgagaaagctttacagtgctactgtgccttctatttaattctttcagtccttcaataaaaagctgcttattgaaaaaaaaaaaaaaaaaaaaaaaaaaaaaaaaaa

SEQ ID NO: 4286 - protein, 415 aa, Homo sapien
MAPVSGSRSPDREASGSGGRRRSSSKSPKPSKSARSPRGRRSRSHSCSRSGDRNGLAHQLGGLSQGSRNQSYRSRSRSRSRERPSAPRGIPFASASSSVYYGSYSRPYGSDKPWPSLLDKEREESLRQKRLSERERIGELGAPEVWGLSPKNPEPDSDEHTPVEDEEPKKSTTSASTSEEEKKKKSSRSKERSKKRRKKKSSKRKHKKYSEDSDSDSDSETDSSDEDNKRRAKKAKKKEKKKKHRSKKYKKKRSKKSRKESSDSSSKESQEEFLENPWKDRTKAEEPSDLIGPEAPKTLTSQDDKPLNYGHALLPGEGAAMAEYVKAGKRIPRRGEIGLTSEEIASFECSGYVMSGSRHRRMEAVRLRKENQIYSADEKRALASFNQEERRKRENKILASFREMVYRKTKGKDDK

SEQ ID NO: 4287 - DNA, 689 bp, Homo sapien
gcaagagagcgggaagccgagctgggcgagaagtaggggagggcggtgctccgccgcggtggcggttgctatcgcttcgcagaacctactcaggcagccagctgagaagagttgagggaaagtgctgctgctgggtctgcagacgcgatggataacgtgcagccgaaaataaaacatcgccccttctgcttcagtgtgaaaggccacgtgaagatgctgcggctggcactaactgtgacatctatgaccttttttatcatcgcacaagcccctgaaccatatattgttatcactggatttgaagtcaccgttatcttatttttcatacttttatatgtactcagacttgatcgattaatgaagtggttattttggcctttgcttgatattatcaactcactggtaacaacagtattcatgctcatcgtatctgtgttggcactgataccagaaaccacaacattgacagttggtggaggggtgtttgcacttgtgacagcagtatgctgtcttgccgacggggcccttatttaccggaagcttctgttcaatcccagcggtccttaccagaaaaagcctgtgcatgaaaaaaaagaagttttgtaattttatattactttttagtttgatactaagtattaaacatatttctgtattcttccaaaaaaaaaaaaaaaaaaaaaaaaaaa

SEQ ID NO: 4288 - protein, 152 aa, Homo sapien
MDNVQPKIKHRPFCFSVKGHVKMLRLALTVTSMTFFIIAQAPEPYIVITGFEVTVILFFILLYVLRLDRLMKWLFWPLLDIINSLVTTVFMLIVSVLALIPETTTLTVGGGVFALVTAVCCLADGALIYRKLLFNPSGPYQKKPVHEKKEVL

SEQ ID NO: 4289 - DNA, 1848 bp, Homo sapien
gctctgcacccctgctgcttctgctttgaaggcggaggctccatgttgtcccctcagcgagtggcagcagctgcctcaagaggagcagatgatgccatggagagcagcaagcctggtccagtgcaggttgttttggttcagaaagatcaacattcctttgagctagatgagaaagccttggccagcatcctcttgcaggaccacatccgagatcttgatgtggtggtggtttcagtggctggtgccttccgaaagggcaagtccttcattctggattttatgctacgatacttatattctcagaaggaaagtggccattcaaattggttgggtgacccagaagaaccgttaacaggattttcctggagagggggatctgatccagaaaccactgggattcaaatctggagtgaagttttcactgtggagaagccaggtgggaagaaggttgcagttgttctgatggatacccagggggcatttgacagccagtcaactgtgaaagactgtgctgccatctttgctctaagcactatgactagttctgttcagatttataatttatctcagaacattcaagaagatgatcttcaacagctgcagctcttcacagaatacggtcgtctggcaatggatgaaattttccgaaagcctttccagacactgatgtttttggttagagataggagtttcccttatgaatatagctatggactccaaggaggaatggcatttttggataagcgtttacaggtgaaggaacatcaacatgaagaaattcagaatgttcgaaatcacattcactcatgtttctccgatgtcacctgctttctcttaccacatccaggactccaggtggccacaagccctgactttgatgggaaattaaaagatattgctggtgaattcaaagagcagttacaggcactgataccgtatgtattaaacccatctaagttaatggaaaaggagatcaatggctcaaaggtcacctgtcggggactactggagtattttaaggcatatattaaaatttatcaaggagaagatctgcctcaccccaagtccatgcttcaggccactgctgaagcctacaacttagcagctgcagcctctgccaaggacatttattataacaacatggaagaggtttgtgggggagagaaaccttatttgtctccagacattctagaggagaagcactgcgaattcaaacaacttgctctggaccattttaagaagaccaagaagatgggtgggaaggatttcagctttcgttaccagcaggagctggaggaggaaatcaaggaattatatgagaacttctgcaagcacaatggtagcaagaacgtcttcagcaccttccgaacccctgcagtgctgttcacgggcattgtagctttgtacatagcctcaggcctcactggcttcataggtcttgaggttgtagcccagttgttcaactgtatggttggactactgttaatagcactcctcacctggggctacatcaggtattctggtcaatatcgtgagctgggcggagctattgattttggtgccgcatatgtgttggagcaggcttcttctcatatcggtaattccactcaggccactgtgagggatgcagttgttggaagaccatccatggataaaaaagctcaatagcatcttaacgtgaagatcaaacaagaacacaacaagcccctactgatttctgggtttctgccacggccacaggttcatatccagaggaatggcagatctgagacgatccaggaagagctaaaacatggccctgtaataaatgagcagacctctataaaagaaaaaaaaaaaaaaaaaaaa

SEQ ID NO: 4290 - protein, 555 aa, Homo sapien
ALHPCCFCFEGGGSMLSPQRVAAAASRGADDAMESSKPGPVQVVLVQKDQHSFELDEKALASILLQDHIRDLDVVVVSVAGAFRKGKSFILDFMLRYLYSQKESGHSNWLGDPEEPLTGFSWRGGSDPETTGIQIWSEVFTVEKPGGKKVAVVLMDTQGAFDSQSTVKDCAAIFALSTMTSSVQIYNLSQNIQEDDLQQLQLFTEYGRLAMDEIFRKPFQTLMFLVRDRSFPYEYSYGLQGGMAFLDKRLQVKEHQHEEIQNVRNHIHSCFSDVTCFLLPHPGLQVATSPDFDGKLKDIAGEFKEQLQALIPYVLNPSKLMEKEINGSKVTCRGLLEYFKAYIKIYQGEDLPHPKSMLQATAEAYNLAAAASAKDIYYNNMEEVCGGEKPYLSPDILEEKHCEFKQLALDHFKKTKKMGGKDFSFRYQQELEEEIKELYENFCKHNGSKNVFSTFRTPAVLFTGIVALYIASGLTGFIGLEVVAQLFNCMVGLLLIALLTWGYIRYSGQYRELGGAIDFGAAYVLEQASSHIGNSTQATVRDAVVGRPSMDKKAQ

SEQ ID NO: 4291 - DNA, 886 bp, Homo sapien
gtcggttccgggcgttaccatcgtccgtgcgcaccgcccggcgtccaggtgagtctcccatctgcagagacgcggacgcgccggcccgcagttggcctgcggagcgcggtggacggtttggcgcccaccaggcgatcaatactttggatttttaatttctagatttggcaattcttcgctgaagtcatcatgagctttttccaactcctgatgaaaaggaaggaactcattcccttggtggtgttcatgactgtggcggcgggtggagcctcatctttcgctgtgtattctctttggaaaaccgatgtgatccttgatcgaaaaaaaaatccagaaccttgggaaactgtggaccctactgtacctcaaaagcttataacaatcaaccaacaatggaaacccattgaagagttgcaaaatgtccaaagggtgaccaaatgacgagccctcgcctctttcttctgaagagtactctataaatctagtggaaacatttctgcacaaactagattctggacaccagtgtgcggaaatgcttctgctacatttttagggtttgtctacattttttgggctctggataaggaattaaaggagtgcagcaataactgcactgtctaaaagtttgtgcttattttcttgtaaatttgaatattgcatattgaaatttttgtttatgatctatgaatgtttttcttaaaatttacaaagctttgtaaattagattttctttaataaaatgccatttgtgcaagatttctcaaagattaggtatatatttaaatggaagagaaaatatttttatgggagaaaaatacatttgaaccatgaaatttcatcttttaaataacatccagtacagatatctgtgtaaaaaaaaaaaaaa

SEQ ID NO: 4292 - protein, 83 aa, Homo sapien
MSFFQLLMKRKELIPLVVFMTVAAGGASSFAVYSLWKTDVILDRKKNPEPWETVDPTVPQKLITINQQWKPIEELQNVQRVTK

SEQ ID NO: 4293 - DNA, 1027 bp, Homo sapien
gaatctctcgcgggcagcagggcgcgcgctgcacgcacagtactaggtcaggtggtgctcccgggtgaggagctgctcctgccggaacaggaggacgcggaaggccctgggggtgcagtggagcgaccgttgagcctgaatgctagagcgtgctcgcgggtgcgcgtttgtatgcggtccgggccttcgacgctgtggggaccgcctgctggtcaccaagtgcggccgcctccgtcacaaggagcccggcagtggaggcggcggcggtgtttactgggtggactctcagcagaagcggtatgttccagtaaaaggagaccatgtgattggcatagtgacagctaaatctggagatatattcaaagttgatgttggagggagtgagccagcttctttgtcttacttgtcatttgaaggtgcaactaaaagaaacagaccaaatgtgcaggttggagatctcatctatggccagtttgtggttgctaataaagacatggaaccagagatggtctgtattgacagctgtggacgagccaatggaatgggtgtcattggacaggatggtctgctttttaaagtgactctgggcttaattagaaagctattagctccagattgtgaaatcatacaggaagtgggaaaactctatccactggagatagtatttggaatgaatggaagaatatgggttaaggcaaaaaccatccagcagactttaattttggcaaacattttagaagcttgtgaacacatgacgtcagatcaaagaaaacagatcttctccagattggcagaaagttgatataggtggacttttttacaggtcagttgaggcaaaaaactatgggttttttcaggtgaacctcccccatttaaatactcagaagataaggtgtgaatgtatgtattattagagtccgaaagtatttttataagttactggttttcacccacgcttttgtgggagagaaaatcattgcaaaatcattttttttgttcggtacaataaagtttactaaaaaacaaa

SEQ ID NO: 4294 - protein, 220 aa, Homo sapien
MLERARGCAFVCGPGLRRCGDRLLVTKCGRLRHKEPGSGGGGGVYWVDSQQKRYVPVKGDHVIGIVTAKSGDIFKVDVGGSEPASLSYLSFEGATKRNRPNVQVGDLIYGQFVVANKDMEPEMVCIDSCGRANGMGVIGQDGLLFKVTLGLIRKLLAPDCEIIQEVGKLYPLEIVFGMNGRIWVKAKTIQQTLILANILEACEHMTSDQRKQIFSRLAES

SEQ ID NO: 4295 - DNA, 1027 bp, Homo sapien; identical to SEQ ID NO: 4293

SEQ ID NO: 4296 - protein, 220 aa, Homo sapien; identical to SEQ ID NO: 4294

SEQ ID NO: 4297 - DNA, 3313 bp, Homo sapien
  Unsure 2584: Unknown base
aggcagcagcagagggagagctcggggcttggaggggaaacagcggaagacctaagattatcgggagggcagcagaggcagagaacgaggacaggacccttggccgtcttcttccagggaacgagaggtcacagcctcgctctccgcttatgcttctggcgccccagcttaaagccgaggctgcggctgacaaagggctcgcgccggtgccgccgcccttctcatccgggcattcgggtccctgcgagaaggagggggaaggacagagggggaggggaaggagccggaggggcgcacacttggagctgaagccctctccagggctccgggccggtgccccaacggacagaggtcgaggaggacccgcagaggtggcagcggccgggggcaggaggatggtgcagaaggagagtcaagcgacgttggaggagcgggagagcgagctcagctccaaccctgccgcctctgcgggggcatcgctggagccgccggcagctccggcacccggagaagacaaccccgccggggctgggggagcggcggtggccggggctgcaggaggggctcggcggttcctctgcggtgtggtggaaggattttatggaagaccttgggttatggaacagagaaaagaactctttagaaggctccagaaatgggaattaaatacatacttgtatgccccaaaagatgactacaaacataggatgttttggcgagagatgtattcagtggaggaagctgagcaacttatgactctcatctctgctgcacgagaatatgagatagagttcatctatgcgatctcacctggattggatatcactttttctaaccccaaggaagtatccacattgaaacgtaaattggaccaggtttctcagtttgggtgcagatcatttgctttgctttttgatgatatagaccataatatgtgtgcagcagacaaagaggtattcagttcttttgctcatgcccaagtctccatcacaaatgaaatctatcagtacctaggagagccagaaactttcctcttctgtcccacagaatactgtggcactttctgttatccaaatgtgtctcagtctccatatttaaggactgtgggtgaaaagcttctacctggaattgaagtgctttggacaggtcccaaagttgtttctaaagaaattccagtagagtccatcgaagaggtttctaagattattaagagagctccagtaatctgggataacattcatgctaatgattatgatcagaagagactgtttctgggcccgtacaaaggaagatccacagaactcatcccacggttaaaaggagtcctcactaatccaaattgtgaatttgaagccaactacgttgctatccacacccttgccacctggtacaaatcaaacatgaatggagtgagaaaagatgtagtgatgactgacagtgaagatagtactgtgtccatccagataaaattagaaaatgaaggcagtgatgaagatattgaaactgatgtactctatagtccacagatggctctaaagctagcattaacagaatggttgcaagagtttggtgtgcctcatcaatacagcagtaggcaagttgcacacagtggagctaaagcaagtgtagttgatgggactcctttagttgcagcaccctctttaaatgccacaaccgtagtaacaacagtttatcaggagcccattatgagccagggagcagccttgagtggtgagcctactactctgaccaaggaagaagaaaagaaacagcctgatgaagaacccatggacatggtggtggaaaaacaagaagaaacggaccacaagaatgacaatcaaatactgagtgaaattgttgaagcgaaaatggcagaggaattgaaaccaatggacactgataaagagagcatagctgaatcaaaatccccagagatgtccatgcaagaagattgtattagtgacattgcccccatgcaaactgatgaacagacaaacaaggagcagtttgtgccaggtccaaatgaaaagcctttgtacactgcggaaccagtgaccctggaggatttgcagttacttgctgatctattctaccttccttacgagcatggacccaaaggagcacagatgttacgggaatttcaatggcttcgagcaaatagtagtgttgtcagtgtcaattgcaaaggaaaagactctgaaaaaattgaagaatggcggtcacgagcagccaagtttgaagagatgtgtggactagtgatgggaatgttcactcggctctccaattgtgccaacaggacaattctttatgacatgtactcctatgtttgggatatcaagagtataatgtctatggtgaagtcttttgtacagtggttaggtaggtgcaccaggaataatctcttctcctcaaatatattgtccctttaaaaaaaattatcccacagggagaaaaacatttagggaattggcacatttccaagtctcttcaattcgttgcctaggtttctttcaaaaataggcattattgaagacttgagatgcaagtcttagtaaatacatcaagcacattaatttttctcccntgggctaattcagcataagtatcttaaaagtatgttagaaagtactgactttaacttgctctgactgaatgctttctggatggaaccctgtataccacttttatctgatttggagatgagacactatgaaatgtgactccacaagctttctgctgcttgctgtgtcttgataacattaatgctatgtttaacagaacaattgctgaaatgacctaaagggcctggcaagaggaagccatcctcccagccctgtgcgcatgcgagctttagtgtaaggctattctggtgctattcagtattatttcacgtggctttttctttatccttctaccaagtattggttttaccaggggatagaaattgtaatcccctaaacatctctgctacattaaatggacttttgtatgtctcctttgaacactgattttttttttttaaattgtcaaacttggtaaaaagcaccagcatggccaagtttctctagggacttcatttcattttcaggttttcaatccagctataaggaatatgtaatggacttatatacagcacacagcaggcagcaaggctgactgacatgtcatagttttcatagtagtcacaaatactatgatgggtttcatggtcttggttgtgaaatagatatctgaaacaccgtgagcttagaataaaaagtagtagtgagattttccactttctgcctgtatacctttgagctcttaaatattt

SEQ ID NO: 4298 - protein, 677 aa, Homo sapien
MVQKESQATLEERESELSSNPAASAGASLEPPAAPAPGEDNPAGAGGAAVAGAAGGARRFLCGVVEGFYGRPWVMEQRKELFRRLQKWELNTYLYAPKDDYKHRMFWREMYSVEEAEQLMTLISAAREYEIEFIYAISPGLDITFSNPKEVSTLKRKLDQVSQFGCRSFALLFDDIDHNMCAADKEVFSSFAHAQVSITNEIYQYLGEPETFLFCPTEYCGTFCYPNVSQSPYLRTVGEKLLPGIEVLWTGPKVVSKEIPVESIEEVSKIIKRAPVIWDNIHANDYDQKRLFLGPYKGRSTELIPRLKGVLTNPNCEFEANYVAIHTLATWYKSNMNGVRKDVVMTDSEDSTVSIQIKLENEGSDEDIETDVLYSPQMALKLALTEWLQEFGVPHQYSSRQVAHSGAKASVVDGTPLVAAPSLNATTVVTTVYQEPIMSQGAALSGEPTTLTKEEEKKQPDEEPMDMVVEKQEETDHKNDNQILSEIVEAKMAEELKPMDTDKESIAESKSPEMSMQEDCISDIAPMQTDEQTNKEQFVPGPNEKPLYTAEPVTLEDLQLLADLFYLPYEHGPKGAQMLREFQWLRANSSVVSVNCKGKDSEKIEEWRSRAAKFEEMCGLVMGMFTRLSNCANRTILYDMYSYVWDIKSIMSMVKSFVQWLGRCTRNNLFSSNILSL

SEQ ID NO: 4299 - DNA, 1136 bp, Homo sapien
gaggggtagagatgcagaaaggcagaaaggagaaaattcaggataactctcctgaggggtgagccaagccctgccatgtagtgcacgcaggacatcaacaaacacagataacaggaaatgatccattccctgtggtcacttattctaaaggccccaaccttcaaagttcaagtagtgatatggatgactccacagaaagggagcagtcacgccttacttcttgccttaagaaaagagaagaaatgaaactgaaggagtgtgtttccatcctcccacggaaggaaagcccctctgtccgatcctccaaagacggaaagctgctggctgcaaccttgctgctggcactgctgtcttgctgcctcacggtggtgtctttctaccaggtggccgccctgcaaggggacctggccagcctccgggcagagctgcagggccaccacgcggagaagctgccagcaggagcaggagcccccaaggccggcctggaggaagctccagctgtcaccgcgggactgaaaatctttgaaccaccagctccaggagaaggcaactccagtcagaacagcagaaataagcgtgccgttcagggtccagaagaaacagtcactcaagactgcttgcaactgattgcagacagtgaaacaccaactatacaaaaaggatcttacacatttgttccatggcttctcagctttaaaaggggaagtgccctagaagaaaaagagaataaaatattggtcaaagaaactggttacttttttatatatggtcaggttttatatactgataagacctacgccatgggacatctaattcagaggaagaaggtccatgtctttggggatgaattgagtctggtgactttgtttcgatgtattcaaaatatgcctgaaacactacccaataattcctgctattcagctggcattgcaaaactggaagaaggagatgaactccaacttgcaataccaagagaaaatgcacaaatatcactggatggagatgtcacattttttggtgcattgaaactgctgtgacctacttacaccatgtctgtagctattttcctccctttctctgtacctctaagaagaaagaatctaacagaaaaaaaaaaaaaaaaaaaaaaaaaaaaa

SEQ ID NO: 4300 - protein, 285 aa, Homo sapien
MDDSTEREQSRLTSCLKKREEMKLKECVSILPRKESPSVRSSKDGKLLAATLLLALLSCCLTVVSFYQVAALQGDLASLRAELQGHHAEKLPAGAGAPKAGLEEAPAVTAGLKIFEPPAPGEGNSSQNSRNKRAVQGPEETVTQDCLQLIADSETPTIQKGSYTFVPWLLSFKRGSALEEKENKILVKETGYFFIYGQVLYTDKTYAMGHLIQRKKVHVFGDELSLVTLFRCIQNMPETLPNNSCYSAGIAKLEEGDELQLAIPRENAQISLDGDVTFFGALKLL

SEQ ID NO: 4301 - DNA, 1595 bp, Homo sapien
tctgggtccgtctcgtcgcgtccgggttgtcactctctcgggttgttactctgtagcttcccggctcgcgaaagggaggacctgtctgggtcatggattttgagaatcttttctcaaaaccccccaacccggccctcggcaaaacggccacggactctgacgaaagaatcgatgatgaaatagatacagaagttgaagaaacacaagaagagaaaattaaactggagtgcgagcaaattcccaaaaaatttagacactctgcaatatcaccaaaaagttcgctgcatagaaaatcaagaagtaaggactatgatgtatatagtgataatgatatctgcagtcaggaatcagaagataattttgccaaagagcttcaacagtacatacaagccagagaaatggcaaatgctgctcaacctgaagaatctacaaagaaagaaggagtaaaagataccccacaggctgctaaacaaaaaaataaaaatcttaaagctggtcacaagaatggcaaacagaagaaaatgaagcgaaaatggcctggccctggaaacaaaggatcaaatgctttgctgaggaacagcggctcacaggaagaggatggtaaacctaaagagaagcagcagcatttgagtcaggcattcatcaaccaacatacagtggaacgcaagggaaaacaaatttgtaaatattttcttgaaaggaaatgtattaagggagaccagtgtaaatttgatcatgatgcagagatagaaaagaaaaaggaaatgtgtaagttttatgtccaaggattttgttccagaggtgaaaactgtctgtatttgcataatgaatatccttgtaagttttaccatacaggaacaaaatgttatcagggagaatactgccagttttctcatgctccactgactcctgaaacacaagaattgttggctaaagttttggatactgaaaagaagtcatgtaaataaaatagacataaaaaggtagcaatgtacagataaagagtactttaacgcccatgcgtgttcaagactgttcaagactggtgatttggagtagtttacaagattcctcattcagagtgccctcttgtgtgactggggtgatgtgcagcttccataatggatgggacagagagctgggatctaatgtacaagtgaagggcttggtcttccctgagacattccagccattggaataggagaggagcatatatggcagaggtgatggctggtgggtaaatgtgatagtaaattgtagaaacctcttctgattgattggatttccttaataaaatcggaagcaaggttaggctgagtgagggtgagtaaagaggtagaggaggtttgaggagagagaactgctcggaagacattggtagatggaccataaaaacagagttagttctctttatgacattaaatagttttacaacatatttttaatggttcacaatttcattttagggcttaaaataaattatggttctatgatttttttaaaccagtttcctattgttagacatttgtttccagtttcttactattataaataaagtgaaacaatatctcttactataccatttctaaaaaaaa

SEQ ID NO: 4302 - protein, 291 aa, Homo sapien
MDFENLFSKPPNPALGKTATDSDERIDDEIDTEVEETQEEKIKLECEQIPKKFRHSAISPKSSLHRKSRSKDYDVYSDNDICSQESEDNFAKELQQYIQAREMANAAQPEESTKKEGVKDTPQAAKQKNKNLKAGHKNGKQKKMKRKWPGPGNKGSNALLRNSGSQEEDGKPKEKQQHLSQAFINQHTVERKGKQICKYFLERKCIKGDQCKFDHDAEIEKKKEMCKFYVQGFCSRGENCLYLHNEYPCKFYHTGTKCYQGEYCQFSHAPLTPETQELLAKVLDTEKKSCK

SEQ ID NO: 4303 - DNA, 1645 bp, Homo sapien
ggattttccttggtcttaagatgggtagaaatgtgatgcgacacatgtctgatgacttaggaagttatgtttctctttcgtgtgatgacttttcttcacaggaattagagattttcatttgctccttttcctcctcctggcttcaaatgtttgttgcagaggcagtctttaaaaagttgtgtctacagagctctggcagtgtttcttctgagccactctctcttcagaaaatggtatattcctatttaccagccttggggaaaactggtgtgcttgggtctggaaagattcaggtgtcaaagaaaataggacagcggccttgttttgactctcagagaaccttactaatgctgaatggtactaaacaaaaacaagtcgaagggctgccagagttactagacctgaaccttgctaaatgttcctcatcattaaaaaaattgaaaaagaagtcagaaggagaattgtcatgttccaaggagaattgcccctctgtagttaaaaagatgaattttcacaagactaatctaaaaggagaaacagccctgcatagagcttgcataaataaccaagtggagaaattgattcttcttctctctttgccaggaatagacatcaatgttaaagacaatgctggctggacgcctttgcatgaagcctgtaactatggcaacacagtgtgtgtccaggaaattttgcaacgttgtccagaggtagatctgctcactcaagtggacggggtgactcctttgcatgatgcactgtcaaacggacatgtagaaattggcaagctgctactacagcatgggggcccagtgcttttacaacagaggaatgctaagggagaattgcccttggattatgtggtttcacctcaaatcaaagaagaactgtttgctattacaaaaatagaagatacagtggagaactttcatgcacaagcagagaaacattttcattaccagcaacttgaatttggctcctttttacttagtaggatgttgctaaatttttgttcaatttttgatttatcttcagagttcattttagcttccaaagggttaactcatctaaatgaactgcttatggcttgtaaaagtcataaagaaaccaccagtgttcatactgactggttactggatctttatgctggaaatataaagacattgcagaaactcccacacattcttaaggaactgcctgagaatttgaaagtgtgtcctggggtacacactgaggccttgatgataacattggaaatgatgtgtcggtcagtcatggagttttcatgatgatgctagaaagtatggattgactttctaaatctgttcagtttgcattggtacttactgtggacttcatagcttactgacagatagtaatttgatttatttattgacagactttgcagccttgctaaattttaaaagcatttttaaaaaaacttctacaaaactctagtatgggcttctgactttttccagggtgtagaatttgactcaaaagtaaaaataattttgttttagtatattctactttcattaatgtttttttgttctgaaagtgatattatattgtacatgtaaaattaatttaaatattttttcaaataaaaatgtaatgtcctgtaaaaaaaaaaaaaaaaaaa

SEQ ID NO: 4304 - protein, 422 aa, Homo sapien
MGRNVMRHMSDDLGSYVSLSCDDFSSQELEIFICSFSSSWLQMFVAEAVFKKLCLQSSGSVSSEPLSLQKMVYSYLPALGKTGVLGSGKIQVSKKIGQRPCFDSQRTLLMLNGTKQKQVEGLPELLDLNLAKCSSSLKKLKKKSEGELSCSKENCPSVVKKMNFHKTNLKGETALHRACINNQVEKLILLLSLPGIDINVKDNAGWTPLHEACNYGNTVCVQEILQRCPEVDLLTQVDGVTPLHDALSNGHVEIGKLLLQHGGPVLLQQRNAKGELPLDYVVSPQIKEELFAITKIEDTVENFHAQAEKHFHYQQLEFGSFLLSRMLLNFCSIFDLSSEFILASKGLTHLNELLMACKSHKETTSVHTDWLLDLYAGNIKTLQKLPHILKELPENLKVCPGVHTEALMITLEMMCRSVMEFS

SEQ ID NO: 4305 - DNA, 3165 bp, Homo sapien; identical to SEQ ID NO: 3787

SEQ ID NO: 4306 - protein, 838 aa, Homo sapien; identical to SEQ ID NO: 3788

SEQ ID NO: 4307 - DNA, 4619 bp, Homo sapien; identical to SEQ ID NO: 3831

SEQ ID NO: 4308 - protein, 855 aa, Homo sapien; identical to SEQ ID NO: 3832

SEQ ID NO: 4309 - DNA, 2246 bp, Homo sapien
agttcccacggaaaaactaccatctcccctgcccaccatggcagacgaaattgatttcactactggagatgccggggcttccagcacttaccctatgcagtgctcggccttgcgcaaaaacggcttcgtggtgctcaaaggacgaccatgcaaaatagtggagatgtcaacttccaaaactggaaagcatggtcatgccaaggttcaccttgttggaattgatattttcacgggcaaaaaatatgaagatatttgtccttctactcacaacatggatgttccaaatattaagagaaatgattatcaactgatatgcattcaagatggttacctttccctgctgacagaaactggtgaagttcgtgaggatcttaaactgccagaaggtgaactaggcaaagaaatagagggaaaatacaatgcaggtgaagatgtacaggtgtctgtcatgtgtgcaatgagtgaagaatatgctgtagccataaaaccctgcaaataaacggaaacatcaggcatgaacactgtttatgtctgaatcaactgcaaaaataatttggttctaagttgtcaccaaagctatagccttcataagcaacctcatttctttttttaattgttttcagattgtgctgggttagttttgcaagcaattgataatttttaaaaaattatcaatatgtataattttttttgaattttgtagatatgtttcctataatattcctgtggttttcagtatgtcagtccaagaaacaaacaagatagcttcagcagatgtgatttgtctgagcaaatcattcctgtgttttagttagatgataaaccagggttttaaatcaaacaatgtagcataaagtggtattgaagtaccatatttaagttgaactgctctgcattaattacagatttaatataaaatgaactgattatatattggaattgttgcactttcagcctgtgtagggcaaacacaaatccttaaacaaaaatcatgttatcaaaaactgtcagttattttggtggccacatgcaaccatgtgattactttggtcatactatttaccaaattgttggcaaacttgatgtaaccttatatggtggttttagtcccttcttatggttggcagaagggcactgaactgttgggtgaaagttagttagcaagtaagattataaggaagacacaaaagacagtggcaaagagggttgattaaatctataagtttttatgtgaggactttgtaagtcagcataaaaatgaaaagttgtttctcagttgtttttgcttttaactttgcccccaacgtttaaagggagtgatctgctttacatgatactatgcaatgcttgttttccaactatgttgaataaatagtaatatttatcagtaaatactcctttccaacttccttttttttttttttttttgaggcatgagaattgcttgaacccgggaagtgaaggttgccgtgagctgagatcacaccactgccataaacatgacaggcttttggactttgtattacctgtatgttttataatggatcatgcataatttctcaggagaataaaatgagaattcatatatacgttcatctttcaagtcagagcaatgagttgggaaaagaggtggcatttctgatcggataatggaatactctcatttattttatgacattctctgtctactcagatcatagtgaaaactggaaacaaaaaaaaaaacagcctcttcttggaaagtgacagcagaaggtggcatggagcttgtgtccttggacaacaaatctggatatactaggattaattatcagaagacagctcaggccaagttttgatcgttccatacagtaccttgtttatctgcttcttaaagaatcagccgagacaccataaaagaaataggctttttgtgccttttgctgttaatgtttaatttacaaactgttttggtaaatctcttaatgtaagtagctatttgactttggaattttgcattcgaggtatactgtcatttcttgaaatctttttctcgtttagttgctctgtgggaaatgtgaggaagcctaagtttgtatttgtaaatttcttatgccatcctctagtcaaattttttttcattgtttaaaaatacggaagtgttccaatataattttttcctgtactggatggctaggattctagagaattgattataaaatattttcaatacatcccaaaaaaaaaaaaaaaaaaaaaaaaaaaaa

SEQ ID NO: 4310 - protein, 153 aa, Homo sapien
MADEIDFTTGDAGASSTYPMQCSALRKNGFVVLKGRPCKIVEMSTSKTGKHGHAKVHLVGIDIFTGKKYEDICPSTHNMDVPNIKRNDYQLICIQDGYLSLLTETGEVREDLKLPEGELGKEIEGKYNAGEDVQVSVMCAMSEEYAVAIKPCK

SEQ ID NO: 4311 - DNA, 762 bp, Homo sapien
gggggcagagctggcgctctagcccacggagttggttaactcctctcaccggcccctggaaagggttccaagtcctttagtacccgacgctgtctgggaattccgggcgtttcggctccttggtcgcagaggcaggaggcacccgaccgcatgtctgtcatggacctcgccaatacttgctccagctttcagtcggacctggatttctgttcagattgcggctcggtcctgcctctgcccggggctcaggatacggtcacctgtattcgctgtggcttcaacatcaacgttcgggactttgaggggaaggttgtgaagacttcggttgtgttccaccaactggggacagccatgcctatgtcggtggaggaagggcctgagtgccagggacctgtggttgacaggcgctgccctcgatgtggtcatgaaggaatggcataccacaccagacagatgcgttcagccgatgaagggcaaactgtcttctacacctgtaccaactgcaagttccaggagaaggaagactcttgaccttttttcctgggcaactctacagtccctccctcctttcggaaggtgaaggatactgggtttttagatgccttgtccatcctgtctggttgcaatgttttgctcccagaagagaatcagatcatcatgtggggattaccattgttcctggagtactcctacccttagttgaatttccttattaaagttatatttttctataaaaaaaaaaaaaaaaaaaaaaaaaaaaaa

SEQ ID NO: 4312 - protein, 126 aa, Homo sapien
MSVMDLANTCSSFQSDLDFCSDCGSVLPLPGAQDTVTCIRCGFNINVRDFEGKVVKTSVVFHQLGTAMPMSVEEGPECQGPVVDRRCPRCGHEGMAYHTRQMRSADEGQTVFYTCTNCKFQEKEDS

SEQ ID NO: 4313 - DNA, 504 bp, Homo sapien
tcgactactactactaaattcgcggccgcgtcgacctggacttctctggaccacagtcctctgccagacccctgccagaccccagtccaccatgatccatctgggtcacatcctcttcctgcttttgctcccagtggctgcagctcagacgactccaggagagagatcatcactccctgccttttaccctggcacttcaggctcttgttccggatgtgggtccctctctctgccgctcctggcaggcctcgtggctgctgatgcggtggcatcgctgctcatcgtgggggcggtgttcctgtgcgcacgcccacgccgcagccccgcccaagaagatggcaaagtctacatcaacatgccaggcaggggctgaccctcctgcagcttggacctttgacttctgaccctctcatcctggatggtgtgtggtggcacaggaacccccgccccaacttttggattgtaataaaacaattgaaacaccaaaagaaaaaaaaaaaaaaa

SEQ ID NO: 4314 - protein, 93 aa, Homo sapien
MIHLGHILFLLLLPVAAAQTTPGERSSLPAFYPGTSGSCSGCGSLSLPLLAGLVAADAVASLLIVGAVFLCARPRRSPAQEDGKVYINMPGRG

SEQ ID NO: 4315 - DNA, 3462 bp, Homo sapien
  Unsure 2566: Unknown base
cggcccagctgagatatggcaagccccgtttcccgcaggctctgttccaggctggtatggggagtgattctatttgtgtatctggtcataagagctttgagactatggaggacagccaaactacaagtgaccctaaaaaaatacagcgttcatttggaagatatggccacaaacagccgagcttttactaacctcgtgagaaaagctttacgtctcattcaagaaaccgaagtgatttccagaggatttacactggtcagtgctgcttgcccatttaataaagctggacagcatccaagtcagcatctcatcggtcttcggaaagctgtctaccgaactctaagagccaacttccaagcagcaaggctagctaccctatatatgctgaaaaactaccccctgaactctgagagtgacaatgtaaccaactacatctgtgtggtgccttttaaagagctgggccttggacttagtgaagagcagatttcagaagaggaagcacataactttacagatggcttcagcctgcctgcattgaaggttttgttccaactctgggtggcacagagttcagagttcttcagacggttagccctattactttctacagccaattcacctcctgggcccttacttactccagcacttctgcctcatcgtatcttatctgatgtgactcaaggtctacctcatgctcattctgcctgtttggaagagcttaagcgcagctatgagttctatcggtactttgaaactcagcaccagtcagtaccgcagtgtttatccaaaactcaacagaagtcaagagaactgaataatgttcacacagcagtgcgtagcttgcagctccatctgaaagcattactgaatgaggtaataattcttgaagatgaacttgaaaagcttgtttgtactaaagaaacacaagaactagtgtcagaggcttatcccatcctagaacagaaattaaagttgattcagccccacgttcaagcaagcaacaattgctgggaagaggccatttctcagatcgacaaactgctacgaagaaatacagataaaaaaggcaagcctgaaatagcatgtgaaaacccacattgtacagtagtacctttgaagcagcctactctacacattgcagacaaagatccaatcccagaggagcaggaattagaagcttatgtagatgatatagatattgatagtgatttcagaaaggatgatttttattacttgtctcaagaagacaaagagagacagaagcgtgagcatgaagaatccaagagggtgctccaagaattaaaatctgtgctgggatttaaagcttcagaggcagaaaggcagaagtggaagcaacttctatttagtgatcatggggtaaagtccgcatggaattagagggggaaagtctgcactggaacctgctgtggccattttttttctgttgttgctgcttctctagtggagttactgcagcttagggatggttcctggaagtggacacattttacaaaaacgttttttaaatacacgccagctcttcgagaagcacttttttccttccgtcatgcttcatactatattgtattgtactaacccctcatgctgggatgagcgactgcctagcaagcaacccactgcctactaacatcaagaggggctaaataaaactgcattttccttgcaagggacaacttctaccgtatgaatatatattatatttatgtattatattttgtacaatagttgatcttgaatgcagacttcatttgtatttttcgtggtactacaaaatgtgtagaagttatggcttttctttcattagggtcttgttaggtggttggcaagtaagttaaattgtatgttgcatttttttccatgctgttttaacttgtaaatatatatgtatacatgtggaagatattattattatctagattactttaagccttttatctgatgtattatcagtgaaaaccatgctgcttattccctaatacaatggttctcaaactttagtgtgtatcagaatcaagatgagggcttgtaaaatatagctggtcccaactcccagagtttccatttcaggaggtctgggatcaggcccaagaatttgcatttttaacaaattcctaggtgataactgataatgttggttcagggaacacactttcagaaccactgctttaatattttaaataagataatatgtgaggtgtcataaaaaccttcatcaaatccctatctcatttcatttcttaggcattttctctcttataaagtttcctggatttataaattttcattgattttactagaaagttttatttagcttttatttatttattgttctttttaagaaaaaaactgagagtttgaattaaaagtttaaatcattgctaggtccttagttattttttttcttttttctttttttttatttgaagccgtgttgaaatccttgtctcctgtagacccagtggaacccataagtaattcagaaccatcaatgaattcagatatgggaaaagtcagtaaaaatgatactgaagaggaaagtaataantccgccacaacagacaatgaaataagtaggactgagtatttatgtgaaaactctctagaaggtaaaaataaagataattcttcaaatgaagtcttcccccaaggagcagaagaaagaatgtgttaccaatgtgagagtgaagatgaaccacaagcagatggaagtggtctgaccactgcccctccaactcccagggactcattacagccctccattaagcagaggctggcacggctacagctgtcaccagattttaccttcactgctggccttgctgcagaagtggctgctagatctctctcctttaccaccatgcaggaacagacttttggtgatgaggaggaagaacaaataatagaagaaaataaaaatgagatagaagaaaagtaagaaccaagattcatatgaagtgatattagattgttccttttacaaaagtgtttagcttcaagactggaaagggaatatgagtgtaagtttactatatgtaaagctaagatgtggatttacaggaagaaccctggtttgaataactgatctgaaattagtagttacctgtaaatggcagatcttttaggaaaataagagaaaggtaagggctcttttgaataaactgctgttttatttgtggcacaactgatcaatcttggaaattctttaagtatttttaataagaaatgaattatcatttcttgccagaatttgctaccttaaggtgattgggaaaattctgttgcaagaacattaacatttagtatgactcctttttactgtattcttgcagttaataactgcagctattatgttaataacaagttgtttgtattttatttttgtttataccagtcttaaagatccaggttctgaataaaaaaattaattgatacaaaaaaaaa

SEQ ID NO: 4316 - protein, 460 aa, Homo sapien
MASPVSRRLCSRLVWGVILFVYLVIRALRLWRTAKLQVTLKKYSVHLEDMATNSRAFTNLVRKALRLIQETEVISRGFTLVSAACPFNKAGQHPSQHLIGLRKAVYRTLRANFQAARLATLYMLKNYPLNSESDNVTNYICVVPFKELGLGLSEEQISEEEAHNFTDGFSLPALKVLFQLWVAQSSEFFRRLALLLSTANSPPGPLLTPALLPHRILSDVTQGLPHAHSACLEELKRSYEFYRYFETQHQSVPQCLSKTQQKSRELNNVHTAVRSLQLHLKALLNEVIILEDELEKLVCTKETQELVSEAYPILEQKLKLIQPHVQASNNCWEEAISQIDKLLRRNTDKKGKPEIACENPHCTVVPLKQPTLHIADKDPIPEEQELEAYVDDIDIDSDFRKDDFYYLSQEDKERQKREHEESKRVLQELKSVLGFKASEAERQKWKQLLFSDHGVKSAWN

SEQ ID NO: 4317 - DNA, 695 bp, Homo sapien
ggccagcggaagcccctgcgcccgcgccatgtcaaagaaaaaaggactgagtgcagaagaaaagagaactcgcatgatggaaatattttctgaaacaaaagatgtatttcaattaaaagacttggagaagattgctcccaaagagaaaggcattactgctatgtcagtaaaagaagtccttcaaagcttagttgatgatggtatggttgactgtgagaggatcggaacttctaattattattgggcttttccaagtaaagctcttcatgcaaggaaacataagttggaggttctggaatctcagttgtctgagggaagtcaaaagcatgcaagcctacagaaaagcattgagaaagctaaaattggccgatgtgaaacggaagagcgaaccaggctagcaaaagagctttcttcacttcgagaccaaagggaacagctaaaggcagaagtagaaaaatacaaagactgtgatccgcaagttgtggaagaaatacgccaagcaaataaagtagccaaagaagctgctaacagatggactgataacatattcgcaataaaatcttgggccaaaagaaaatttgggtttgaagaaaataaaattgatagaacttttggaattccagaagactttgactacatagactaaaatattccatggtggtgaaggatgtacaagcttgtgaatatgtaaattt

SEQ ID NO: 4318 - protein, 205 aa, Homo sapien
MSKKKGLSAEEKRTRMMEIFSETKDVFQLKDLEKIAPKEKGITAMSVKEVLQSLVDDGMVDCERIGTSNYYWAFPSKALHARKHKLEVLESQLSEGSQKHASLQKSIEKAKIGRCETEERTRLAKELSSLRDQREQLKAEVEKYKDCDPQVVEEIRQANKVAKEAANRWTDNIFAIKSWAKRKFGFEENKIDRTFGIPEDFDYID

SEQ ID NO: 4319 - DNA, 1353 bp, Homo sapien
tgagtagggggcctgcagtgtgctgtgacgcctgggaaggggattctaagccatttcccatcagccatttactaagtagcctggggatcttgttaaaatgcagatcctgatagattagggctggggtgctgcccaagattctacatttctaagagtccctggatgacggtggcattcacagaccacagcttctatgtgagggagagcagttgggtttctgtctgcctgccgcacctgatcagtagttagtgcctgcatgtgtggcggccagaattttacttggggagacgctcggctcctagcaccctctgtggtaggggttttccagagtgtgggcattaccccaactgtctctgcagacggcttcctgcatgtttcccacaagcgctcagatggctgaattggcaagtctgtggtgctgctctttggggccacctcgttctttgcctttccctccccttagcgatgtgtcccatccgttgcctacagtcaagtcagtccacatgtttaggctaaggtgggcatgaccgagtggccttcccccgggaagaccagtgtcgtaactggaattaagttgtggaacataagagtcaaggctcgtgtctgctgtgaactggagttgagggaatgtttggggatcccacctggtatcagtaagggaaccatggcgacggccagccttgcccatgtgaggcatttgctttgtcaggccttctcagtagtggagaagggaggaaggagaatgcagctctttcagtgctgtctagcagtgcccaagagccgtgattgggcacctcacttaacgtctaacttcagattcactcttgggcattcctgtcttcctctccaatcttgaatggatgttggcttcgataatgtcatcctgaagtttctttgtccacacagccctggctggttgttaataagctgttaatgcagccttgcactcaggaagccctgatgtttaaaggaactgtgtctttgttcttcctctcttccctctttctcttagtcccactttatctcttctttctcttcctctccctcctccttttcccctctccctcctactctccccctttctctcctccttctctaagaaacccagtcttaattccacacaatgcatgcacatgcagtagcttctctgcttgagtgagctggtgtgattaggttttctaaacatgcacattggccttgctacttgtccttttattcccttcccacagaccataaaccaagaattatttttatttgtattattttgatttttttaaagtaaaatattaacttttcctctttgaaataaattcccatttggaacatcaaaaaaaaaaaaaaaaaaaaaaaaaa

SEQ ID NO: 4320 - protein, 110 aa, Homo sapien
MTEWPSPGKTSVVTGIKLWNIRVKARVCCELELRECLGIPPGISKGTMATASLAHVRHLLCQAFSVVEKGGRRMQLFQCCLAVPKSRDWAPHLTSNFRFTLGHSCLPLQS

SEQ ID NO: 4321 - DNA, 3420 bp, Homo sapien
gggccgagccatgcaggcgtcgcgcgtggactacatcgctccctggtgggtcgtgtggctgcacagcgtcccgcacgtcggcctgcgcctgcagcccgtgaacagcaccttcagccccggcgacgagagttaccaggagtcgctgctgttcctggggctggtggccgccgtctgcctgggcctgaacctcatcttccttgtggcttacctggtctgtgcatgccactgccggcgggacgatgcggtgcagaccaagcagcaccactcctgctgcatcacctggacggccgtggtggccgggctcatctgctgtgctgcggtgggcgttggtttctatggaaacagcgagaccaacgatggggcgtaccagctgatgtactccttggacgatgccaaccacaccttctctgggatcgatgctctggtttccggaactacccagaagatgaaggtggacctagagcagcacctggcccggctcagtgagatctttgctgcccggggcgattacctgcagaccctgaagttcatacagcagatggcgggcagcattgttgttcagctctcaggactgcccgtgtggagggaggtcaccatggagctgaccaagctatccgaccagactggctacgtggagtactacaggtggctctcctacctcctgctctttatcctggacctggtcatctgcctcattgcctgcctgggactggccaagcgctccaagtgtctcctggcctcgatgctgtgctgtggggcactgagcctgctcctcagttgggcatccctggccgctgatggctctgcggcagtggccaccagtgacttctgtgtggctcctgacaccttcatcctgaacgtcacggagggccagatcagcacagaggtgactcgctactacctgtattgcagccagagtggaagcagccccttccagcagaccctgaccaccttccagcgcgcacttaccaccatgcagatccaggtcgcggggctgctgcagtttgccgtgcccctcttctccactgcagaggaagacctgcttgcaatccagctcctgctgaactcctcagagtccagccttcaccagctgaccgccatggtggactgccgagggctgcacaaggattatctggacgctcttgctggcatctgctacgacggcctccagggcttgctgtaccttggcctcttctccttcctggccgccctcgccttctccaccatgatctgtgcagggccaagggcctggaagcacttcaccaccagaaacagagactacgatgacattgatgatgatgacccctttaacccccaagcctggcgcatggcggctcacagtcccccgaggggacagcttcacagcttctgcagctacagcagtggcctgggaagtcagaccagcctgcagcccccggcccagaccatctccaacgcccctgtctccgagtacatgaaccaagccatgctctttggtaggaacccacgctacgagaacgtgccactaatcgggagagcctcccctccgcctacgtactctcccagcatgagagccacctacctgtctgtggcggatgagcacctgaggcactacgggaatcagtttccagcctaacagactttcgggggttcctgcctcctttttccgttctggtttttaattagtgcaaatacaagctgcgtttctttaatagaaaccaaaggcatctggagcccgagaggcctcctgctgggcagaggagcagctgggattcccgaccaaagccccagggggtgcagaagactcaccacgcgggccagcctctctcttttgccctgctctccacaccagaaatgcccccaggtgcttggctgcctcagaggtaccatccctgagctggctgcctggccctgctcacccctacgcctcgcccttgccaggaggggagtggcagtgaggagggggccaggtcaggcaccaccatcaagagagctgtgtgttctctctggtcccacaacgatgactctgcctcttgtcagcccagccaagagcccagacgacccctctgtcctcgttccctgtcctcgttccctgcaggtaacatgagaagggctgatcaggagatgctctttaagaagttcgcacccctgctgacaccagaacaagccaaatcagagttccagggccagacaggctcttcctgggccacagaggggaggcatcaggaaagctctgcagtggggggctggtggctccggggctgggggatcacaggctggtgaaccccggtgggaacagaggtgaaagcctgccacattccgcctgtctccctaaccctccattgcctcgcctctattccagaatcaatgctgcagaatgtgttagctgcagataggcatggtctcaggtatgaacagacactttgaaacgactttaggtctttcttttctccagtgttttaaacatgttgattatccaaagaattgaaactcctagcacatccagtttttacaacagatttgcagctcattccttaccctggttaggtcactacttttgcagattttgctggcactgatctggagatctgcagatctggaggagacgggaaggagtcgattcttaaataaggatcagtgaggcatcctgtcccaagctactgtttggtggggatctgggttcatctcacccacagagggaggatctttaagaggagaaaaaagccaagagggaaagccagagttccctgttctaggggactagccaaatgcctacatcagctgtcccctccctgttgtctccaagtaagtttgccagaaaaggttttagcaaagtgctacaactgtgtctttataggaggataggcctctgccctgccccacccccaccacctgtccccacccagtgtcccaggccacaggagcttattggccaggagggaataatgtcccccaatactgcctgttgagggaccagagttggggtctttggtgcttccaacctcctgccaacctggagttcacaacaccagagccccacggcctcgcacactgaagcaggggcgtgcggtgactcggtgcttctgttttggaagaaccacctgtcatcaaaacatggacagcagggtgttctcagctcccagcgaagcctccacaacagaatggggccacagggcagccgggactccctgtctcacctacattaacccatgcatactgtatgccataaactcactttggtatatccgcgtcacatgcagagaggaactctgcgacgtcaaagtgttgcttcttaaagtttcattattggcaactagagggttgtttttaatgcatggaaactaaacagattcctcggggagttcctgaaggaaccaggtgggcaaacctttgcttatatacatgcggcctcacctggaagagaaataaaccacttgtact

SEQ ID NO: 4322 - protein, 534 aa, Homo sapien
MQASRVDYIAPWWVVWLHSVPHVGLRLQPVNSTFSPGDESYQESLLFLGLVAAVCLGLNLIFLVAYLVCACHCRRDDAVQTKQHHSCCITWTAVVAGLICCAAVGVGFYGNSETNDGAYQLMYSLDDANHTFSGIDALVSGTTQKMKVDLEQHLARLSEIFAARGDYLQTLKFIQQMAGSIVVQLSGLPVWREVTMELTKLSDQTGYVEYYRWLSYLLLFILDLVICLIACLGLAKRSKCLLASMLCCGALSLLLSWASLAADGSAAVATSDFCVAPDTFILNVTEGQISTEVTRYYLYCSQSGSSPFQQTLTTFQRALTTMQIQVAGLLQFAVPLFSTAEEDLLAIQLLLNSSESSLHQLTAMVDCRGLHKDYLDALAGICYDGLQGLLYLGLFSFLAALAFSTMICAGPRAWKHFTTRNRDYDDIDDDDPFNPQAWRMAAHSPPRGQLHSFCSYSSGLGSQTSLQPPAQTISNAPVSEYMNQAMLFGRNPRYENVPLIGRASPPPTYSPSMRATYLSVADEHLRHYGNQFPA

SEQ ID NO: 4323 - DNA, 1184 bp, Homo sapien
cggcgatgctgcagttcgtccgggccggggcgcgggcctggcttcggcctaccggcagccagggcctgagttccctggcggaagaggcagcgcgtgcgaccgagaacccggagcaggtggcgagcgagggtctcccggagcccgtgctgcgcaaagtcgagctcccggtacccactcatcgacgcccagtgcaggcctgggtcgagtccttgcggggcttcgagcaggagcgcgtgggcctggccgacctgcaccccgatgttttcgccaccgcgcccaggctggacatactgcaccaggttgctatgtggcagaagaacttcaagagaattagctatgccaagaccaagacgagagccgaggtgcggggcggtggccggaagccttggccgcagaaaggcactgggcgggcccggcatggcagcatccgctctccgctctggcgaggaggaggtgttgcccatggcccccggggccccacaagttactactacatgctgcccatgaaggtgcgggcgctgggtctcaaagtggcactgaccgtcaagctggcccaggacgacctgcacatcatggactccctagagctgcccaccggagacccacagtacctgacagagctggcgcactaccgccgctggggggactccgtactcctcgtggacttaacacacgaggagatgccacagagcatcgtggaggccacctctaggcttaagaccttcaacttgatcccggctgttggcctaaatgtgcacagcatgctcaagcaccagacgctggtcctgacgctgcccaccgtcgccttcctggaggacaagctgctctggcaggactcacgttacagacccctctaccccttcagcctgccctacagcgacttcccccgacccctaccccacgctacccagggcccagcggccaccccgtaccactgttgatgtgaagcacctcttctgagccaggccgagcccctggccgacttgggagcctcaggcccacgcccacccttcgaggaaggtgtcacctggaccccttcattccacggaggaagctgaggccacagggagcggccatcgccattgggaaggggcgactccacggagagcccagacgggcttctgcatccattccctctttttgtttttaaaataaattgtatttttgaatcaaggaggaaaaaa

SEQ ID NO: 4324 - protein, 311 aa, Homo sapien [sequence omitted]

SEQ ID NO: 4325 - DNA, 1188 bp, Mus musculus
atggatgaagaacctgaaagaactaagcgatgggaaggaggctatgaaagaacatgggagattcttaaagaagatgaatctggatcacttaaagctacaatagaagacattctattcaaggcaaagagaaaaagagtatttgagcaccatggacaagttcgacttggaatgatgcgccacctttatgtggtagtagatggatcaagaacaatggaagaccaagatttaaagcctaatagactgacgtgtactttaaagttgttggaatactttgtagaggaatattttgatcaaaatcctattagtcagattggaataattgtaactaagagtaaaagagctgaaaaattgactgaactttcaggaaacccaagaaaacatataacgtctttgaagaaagctgtggatatgacctgccatggagagccatctctttataattccctaagcatagctatgcagactctaaaacacatgcctggacatacaagtcgagaagtactaatcatctttagcagccttacaacttgcgatccatctaatatttatgatctaatcaagaccctaaaggcagctaaaattagagtatctgttattggattgtctgcagaagttcgcgtttgcactgtacttgctcgtgaaactggtggcacgtaccatgttattttagatgaaagccattacaaagagttgctcacacatcatgttagtcctcctcctgctagctcaagttctgaatgctcacttattcgtatgggatttcctcagcacaccattgcttctttatctgaccaggatgcaaaaccctctttcagcatggcgcatttggatggcaatactgagccagggcttacattaggaggctatttctgcccacagtgtcgggcaaagtactgtgagctacctgttgaatgtaaaatctgtggtcttactttggtgtctgctccccacttggcacggtcttaccatcatttgtttcctttggatgcttttcaagaaattcccctagaagaatataatggagaaagattttgttatggatgtcagggggaattgaaagaccaacatgtttatgtttgtgctgtgtgccaaaatgttttctgtgtggactgtgatgtttttgttcatgattctctacactgttgccctggctgtattcataagattccagctccttcaggtgtttga

SEQ ID NO: 4326 - protein, 395 aa, Mus musculus
MDEEPERTKRWEGGYERTWEILKEDESGSLKATIEDILFKAKRKRVFEHHGQVRLGMMRHLYVVVDGSRTMEDQDLKPNRLTCTLKLLEYFVEEYFDQNPISQIGIIVTKSKRAEKLTELSGNPRKHITSLKKAVDMTCHGEPSLYNSLSIAMQTLKHMPGHTSREVLIIFSSLTTCDPSNIYDLIKTLKAAKIRVSVIGLSAEVRVCTVLARETGGTYHVILDESHYKELLTHHVSPPPASSSSECSLIRMGFPQHTIASLSDQDAKPSFSMAHLDGNTEPGLTLGGYFCPQCRAKYCELPVECKICGLTLVSAPHLARSYHHLFPLDAFQEIPLEEYNGERFCYGCQGELKDQHVYVCAVCQNVFCVDCDVFVHDSLHCCPGCIHKIPAPSGV

SEQ ID NO: 4327 - DNA, 570 bp, Homo sapien
ggccgtgccttctctcgcttcggactgcgcaacgctgcgctctgggctgacaggcggataaaacggtcccatcaagactgagaaaaagcacaccagctattggcacagcgtgggcagtggggcctacaggatgactgacttagtctacagagatcccggcgtacttaagcagatgaagactcttaagatgacagaaggtgatttttctggtgatcgaggacttccggggtaatgacagtgatgaaatgcaggggacctggttgcccccaagtttcctggcagtgtgtgatactgaggaggtgagcttgtttctggagctgtgctttaagattcatgttacatgtaaagctgtcctcatttgtgactatggacctatggagttgggacaatctctatgggaagcagaaggcaaggaccccggtcattttaggtagaaacaacagcatgctaatgcaaaaaattatgcagtgtgctactgaacttcagaggtgatcaataaaagaagaataaaaagactaataaaaaaaaaaaaaaaaaaaaaaaaaaaaaaaaaaaaaaaaaaaaaaaaaa

SEQ ID NO: 4328 - protein, 62 aa, Homo sapien
MQGTWLPPSFLAVCDTEEVSLFLELCFKIHVTCKAVLICDYGPMELGQSLWEAEGKDPGHFR

SEQ ID NO: 4329 - DNA, 1096 bp, Homo sapien
ggaagtttgtggcggaggtgaggccgaggtgactgcagagcggctcgcgagagtctccctctgttgccaggctggagtgcagtggcgcgatctcggctcactgcaacctccgcctcctgagttcaagtgattctcctgcctcagcctcacaagtagctgggactacagggttttggactgataaagcaatggaagccactgaagagctttaagatgaggatggcatggagggaagataagtcacataatcagttctgtgatatgagcaacaatggaccagaagattttatctctagcagcagaaaaaacagcagacaaactgcaagaatttcttcaaaccctgagagaaggtgatttgactaatctccttcagaatcaagcagtgaaaggaaaagttgctggagcactcctgagagccatcttcaaaggttccccctgctctgaggaagctggaacacttaggagacgtaagatatacacttgttgtatccagttggtggaatcgggggatttgcagaaagaaatagtgtctgagatcataggattactgatgctggaggctcaccattttccaggaccattattggttgaattagccaatgagtttattagtgctgtcagagaaggcagcctagtgaatggaaaatctttggagttactacctatcattctcactgccctggctacgaaaaaggaaaatctggcttatggaaaaggtgtactgagtggggaagaatgtaagaaacagttgattaacaccctgtgttctggcaggtgggatcagcaatatgtaatccaactcacctccatgttcaaggatgtccctctgactgcagaagaggtggaatttgtggtggaaaaagcattgagcatgttctccaagatgaatcttcaagaaataccacctttggtctatcagcttctggttctctcctccaagggaagcagaaagagtgttttggaaggaatcatagccttcttcagtgcactagataagcagcacaatgaggaacagagtggtgacgagtgagtaatatagtgtagaaataaagatcatttttacaaaaaaaaaaaaaaaaaaaaaaaaaaaaaaaaa

SEQ ID NO: 4330 - protein, 73 aa, Homo sapien
MFKDVPLTAEEVEFVVEKALSMFSKMNLQEIPPLVYQLLVLSSKGSRKSVLEGIIAFFSALDKQHNEEQSGDE

SEQ ID NO: 4331 - DNA, 963 bp, Homo sapien
ttctcatccctgtgctcagagctctcaagcacccacgatggccttctcaggccgagcgcgcccctgcattatcccagagaacgaagaaatcccccgagcagcccttaacactgtccacgaggccaatgggaccgaggacgagagggctgtttccaaactgcagcgcaggcacagtgacgtgaaagtctacaaggagttctgtgacttttatgcgaaattcaacatggccaacgccctggccagcgccacttgcgagcgctgcaagggcggctttgcgcccgctgagacgatcgtgaacagtaatggggagctgtaccatgagcagtgtttcgtgtgcgctcagtgcttccagcagttcccagaaggactcttctatgaggaacgaacgtgatggttaagctaccttcattaagcagcatgaccgcttctgagctcctgctgccgcatttaggccctgtcagctgtgaggccactggtgctgagtcaaagggaaaagctcagaacagccttgacagcgaagaataaagcatgactcatctcgtcctgcccacccctcacactggactataaataccctccctgggtctgtgtgctgttattccaaaagatgcgatgaatcccagaactaggctattcatgggctgttgcccagttcaagctctattgggtcctgaggaagattactattttggctacattgtttatcattaaaaccagcccagggatgtgtaaacctgcatctggagaataagacatttctttttggttaaatgatattagagaaaaaaaaaactatccaaggctgctaacaaataatcttcactttcaattatatccagcaataagttgttctccagaaaagaaagcttggaaacttacccagtttgccttccatttgggacatgactgatgtgcttcagtctttgtataataaatgcatcttcgcccctataaaaaaaaaaa

SEQ ID NO: 4332 - protein, 117 aa, Homo sapien
MAFSGRARPCIIPENEEIPRAALNTVHEANGTEDERAVSKLQRRHSDVKVYKEFCDFYAKFNMANALASATCERCKGGFAPAETIVNSNGELYHEQCFVCAQCFQQFPEGLFYEERT

SEQ ID NO: 4333 - DNA, 1438 bp, Homo sapien
gggaaagaaaatgaggccccaggacacctgggttcacacccaggtccccagcgatgtctccaccaccgctgctgcaacccctgctgctgctgctgcctctgctgaatgtggagccttccggggccacactgatccgcatccctcttcatcgagtccaacctggacgcaggatcctgaacctactgaggggatggagagaaccagcagagctccccaagttgggggccccatcccctggggacaagcccatcttcgtacctctctcgaactacagggatgtgcagtattttggggaaattgggctgggaacgcctccacaaaacttcactgttgcctttgacactggctcctccaatctctgggtcccgtccaggagatgccacttcttcagtgtgccctgctggttacaccaccgatttgatcccaaagcctctagctccttccaggccaatgggaccaagtttgccattcaatatggaactgggcgggtagatggaatcctgagcgaggacaagctgactattggtggaatcaagggtgcatcagtgattttcggggaggctctctgggagcccagcctggtcttcgcttttgcccattttgatgggatattgggcctcggttttcccattctgtctgtggaaggagttcggcccccgatggatgtactggtggagcaggggctattggataagcctgtcttctccttttacctcaacagggaccctgaagagcctgatggaggagagctggtcctggggggctcggacccggcacactacatcccacccctcaccttcgtgccagtcacggtccctgcctactggcagatccacatggagcgtgtgaaggtgggcccagggctgactctctgtgccaagggctgtgctgccatcctggatacgggcacgtccctcatcacaggacccactgaggagatccgggccctgcatgcagccattgggggaatccccttgctggctggggagtacatcatcctgtgctcggaaatcccaaagctccccgcagtctccttccttcttgggggggtctggtttaacctcacggcccatgattacgtcatccagactactcgaaatggcgtccgcctctgcttgtccggtttccaggccctggatgtccctccgcctgcagggcccttctggatcctcggtgacgtcttcttggggacgtatgtggccgtcttcgaccgcggggacatgaagagcagcgcccgggtgggcctggcgcgcgctcgcactcgcggagcggacctcggatggggagagactgcgcaggcgcagttccccgggtgacgcccaagtgaagcgcatgcgcagcgggtggtcgcggaggtcctgctacccagtaaaaatccactatttccattgaaaaaaaaaaaaaaaaaaaaaaaaaaaaaaaaaaaaaaaaaaaaaaa

SEQ ID NO: 4334 - protein, 420 aa, Homo sapien
MSPPPLLQPLLLLLPLLNVEPSGATLIRIPLHRVQPGRRILNLLRGWREPAELPKLGAPSPGDKPIFVPLSNYRDVQYFGEIGLGTPPQNFTVAFDTGSSNLWVPSRRCHFFSVPCWLHHRFDPKASSSFQANGTKFAIQYGTGRVDGILSEDKLTIGGIKGASVIFGEALWEPSLVFAFAHFDGILGLGFPILSVEGVRPPMDVLVEQGLLDKPVFSFYLNRDPEEPDGGELVLGGSDPAHYIPPLTFVPVTVPAYWQIHMERVKVGPGLTLCAKGCAAILDTGTSLITGPTEEIRALHAAIGGIPLLAGEYIILCSEIPKLPAVSFLLGGVWFNLTAHDYVIQTTRNGVRLCLSGFQALDVPPPAGPFWILGDVFLGTYVAVFDRGDMKSSARVGLARARTRGADLGWGETAQAQFPG

SEQ ID NO: 4335 - DNA, 1553 bp, Homo sapien
cgaggctccgcaccagccgcgcttctgtccgcctgcagggcattccagaaagatgaggatatttgctgtctttatattcatgacctactggcatttgctgaacgcatttactgtcacggttcccaaggacctatatgtggtagagtatggtagcaatatgacaattgaatgcaaattcccagtagaaaaacaattagacctggctgcactaattgtctattgggaaatggaggataagaacattattcaatttgtgcatggagaggaagacctgaaggttcagcatagtagctacagacagagggcccggctgttgaaggaccagctctccctgggaaatgctgcacttcagatcacagatgtgaaattgcaggatgcaggggtgtaccgctgcatgatcagctatggtggtgccgactacaagcgaattactgtgaaagtcaatgccccatacaacaaaatcaaccaaagaattttggttgtggatccagtcacctctgaacatgaactgacatgtcaggctgagggctaccccaaggccgaagtcatctggacaagcagtgaccatcaagtcctgagtggtaagaccaccaccaccaattccaagagagaggagaagcttttcaatgtgaccagcacactgagaatcaacacaacaactaatgagattttctactgcacttttaggagattagatcctgaggaaaaccatacagctgaattggtcatcccagaactacctctggcacatcctccaaatgaaaggactcacttggtaattctgggagccatcttattatgccttggtgtagcactgacattcatcttccgtttaagaaaagggagaatgatggatgtgaaaaaatgtggcatccaagatacaaactcaaagaagcaaagtgatacacatttggaggagacgtaatccagcattggaacttctgatcttcaagcagggattctcaacctgtggtttaggggttcatcggggctgagcgtgacaagaggaaggaatgggcccgtgggatgcaggcaatgtgggacttaaaaggcccaagcactgaaaatggaacctggcgaaagcagaggaggagaatgaagaaagatggagtcaaacagggagcctggagggagaccttgatactttcaaatgcctgaggggctcatcgacgcctgtgacagggagaaaggatacttctgaacaaggagcctccaagcaaatcatccattgctcatcctaggaagacgggttgagaatccctaatttgagggtcagttcctgcagaagtgccctttgcctccactcaatgcctcaatttgttttctgcatgactgagagtctcagtgttggaacgggacagtatttatgtatgagtttttcctatttattttgagtctgtgaggtcttcttgtcatgtgagtgtggttgtgaatgatttcttttgaagatatattgtagtagatgttacaattttgtcgccaaactaaacttgctgcttaatgatttgctcacatctagtaaaacatggagtatttgtaaaaaaaaaaaaaaa

SEQ ID NO: 4336 - protein, 290 aa, Homo sapien
MRIFAVFIFMTYWHLLNAFTVTVPKDLYVVEYGSNMTIECKFPVEKQLDLAALIVYWEMEDKNIIQFVHGEEDLKVQHSSYRQRARLLKDQLSLGNAALQITDVKLQDAGVYRCMISYGGADYKRITVKVNAPYNKINQRILVVDPVTSEHELTCQAEGYPKAEVIWTSSDHQVLSGKTTTTNSKREEKLFNVTSTLRINTTTNEIFYCTFRRLDPEENHTAELVIPELPLAHPPNERTHLVILGAILLCLGVALTFIFRLRKGRMMDVKKCGIQDTNSKKQSDTHLEET

SEQ ID NO: 4337 - DNA, 1138 bp, Homo sapien
ccctttaaagggtgactcgtcccacttgtgttctctctcctggtgcagagttgcaagcaagtttatcagagtatcgccatgaagttcgtcccctgcctcctgctggtgaccttgtcctgcctggggactttgggtcaggccccgaggcaaaagcaaggaagcactggggaggaattccatttccagactggagggagagattcctgcactatgcgtcccagcagcttggggcaaggtgctggagaagtctggcttcgcgtcgactgccgcaacacagaccagacctactggtgtgagtacagggggcagcccagcatgtgccaggcttttgctgctgaccccaaaccttactggaatcaagccctgcaggagctgaggcgccttcaccatgcgtgccagggggccccggtgcttaggccatccgtgtgcagggaggctggaccccaggcccatatgcagcaggtgacttccagcctcaagggcagcccagagcccaaccagcagcctgaggctgggacgccatctctgaggcccaaggccacagtgaaactcacagaagcaacacagctgggaaaggactcgatggaagagctgggaaaagccaaacccaccacccgacccacagccaaacctacccagcctggacccaggcccggagggaatgaggaagcaaagaagaaggcctgggaacattgttggaaacccttccaggccctgtgcgcctttctcatcagcttcttccgagggtgacaggtgaaagacccctacagatctgacctctccctgacagacaaccatctctttttatattatgccgctttcaatccaacgttctcacactggaagaagagagtttctaatcagatgcaacggcccaaattcttgatctgcagcttctctgaagtttggaaaagaaaccttcctttctggagtttgcagagttcagcaatatgatagggaacaggtgctgatgggcccaagagtgacaagcatacacaactacttattatctgtagaagttttgctttgttgatctgagccttctatgaaagtttaaatatgtaacgcattcatgaatttccagtgttcagtaaatagcagctatgtgtgtgcaaaataaaagaatgatttcagaaat

SEQ ID NO: 4338 - protein, 223 aa, Homo sapien
MKFVPCLLLVTLSCLGTLGQAPRQKQGSTGEEFHFQTGGRDSCTMRPSSLGQGAGEVWLRVDCRNTDQTYWCEYRGQPSMCQAFAADPKPYWNQALQELRRLHHACQGAPVLRPSVCREAGPQAHMQQVTSSLKGSPEPNQQPEAGTPSLRPKATVKLTEATQLGKDSMEELGKAKPTTRPTAKPTQPGPRPGGNEEAKKKAWEHCWKPFQALCAFLISFFRG

SEQ ID NO: 4339 - DNA, 703 bp, Homo sapien
tcacttcacttttattatgaacaaacacaatctcagattagtacaattagcttcagagttgatattaatagaaattattccaaaattattcttgtcacaagtaactactatatcccacataaaaagggaaaaaatcccacccaatcacagaaaaggcatcctctgtatgtttccgtggcaatgcgttgtttatgtattctcaaattttgtctggctagttatccaccgcttctccaatggattcattcagtttcttggagaaccatatagactaatgacagcatctgggacacacggacgtatcaagttcatggtggacattcctattataaaaaatactcaggtcttgagaattcctgtgctgaaggatcccaaaatgctttctaaaaagcattagtcatgcctcaaaactgccctttgaggtaggtcagtattattatccccattttaacagaaggaaaactgaggcaccttatagttaagtgacttgcccagggtcacacagcaagtcagtggcacagtggttggagaggccctggccttaaccaccagcataacatggccacctcgcttttttaacctttcatgatgacctatttgagctacacttacagagaatacacccaagatactagcaaaccaaggagaaaattttccattttaaatgctacaaccatcttttaacccaaaaaaaaaaaaaaaa

SEQ ID NO: 4340 - protein, 126 aa, Homo sapien
MNKHNLRLVQLASELILIEIIPKLFLSQVTTISHIKREKIPPNHRKGILCMFPWQCVVYVFSNFVWLVIHRFSNGFIQFLGEPYRLMTASGTHGRIKFMVDIPIIKNTQVLRIPVLKDPKMLSKKH

SEQ ID NO: 4341 - DNA, 3328 bp, Homo sapien
ctcagctgcagcggcgactttcagtttcatttccacggaccctcctgcctgggccgcagccgccgccgcgatgcccagtaagttcagctgccggcagctccgggaggcgggccagtgtttcgagagtttcctggtcgttcggggactggacatggagacagatcgcgagcggctgcggaccatttataaccgcgacttcaagatcagctttgggacccccgcccctggcttctcctccatgctgtatggaatgaagattgcaaatctggcctacgtcaccaagactcgggtcaggttcttcagactcgaccgctgggccgacgtgcggttcccagaaaagaggagaatgaagctggggtcagatatcagcaaacaccacaagtcactgctagccaagatcttttatgacagggctgagtatcttcatgggaaacatggtgtggatgtggaagtccaggggccccatgaagcccgagatgggcagctccttatccgcctggatttgaaccgcaaagaggtgctgaccctgaggcttcggaatggcggaacccagtctgttaccctcactcacctcttcccactctgccggacaccccagtttgctttctacaatgaagaccaggagttgccctgtccactgggccccggtgaatgctatgaactccatgtccattgtaagaccagctttgtgggctacttcccagccacagtgctctgggagctgctgggacctggggagtcgggttcagaaggagccggcacattctacattgcccgcttcttggctgccgtcgcccacagccccctggctgcacagctgaagcccatgactcccttcaagcggacccggatcaccggaaaccctgtggtgaccaatcggatagaggaaggagagagacctgaccgcgctaagggctatgacctggagttaagtatggcgctggggacatactacccacctccccgcctcaggcagctgctccccatgcttcttcagggaacaagtatcttcactgcccctaaggagatcgcagagatcaaggcccagctggagacagccctgaagtggaggaactatgaggtgaagctgcggctgctgctgcacctggaggaactgcagatggagcatgatatccggcactatgacctggagtcggtgcccatgacctgggaccctgtggaccagaaccccaggctgctcacgctggaggttcctggagtgactgagagccgcccctcagtgctacggggcgaccacctgtttgcccttttgtcctcggagacacaccaggaggaccccatcacatataagggctttgtgcacaaggtggaattggaccgtgtcaagctgagcttttccatgagcctcctgagccgctttgtggatgggctgaccttcaaggtgaactttaccttcaaccgccagccgctgcgagtccagcaccgtgccctggagctgacagggcgctggctgctgtggcccatgctctttcctgtggcacctcgggacgtcccgctgctgccctcagatgtgaaactcaagctgtacgaccggagtctggagtcaaacccagagcagctgcaggccatgaggcacattgttacgggcaccacccgtccagccccctacatcatctttgggcctccaggcaccggcaagactgtcacgttagtggaggcaattaagcaggtggtgaagcacttgcccaaagcccacatcttggcctgcgctccatccaactcaggggctgacctactctgtcaaaggctccgggtccaccttcctagctccatctaccgcctcctggcccccagcagggacatccgcatggtacctgaggacatcaagccctgctgcaactgggacgcaaagaagggggagtatgtatttcccgccaagaagaagctgcaggaataccgggtcttaattaccaccctcatcactgccggcaggttggtctcggcccagtttcccattgatcacttcacacacatcttcatcgatgaggctggccactgcatggagcctgagagtctggtagctatagcagggctgatggaagtaaaggaaacaggtgatccaggagggcagctggtgctggcaggagaccctcggcagctggggcctgtgctgcgttccccactgacccagaagcatggactgggatactcactgctggagcggctgctcacctacaactccctgtacaagaagggccctgatggctatgacccccagttcataaccaagctgctccgcaactacaggtctcatcccaccatcctggacattcctaaccagctctattatgaaggggagctgcaggcctgtgctgatgtcgtggatcgagaacgcttctgccgctgggcgggcctacctcgacagggctttcccatcatctttcacggcgtaatgggcaaagatgagcgtgaaggcaacagcccatccttcttcaaccctgaagaggctgccacagtgacttcctacctgaagctgctcctggccccctcctccaagaagggcaaagctcgcctgagccctcgaagtgtgggcgtcatctccccgtaccggaaacaggtggagaaaatccgttactgcatcaccaaacttgacagggagcttcgaggactggatgacatcaaggacttgaaggtgggttcagtagaagaattccaaggccaagaacgaagcgtcatcctcatctccaccgtgcgaagcagccagagctttgtgcagctggatctggactttaatctgggtttccttaagaaccccaagaggttcaatgtagctgtgacccgggccaaggccctgctcatcatcgtggggaacccccttctcctgggccatgaccctgactggaaagtattcctggagttctgtaaagaaaacggagggtataccgggtgtcccttccctgccaaactggacctgcaacagggacagaatttactgcaaggtctgagcaagctcagcccctctacctcagggccccacagccatgactacctcccccaggagcgggagggtgaagggggcctgtctctgcaagtggagccagagtggaggaatgagctctgaagacacagcacccagccttctcgcaccagccaagccttaactgcctgcctgaccctgaaccagaacccagctgaactgcccctccaagggacaggaaggctgggggagggagtttacaacccaagccattccaccccctcccctgctggggagaatgacacatcaagctgctaacaattgggggaaggggaaggaagaaaactctgaaaacaaaatcttgttctatgcaaaaaaaaaaaaaaaaaa

SEQ ID NO: 4342 - protein, 1003 aa, Homo sapien
MPSKFSCRQLREAGQCFESFLVVRGLDMETDRERLRTIYNRDFKISFGTPAPGFSSMLYGMKIANLAYVTKTRVRFFRLDRWADVRFPEKRRMKLGSDISKHHKSLLAKIFYDRAEYLHGKHGVDVEVQGPHEARDGQLLIRLDLNRKEVLTLRLRNGGTQSVTLTHLFPLCRTPQFAFYNEDQELPCPLGPGECYELHVHCKTSFVGYFPATVLWELLGPGESGSEGAGTFYIARFLAAVAHSPLAAQLKPMTPFKRTRITGNPVVTNRIEEGERPDRAKGYDLELSMALGTYYPPPRLRQLLPMLLQGTSIFTAPKEIAEIKAQLETALKWRNYEVKLRLLLHLEELQMEHDIRHYDLESVPMTWDPVDQNPRLLTLEVPGVTESRPSVLRGDHLFALLSSETHQEDPITYKGFVHKVELDRVKLSFSMSLLSRFVDGLTFKVNFTFNRQPLRVQHRALELTGRWLLWPMLFPVAPRDVPLLPSDVKLKLYDRSLESNPEQLQAMRHIVTGTTRPAPYIIFGPPGTGKTVTLVEAIKQVVKHLPKAHILACAPSNSGADLLCQRLRVHLPSSIYRLLAPSRDIRMVPEDIKPCCNWDAKKGEYVFPAKKKLQEYRVLITTLITAGRLVSAQFPIDHFTHIFIDEAGHCMEPESLVAIAGLMEVKETGDPGGQLVLAGDPRQLGPVLRSPLTQKHGLGYSLLERLLTYNSLYKKGPDGYDPQFITKLLRNYRSHPTILDIPNQLYYEGELQACADVVDRERFCRWAGLPRQGFPIIFHGVMGKDEREGNSPSFFNPEEAATVTSYLKLLLAPSSKKGKARLSPRSVGVISPYRKQVEKIRYCITKLDRELRGLDDIKDLKVGSVEEFQGQERSVILISTVRSSQSFVQLDLDFNLGFLKNPKRFNVAVTRAKALLIIVGNPLLLGHDPDWKVFLEFCKENGGYTGCPFPAKLDLQQGQNLLQGLSKLSPSTSGPHSHDYLPQEREGEGGLSLQVEPEWRNEL

SEQ ID NO: 4343 - DNA, 1214 bp, Homo sapien
gtctacaccccctcctcacacgcacttcacctgggtcgggattctcaggtcatgaacggtcccagccacctccgggcagggcgggtgaggacggggacggggcgtgtccaactggctgtgggctcttgaaacccgagcatggcacagcacggggcgatgggcgcgtttcgggccctgtgcggcctggcgctgctgtgcgcgctcagcctgggtcagcgccccaccgggggtcccgggtgcggccctgggcgcctcctgcttgggacgggaacggacgcgcgctgctgccgggttcacacgacgcgctgctgccgcgattacccgggcgaggagtgctgttccgagtgggactgcatgtgtgtccagcctgaattccactgcggagacccttgctgcacgacctgccggcaccacccttgtcccccaggccagggggtacagtcccaggggaaattcagttttggcttccagtgtatcgactgtgcctcggggaccttctccgggggccacgaaggccactgcaaaccttggacagactgcacccagttcgggtttctcactgtgttccctgggaacaagacccacaacgctgtgtgcgtcccagggtccccgccggcagagccgcttgggtggctgaccgtcgtcctcctggccgtggccgcctgcgtcctcctcctgacctcggcccagcttggactgcacatctggcagctgaggagtcagtgcatgtggccccgagagacccagctgctgctggaggtgccgccgtcgaccgaagacgccagaagctgccagttccccgaggaagagcggggcgagcgatcggcagaggagaaggggcggctgggagacctgtgggtgtgagcctggccgtcctccggggccaccgaccgcagccagcccctccccaggagctccccaggccgcaggggctctgcgttctgctctgggccgggccctgctcccctggcagcagaagtgggtgcaggaaggtggcagtgaccagcgccctggaccatgcagttcggcggccgcggctgggccctgcaggagggagagagagacacagtcatggcccccttcctcccttgctggccctgatggggtggggtcttaggacgggaggctgtgtccgtgggtgtgcagtgcccagcacgggacccggctgcaggggaccttcaataaacacttgtccagtgaaaaaaaaaaaaaaa

SEQ ID NO: 4344 - protein, 241 aa, Homo sapien
MAQHGAMGAFRALCGLALLCALSLGQRPTGGPGCGPGRLLLGTGTDARCCRVHTTRCCRDYPGEECCSEWDCMCVQPEFHCGDPCCTTCRHHPCPPGQGVQSQGKFSFGFQCIDCASGTFSGGHEGHCKPWTDCTQFGFLTVFPGNKTHNAVCVPGSPPAEPLGWLTVVLLAVAACVLLLTSAQLGLHIWQLRSQCMWPRETQLLLEVPPSTEDARSCQFPEEERGERSAEEKGRLGDLWV

SEQ ID NO: 4345 - DNA, 2415 bp, Homo sapien
acatgctctgtgaggagatttccctcgatgatgtgcttctgagtgctctgctgaggaacgatgggaagtctgcccagcagaagaaaatctctgccaagcccaagcttgagttcctctgtccaaggccagggacctgtgaccatggaagcagagagaagcaaggccacagccgtggccctgggcagtttcccggcaggtggcccggccgagctgtcgctgagactcggggagccattgaccatcgtctctgaggatggagactggtggacggtgctgtctgaagtctcaggcagagagtataacatccccagcgtccacgtggccaaagtctcccatgggtggctgtatgagggcctgagcagggagaaagcagaggaactgctgttgttacctgggaaccctggaggggccttcctcatccgggagagccagaccaggagaggctcttactctctgtcagtccgcctcagccgccctgcatcctgggaccggatcagacactacaggatccactgccttgacaatggctggctgtacatctcaccgcgcctcaccttcccctcactccaggccctggtggaccattactctgagctggcggatgacatctgctgcctactcaaggagccctgtgtcctgcagagggctggcccgctccctggcaaggatatacccctacctgtgactgtgcagaggacaccactcaactggaaagagctggacagctccctcctgttttctgaagctgccacaggggaggagtctcttctcagtgagggtctccgggagtccctcagcttctacatcagcctgaatgacgaggctgtctctttggatgatgcctaggcccaaaggagaggccaaaagggaaaccaaggctgcacacctagaaccccaattcagcctcctgggcaccccagaggcaaggctgtgcactcagggagggagggtgggacacagaggtgcatctagggtcccacctgtacccttgctctttcctctcttagcccttagaagtcacctacttccttccagtgccatgatcccacctgcgacctctagtgcgagtgcagagaaggtgggaccagggccagggttccaaaaagagaataagcctcctggggggtctgacctagttagttcttgagtttggggtttccagtaccatctggatgccctgcctgttgagccccattctacatccccaccattaaccaggccccacccacaaggtagaaacaacccctagagtcaacgagaaagtcattttcagaaaatctacaagtctcgttgagaccaccaccatacctcagaaggtaggactgtggcctagaagggaaaggaaagctgagatggtgtcttaccgtagcagcagatcttggatggtccaggctctatgtgacctccagagcaaagagaaagactcgggacagtctaggtcctcaaatgtcccccattgaggacaacagccccagctctttttcttttttttgagacggagtcttgccctgttgcccatgctggagtgcaatggcacgatctcagctcactgcaacctccatctcctggattcaaacaattctcctgcctcagcctccagaatagctgggattacaggcgtacaccaccatgcctggctaatttttttgtatttttagtagacatggggtttcaccacattggccaggctggtgtcgaactcctgacctcaggtgatccacccaccttggcctcccaaagtgctgggattacaggtgtgagccacggcacccagcctagctctcagatctctatttcattttgtggcttaccattccctagcacactggccttgccatcttgtggccgaataaaaaataacacctcttaagtctagcacactgcagtgaggccaggcacctcagtgctgggcaggggcatcagaaggtgctaagccctctctccacaatgccaagacggagaccacagcctacaccaaatccagcccttgatttccctgctgcctccataaacagaaagaggtctgctggatccgctaagggatcagggagaggaagaaagagggatggggtgggaggcaccccctccagtgctcctactggttcccaagctacaggtggggtgggaaaggctttatcaggtatcatcaacaggttctcaattaaagatttgatttattcaagtatgtgaaaacattctacaatggaaactcttattagatgctgcatgtactgtgctatggaccacgcacatacagccatgctgtttcagaagacttgaaatgccattgatagtttaaaaactctacacccgatggagaatcgaggaagacgatttaatgtttcatctgaatccagaggtgcatcaaattaaatgacagctccacttggcaaaaaaaaaaaaaaaaaaaaaaaa

SEQ ID NO: 4346 - protein, 261 aa, Homo sapien
MGSLPSRRKSLPSPSLSSSVQGQGPVTMEAERSKATAVALGSFPAGGPAELSLRLGEPLTIVSEDGDWWTVLSEVSGREYNIPSVHVAKVSHGWLYEGLSREKAEELLLLPGNPGGAFLIRESQTRRGSYSLSVRLSRPASWDRIRHYRIHCLDNGWLYISPRLTFPSLQALVDHYSELADDICCLLKEPCVLQRAGPLPGKDIPLPVTVQRTPLNWKELDSSLLFSEAATGEESLLSEGLRESLSFYISLNDEAVSLDDA

SEQ ID NO: 4347 - DNA, 4954 bp, Homo sapien; identical to SEQ ID NO: 4243

SEQ ID NO: 4348 - protein, 677 aa, Homo sapien; identical to SEQ ID NO: 4244

SEQ ID NO: 4349 - DNA, 4600 bp, Homo sapien
gagggaacgctccaggtaaagcgctgggggaggaagcgacgccgaggagctacggtttcctccagaggtctccgcccctctgcccctatattcccagagctcgagtctgatccgggccttgccgggcaccctggaaaggcgggggtgatagtacagatggagacgcaactgcagagcattttcgaagaggtggtgaaaacggaagttatagaagaggcttttcctggcatgtttatggatactcctgaagatgagaaaacaaaactaattagctgtttgggggccttcagacagttttggggtggtctttctcaggagtctcatgaacagtgtatccagtggattgttaagtttattcatggtcagcatagtcctaaaagaatttcttttctttatgactgcttagcaatggcagttgagactggtctccttccacccaggctggtttgtgaatccctgataaactctgacactcttgagtgggaaagaacacagctttgggccttaacatttaaactggttcggaaaataattgggggagtggattacaagggtgttcgagatctcttaaaagtgattttggagaagattttgacaattcctaatacagtgagctctgctgttgtacagcagcttctggcagcaagagaggttatagcatatatcttggaaagaaatgcctgcttattaccagcctattttgcagtcactgagatcaggaaactgtatcctgaaggcaaacttccacactggttacttggaaacctagtatcagactttgtggataccttcaggcccacagcaaggataaactccatttgtggtcgctgtagtcttctgccagttgtaaataattcgggtgccatttgtaattcatggaaactggatcctgctactcttcgttttcctttgaaaggccttttgccatatgataaggatctgtttgaaccacagactgctttgttgagatatgtattggagcagccttattccagggatatggtctgcaatatgctaggtttaaataagcagaccttgaacattgctcagcacaagcagcgctgccctgtgctggaggaccagttggtggatctggttgtttatgccatggagcgatctgagaccgaggagaagtttgacgatgggggaacaagccaactcctgtggcagcatctctcaagtcagctcattttctttgtgcttttccagtttgcaagttttccacatatggtgctttctcttcatcagaagttagcagggcgaggactgattaaaggcagagatcatcttatgtgggttctcctgcaattcatttctggaagtattcagaaaaatgcactagctgattttctccctgtgatgaagctcttcgacttgctatacccagaaaaagaatatatcccagttcctgatattaacaaaccccagtcaacccatgcctttgcaatgacctgtatttggattcatctcaatagaaaagctcaaaatgacaactccaagctacagattccaatacctcattccctaagacttcaccatgagttcctgcagcagagtctaagaaataaaagtttacagatgaatgactataagattgctctattgtgtaatgcatactctacaaattcagaatgttttacattacccatgggagctctggtagaaactatttatggaaatggaattatgaggatacctctccctggaacaaactgtatggcttcaggatctattacccccttacctatgaacctcctggattcactgacagttcatgccaaaatgagccttattcacagcattgcaaccagggtgataaaacttgctcatgcaaagtccagtgtggccttggctccagccctagtggaaacttacagtcgtttattggtctatatggaaatagagtctttgggcatcaaaggatttatcagtcagcttttgccaactgttttcaaatcacatgcatgggggatcttacacacactccttgagatgtttagctaccggatgcatcatattcagcctcattacagagttcagctcctgagtcatcttcatactttggctgcagttgcacaaacaaaccagaaccagctccatctttgtgtcgagagcactgctctcaggcttataacagcattaggtagctcagaggtacaaccgcagtttacacgcttccttagtgatcccaaaacagtgctctcagcagaatctgaagaactgaaccgagccttgatattgaccttggctagagcaactcatgtaacagatttttttacaggctctgattcaattcagggaacttggtgtaaagacatacttcagaccatcatgagtttcactcctcataattgggcttcacacaccctgagctgttttccaggcccactacaggcattcttcaaacaaaataatgtgcctcaggaaagccgttttaatctgaaaaaaaatgtggaggaggagtataggaagtggaagtcaatgagcaacgaaaacgacattattacccacttctctatgcagggctcccctcctctctttctttgtcttctctggaaaatgctcttggaaacagatcatattaatcagattggctatagagtattagagagaattggagccagggccttggtagcccatgtgaggacatttgcagatttcctggtatatgagttttctacatcagcagggggtcagcaactcaataaatgcattgaaattcttaatgacatggtatggaagtataacattgttacactggacagattaattctctgcctggccatgcgtagtcacgaaggaaatgaagcccaggtttgttatttcataattcagttgctgttactcaaaccaaacgattttagaaatcgagtaagtgactttgtgaaggaaaattccccagagcactggttacagaatgactggcacaccaagcacatgaattatcacaagaaatatccagagaagttgtattttgagggcctcgcggaacaggtggatcctcctgtacagatccagtctccctatctgcccatctattttgggaatgtgtgtcttcgattccttccagtatttgatatagtaatccacagatttttagagttgcttccggtatccaaatcactggagactctactggatcatctaggaggcttatataaatttcatgatcgtccagtgacttatctgtataacactctgcactattatgaaatgcacctgagagaccgcgcatttctcaaacgaaaactcgtccatgcgatcattggctctctgaaggataatcgaccgcagggctggtgtctaagtgacacttacctgaaatgcgctatgaatgcacgagaggaaaatccttgggttccagatgacacctactattgcagattgattggcagactagtcgatacgatggctggcaaatctcctggtccctttccaaactgtgactggagattcaatgagtttcccaacccagctgcccatgctctccatgttacttgtgtggagctcatggccttggcagtttcaggcaaagaagttgggaatgcccttctaaatgttgtcctaaaaagtcagcctttagtgccaagagagaacattacagcatggatgaatgcaattggtttgatcatcactgccctaccagagccatattggattgttcttcatgatcgaattgtgagtgtcatcagcagccccagcttgacgtctgaaacagagtgggttggctatccattccgcctctttgatttcactgcctgtcatcagtcctactctgagatgagttgtagctatacgttagctcttgcacatgctgtgtggcaccattctagcatcggacaactttctctcattccaaagtttcttactgaagtacttcttcctatagtgaagaccgaattccagttgctttatgtataccatcttgttggaccatttttacaaagatttcagcaagagagaactcgttgtatgatagagattggtgtggcgttttatgacatgctgctgaatgttgaccagtgtagcacccatttaaattacatggatcccatctgtgacttcctctatcacatgaagtatatgtttactggtgacagcgtgaaagagcaagtagagaagattatctgtaacttaaaaccagctttaaaacttcgtcttcgattcatcacacacattagcaagatggagccagctgcagtgcctccacaagccatgaacagtgggtctccagcacctcagtctaatcagtaaaaagtcagagtacacagcaagggttccaaattaagaggaagcaaaacgctgcccagatcctgagaaacctggagaaaatcaaccttagtagtttcaactcatacattgtcttgtttgattttgttctttgttttttatcctctttaagcacagatgcgtgttgaagtctaaggtgttctgtcatcacactctctttactagaataagtgtgcccaggcagaaaaaaaaagtgtattcaatgttgctggcatgtgtggattcacagctcgtggctgtaaggaaatctgggagtttcataaatccattaaaatccttttagagttgccaaaaaaaaaaaaaaaaaaag

SEQ ID NO: 4350 - protein, 1365 aa, Homo sapien
METQLQSIFEEVVKTEVIEEAFPGMFMDTPEDEKTKLISCLGAFRQFWGGLSQESHEQCIQWIVKFIHGQHSPKRISFLYDCLAMAVETGLLPPRLVCESLINSDTLEWERTQLWALTFKLVRKIIGGVDYKGVRDLLKVILEKILTIPNTVSSAVVQQLLAAREVIAYILERNACLLPAYFAVTEIRKLYPEGKLPHWLLGNLVSDFVDTFRPTARINSICGRCSLLPVVNNSGAICNSWKLDPATLRFPLKGLLPYDKDLFEPQTALLRYVLEQPYSRDMVCNMLGLNKQTLNIAQHKQRCPVLEDQLVDLVVYAMERSETEEKFDDGGTSQLLWQHLSSQLIFFVLFQFASFPHMVLSLHQKLAGRGLIKGRDHLMWVLLQFISGSIQKNALADFLPVMKLFDLLYPEKEYIPVPDINKPQSTHAFAMTCIWIHLNRKAQNDNSKLQIPIPHSLRLHHEFLQQSLRNKSLQMNDYKIALLCNAYSTNSECFTLPMGALVETIYGNGIMRIPLPGTNCMASGSITPLPMNLLDSLTVHAKMSLIHSIATRVIKLAHAKSSVALAPALVETYSRLLVYMEIESLGIKGFISQLLPTVFKSHAWGILHTLLEMFSYRMHHIQPHYRVQLLSHLHTLAAVAQTNQNQLHLCVESTALRLITALGSSEVQPQFTRFLSDPKTVLSAESEELNRALILTLARATHVTDFFTGSDSIQGTWCKDILQTIMSFTPHNWASHTLSCFPGPLQAFFKQNNVPQESRFNLKKNVEEEYRKWKSMSNENDIITHFSMQGSPPLFLCLLWKMLLETDHINQIGYRVLERIGARALVAHVRTFADFLVYEFSTSAGGQQLNKCIEILNDMVWKYNIVTLDRLILCLAMRSHEGNEAQVCYFIIQLLLLKPNDFRNRVSDFVKENSPEHWLQNDWHTKHMNYHKKYPEKLYFEGLAEQVDPPVQIQSPYLPIYFGNVCLRFLPVFDIVIHRFLELLPVSKSLETLLDHLGGLYKFHDRPVTYLYNTLHYYEMHLRDRAFLKRKLVHAIIGSLKDNRPQGWCLSDTYLKCAMNAREENPWVPDDTYYCRLIGRLVDTMAGKSPGPFPNCDWRFNEFPNPAAHALHVTCVELMALAVSGKEVGNALLNVVLKSQPLVPRENITAWMNAIGLIITALPEPYWIVLHDRIVSVISSPSLTSETEWVGYPFRLFDFTACHQSYSEMSCSYTLALAHAVWHHSSIGQLSLIPKFLTEVLLPIVKTEFQLLYVYHLVGPFLQRFQQERTRCMIEIGVAFYDMLLNVDQCSTHLNYMDPICDFLYHMKYMFTGDSVKEQVEKIICNLKPALKLRLRFITHISKMEPAAVPPQAMNSGSPAPQSNQ

SEQ ID NO: 4351 - DNA, 1742 bp, Homo sapien
cgcccgcgcgccccgggagcctacccagcacgcgctccgcgcccactggttccctccagccgccgccgtccagccgagtccccactccggagtcgccgctgccgcggggacatggtcctctgcgttcagggacctcgtcctttgctggctgtggagcggactgggcagcggcccctgtgggccccgtccctggaactgcccaagccagtcatgcagcccttgcctgctggggccttcctcgaggaggtggcagagggtaccccagcccagacagagagtgagccaaaggtgctggacccagaggaggatctgctgtgcatagccaagaccttctcctaccttcgggaatctggctggtattggggttccattacggccagcgaggcccgacaacacctgcagaagatgccagaaggcacgttcttagtacgtgacagcacgcaccccagctacctgttcacgctgtcagtgaaaaccactcgtggccccaccaatgtacgcattgagtatgccgactccagcttccgtctggactccaactgcttgtccaggccacgcatcctggcctttccggatgtggtcagccttgtgcagcactatgtggcctcctgcactgctgatacccgaagcgacagccccgatcctgctcccaccccggccctgcctatgcctaaggaggatgcgcctagtgacccagcactgcctgctcctccaccagccactgctgtacacctaaaactggtgcagccctttgtacgcagaagcagtgcccgcagcctgcaacacctgtgccgccttgtcatcaaccgtctggtggccgacgtggactgcctgccactgccccggcgcatggccgactacctccgacagtaccccttccagctctgactgtacggggcaatctgcccaccctcacccagtcgcaccctggaggggacatcagccccagctggacttgggcccccactgtccctcctccaggcatcctggtgcctgcatacctctggcagctggcccaggaagagccagcaagagcaaggcatgggagaggggaggtgtcacacaacttggaggtaaatgcccccaggccgcatgtggcttcattatactgagccatgtgtcagaggatggggagacaggcaggaccttgtctcacctgtgggctgggcccagacctccactcgcttgcctgccctggccacctgaactgtatgggcactctcagccctggtttttcaatccccagggtcgggtaggacccctactggcagccagcctctgtttctgggaggatgacatgcagaggaactgagatcgacagtgactagtgaccccttgttgaggggtaagccaggctaggggactgcacaattatacactatttatttatttattctccttggggttggtgtcaggggcgagccaaccccacctctatgccctgagccctggtagtccagagaccccaactctgccctggcttctctggttcttccctgtggaaagcccatcctgagacatcttgctggaaccaaggcaatcctggatgtcctggtactgacccacccgtctgtgaatgtgtccactctcttctgcgcccagccatatttggggaggatggacaactacaataggtaagaaaatgcagccggagcctcagtccccagcagagcctgtgtctcaccccctcacaggacagagctgtatctgcatagagctggtctcactgtggcgcaggcccc

SEQ ID NO: 4352 - protein, 258 aa, Homo sapien; identical to SEQ ID NO: 3883

SEQ ID NO: 4353 - DNA, 2359 bp, Homo sapien
gttttgcctgctagcatctccctgtaactctcccaatcttgaggagtgatccctgtcccagcccctggaaaggggcaggaacgacaaactcaaagtccaggatgttcaccatgacaagagccatggaagaggctctttttcagcacttcatgcaccagaagctggggatcgcctatgccatacacaagccatttcccttctttgaaggcctcctagacaactccatcatcactaagagaatgtacatggaatctctggaagcctgtagaaatttgatccctgtatccagagtggtgcacaacattctcacccaactggagaggacttttaacctgtctcttctggtgacattgttcagtcaaattaacctgcgtgaatatcccaatctggtgacgatttacagaagcttcaaacgtgttggtgcttcctatgaacggcagagcagagacacaccaatcctacttgaagccccaactggcctagcagaaggaagctccctccataccccactggcgctgcccccaccacaaccccctcaaccaagctgttcaccctgtgcgccaagagtcagtgagcctggaacatcctcccagcaaagcgatgagatcctgagtgagtcgcccagcccatctgaccctgtcctgcctctccctgcactcatccaggaaggaagaagcacttcagtgaccaatgacaagttaacatccaaaatgaatgcggaagaagactcagaagagatgcccagcctcctcactagcactgtgcaagtggccagtgacaacctgatcccccaaataagagataaagaagaccctcaagagatgccccactctcccttgggctctatgccagagataagagataattctccagaaccaaatgacccagaagagccccaggaggtgtccagcacaccttcagacaagaaaggaaagaaaagaaaaagatgtatctggtcaactccaaaaaggagacataagaaaaaaagcctcccaagagggacagcctcatctagacacggaatccaaaagaagctcaaaagggtggatcaggttcctcaaaagaaagatgactcaacttgtaactccacggtagagacaagggcccaaaaggcgagaactgaatgtgcccgaaagtcgagatcagaggagatcattgatggcacttcagaaatgaatgaaggaaagaggtcccagaagacgcctagtacaccacgaagggtcacacaaggggcagcctcacctgggcatggcatccaagagaagctccaagtggtggataaggtgactcaaaggaaagacgactcaacctggaactcagaggtcatgatgagggtccaaaaggcaagaactaaatgtgcccgaaagtccagatcgaaagaaaagaaaaaggagaaagatatctgttcaagctcaaaaaggagatttcagaaaaatattcaccgaagaggaaaacccaaaagtgacactgtggattttcactgttctaagctccccgtgacctgtggtgaggcgaaagggattttatataagaagaaaatgaaacacggatcctcagtgaagtgcattcggaatgaggatggaacttggttaacaccaaatgaatttgaagtcgaaggaaaaggaaggaacgcaaagaactggaaacggaatatacgttgtgaaggaatgaccctaggagagctgctgaagcggaaaaactcggatgaatgcgaggtgtgctgtcaagggggacaacttctctgctgcggtacttgtccacgagtcttccatgaggactgtcacatcccccctgtggaagccaagaggatgctgtggagttgcaccttctgcaggatgaagaggtcttcaggaagccaacagtgccatcatgtatctaagaccctggagaggcagatgcagcctcaggaccagctgattcgagattacggtgagccctttcaggaagcaatgtggttggacctggttaaggaaaggctgattacggaaatgtacacggtggcatggtttgtgcgagacatgcgcctgatgtttcgcaaccataaaacattttacaaggcttctgactttggccaggtaggacttgacttagaggcagaatttgaaaaagatctcaaagacgtgctcggttttcatgaagccaatgacggcggtttctggactcttccttgaccctgttctgtaaagactgaagcatccccacctcaggattcagctgatgggaccctggcttggactgttgattgccagtgagtctgggatgtaattggctgccctcaggacccaaacccagacacttcataggattatcacaccctccatctttattctttctttttacctttaaaagtctatatcta

SEQ ID NO: 4354 - protein, 689 aa, Homo sapien
MFTMTRAMEEALFQHFMHQKLGIAYAIHKPFPFFEGLLDNSIITKRMYMESLEACRNLIPVSRVVHNILTQLERTFNLSLLVTLFSQINLREYPNLVTIYRSFKRVGASYERQSRDTPILLEAPTGLAEGSSLHTPLALPPPQPPQPSCSPCAPRVSEPGTSSQQSDEILSESPSPSDPVLPLPALIQEGRSTSVTNDKLTSKMNAEEDSEEMPSLLTSTVQVASDNLIPQIRDKEDPQEMPHSPLGSMPEIRDNSPEPNDPEEPQEVSSTPSDKKGKKRKRCIWSTPKRRHKKKSLPRGTASSRHGIQKKLKRVDQVPQKKDDSTCNSTVETRAQKARTECARKSRSEEIIDGTSEMNEGKRSQKTPSTPRRVTQGAASPGHGIQEKLQVVDKVTQRKDDSTWNSEVMMRVQKARTKCARKSRSKEKKKEKDICSSSKRRFQKNIHRRGKPKSDTVDFHCSKLPVTCGEAKGILYKKKMKHGSSVKCIRNEDGTWLTPNEFEVEGKGRNAKNWKRNIRCEGMTLGELLKRKNSDECEVCCQGGQLLCCGTCPRVFHEDCHIPPVEAKRMLWSCTFCRMKRSSGSQQCHHVSKTLERQMQPQDQLIRDYGEPFQEAMWLDLVKERLITEMYTVAWFVRDMRLMFRNHKTFYKASDFGQVGLDLEAEFEKDLKDVLGFHEANDGGFWTLP

SEQ ID NO: 4355 - DNA, 1925 bp, Homo sapien
ggcacgaggcggggagcccggggcctgccaggcccgggctgcagccgcgtctgatcgccgagcgcgccgcgtagacctccgctcccccagggggggctgtcggggggctgttaggtgcctggatgacaagtggacagtttaagccggttcctcagatcctaatggagctgccccctgccgagcaacagaggctctttaacgaagccgcagccatcatcaggcacctggagtggacggacgccgtgcagctgaccgcgctggtcatgggcagcgaggccctgcagcagcagctgctggccatgctggtgaactacgtcaccaaggagctgcgggccgagatccagtatgatgactaggccgcacctccggggaggtggggggcccctttaaatgactctgtgattctgaagaggtggcttgggagttgggagaagcccagcggatgccccctggggaatctccacatcatcagtgtattactagtaatgtcccgctggagaggccaccgctgtgcagtgtcatgttccagaaattactgatgaagcagcatgtgttggtggcatgtgcactggcctgccatgacagccctctgactggccccccagtgaagagtaaaggcctgcctgccgcaggcttcggaggcgtctgctgagtcctctcacccgcatgggtctggggaagtgatcacgctcagccgacggtctgaccacacttcatcctccccccggggccttctcatcttgggagatgactcctcttcagagcacctgctgcaggactggatcccacccccctgcaggtcctggggtctcagggccttggagcagcccatgctggaatcatgtttacctcctagtgcaaccgtcccctacccagggactgtcgaatggccccacggaggggacgggcggcctgctgagtgaagccacaaataccgagtggacttgaccccggcccccactaggctgcacacctagactcgccctgccagggcctcgctcttcccatctgaaaagtcctggtagttcttgaggtttacttctcaaatgaaatatttttagtaaaaagtacaggtatatctcggagatattgtgggttcagttccagaccacctcggtaaagccaacatcacaataaagcaaggaagcgcattgttttagtttcccagtgcatctaagtcatgtttactgcatattgcagtccactaaatgtgcaatagcattatgtctaacaaatgtacaaaccttaatttaaaaatatttactgttcaaaatgctgacacagaaacgcaaagtgagcacatgctgttggaaaatggtgccaaatagacttgcctgatgccaggctgctacaaaccttcaatttaaaaaaaaaacacagtattcacaaagcatagtagaatgaggtatgcctgtattgctctttctgaagtggtgtgatataaaccatctctaagaaatgtttctaccctaaagatttccccagtacagtcagctctccgtaactgtggtctccacatttagatccaaccagccttggataggaaatatttgaaaaaagaaattgcattggtactgaacacgtacagacctttttttcttgccattattccctaaacaatatggtgtagcatatttacatagcatttatattgtatttggtattataagaaatctagagatgatttaaattatacaggaaggtgtgcgtaggttacgtgcaaacgctatgccattgcccatcagggacttgagcatcctcagatgtcggtgtctgagggttgaggttgcagtcctggaacccatcccccatggatactgaggcatagctgtactgtgtgttttcactttgctttcagaactacgacttgaatgtgatcgattacaataaatgtttttctaaaaaaaaaaaaaaaaaaaaaaaaa

SEQ ID NO: 4356 - protein, 77 aa, Homo sapien
MTSGQFKPVPQILMELPPAEQQRLFNEAAAIIRHLEWTDAVQLTALVMGSEALQQQLLAMLVNYVTKELRAEIQYDD

SEQ ID NO: 4357 - DNA, 2730 bp, Homo sapien
ggcacgagggttcccgccaggtccgtgccgggcgagagagatgctgcccggcccgcctcggctttgaggcgagagaagtgtcccagacccatttcgccttgctgacggcgtcgagccctggccagacatgtccacagggttctccttcgggtccgggactctgggctccaccaccgtggccgccggcgggaccagcacaggcggcgttttctccttcggaacgggagcgtctagcaacccttctgtggggctcaattttggaaatcttggaagtacttcaactccagcaactacatctgctccttcaagtggttttggaaccgggctctttggatctaaacctgccactgggttcactctaggaggaacaaatacaggaatagcaacaactataactacaggattaactctgggaacgccagccactacatctgcagctacaacaggcttcagtttaggattcaataaacctgcagcatctgccacaccatttgctctacctattacctctacctcagctagcggtctgactctttcgtctgctctgacatcaactccagcagcatccacaggatttactctaaataatttgggtgggacaacagccacaactacaactgcatcaacaggcctctctttagggggagccttagctggtttgggaggttcacttttccagagtacaaacacaggaacatcaggacttggacagaatgctttagggttgactttgggaactacagcagctacttcaactgcaggcaatgaaggccttggtggtatagatttcagtagctcctcagataaaaagagtgataaaacgggaacaagaccagaggatagtaaagctctgaaggatgaaaatctacctcctgtcatctgccaggatgttgaaaatctccagaaatttgtgaaggagcagaaacaagttcaagaagaaattagtagaatgtcttcaaaagcaatgcttaaggtacaagaagatattaaagctctgaagcagctcctgtcgttggctgccaatggaatacagagaaacactctcaacattgacaaattgaaaatagaaactgctcaggagttgaagaatgctgaaatagctttaagaacccagaagacaccacctggacttcaacatgaatatgcagctcctgctgactacttcagaatcttggttcagcaatttgaggtacagcttcagcagtacaggcagcagattgaagaactagaaaaccatcttgccactcaagcaaataattcacatataacccctcaagatttgtcaatggctatgcagaaaatttatcaaacatttgtagctttagcggcacaacttcagtctattcatgaaaatgtaaaggttctgaaagaacagtaccttggctacaggaaaatgttcttgggagatgctgttgatgtgtttgaaacaaggcgagcagaagccaagaagtggcagaacacacccagagttactactggacccactcctttcagcaccatgccaaacgcagcagccgttgccatggctgcaacacttacacagcagcaacagcctgctacagggccacagccatctctgggagttagttttggaacgccattcggctcaggtattggcactggcttgcaatcaagtggcttaggttcttcaaaccttggaggatttggaactagctctggttttggatgcagcaccacaggggcctccacatttggatttggaacaacaaataaaccctcaggaagtcttagtgcaggctttggcagctcaagtacatctgggtttaacttcagcaatcctggcatcacggcatcagctggtttgacttttggggtgtccaatcctgcctctgcaggttttggaacaggaggacaactccttcagttgaagaaacctccagctggaaacaaaagaggaaaaagataaacatgggttgatgtgttgagagaatccatagcagcaccgttcattctatgagtctatttttctaatgatgcagtaattaaattgcatcccaggagatttataaagttttgatatttttccctactctggaatttgaactttcttcatgtttgccatactgaacatcttttttcttgtggaatttaaagtccagctgtgttttctttttaatttgattctcagtgtaagaaatgttctgattacatcactgattggtaatggttagaaaccattaacctaaaacttactatttaacctagtgtttttgttgatgaggtttacattatgtgaatacatgcacatttgtttcttatacaggtggtgtgaactctagggcctatactagaatcaatttgttccttgttaaaggccttttgaattatactgcagggcatcttgtgaatatgtatgtaaatatatacagaataatacacacagttgtgtgtgcatataaaatacatatttacgccaggcgtggtggctcacgcctgtaatcccagcactttgggaggccgaggcaggcggatcacctgaggtcaggagtttgagaccagcctgacatggtgaaaccccatctctacgaaaaatacaaaaattagctgggcatagtggcgggtacctataatcccagctactcgggaggctgaggcacgagaatcacttgaagccgggaggtgggggttgcagtgagccgagatcacaccactgcactccagcctgggcaacaagagcaaaactccgtctcaaaaaaaaaaaaaaaaaaa

SEQ ID NO: 4358 - protein, 599 aa, Homo sapien
MSTGFSFGSGTLGSTTVAAGGTSTGGVFSFGTGASSNPSVGLNFGNLGSTSTPATTSAPSSGFGTGLFGSKPATGFTLGGTNTGIATTITTGLTLGTPATTSAATTGFSLGFNKPAASATPFALPITSTSASGLTLSSALTSTPAASTGFTLNNLGGTTATTTTASTGLSLGGALAGLGGSLFQSTNTGTSGLGQNALGLTLGTTAATSTAGNEGLGGIDFSSSSDKKSDKTGTRPEDSKALKDENLPPVICQDVENLQKFVKEQKQVQEEISRMSSKAMLKVQEDIKALKQLLSLAANGIQRNTLNIDKLKIETAQELKNAEIALRTQKTPPGLQHEYAAPADYFRILVQQFEVQLQQYRQQIEELENHLATQANNSHITPQDLSMAMQKIYQTFVALAAQLQSIHENVKVLKEQYLGYRKMFLGDAVDVFETRRAEAKKWQNTPRVTTGPTPFSTMPNAAAVAMAATLTQQQQPATGPQPSLGVSFGTPFGSGIGTGLQSSGLGSSNLGGFGTSSGFGCSTTGASTFGFGTTNKPSGSLSAGFGSSSTSGFNFSNPGITASAGLTFGVSNPASAGFGTGGQLLQLKKPPAGNKRGKR

SEQ ID NO: 4359 - DNA, 1113 bp, Homo sapien
ggggcgacgtttagcgactattgcgcctgcgccagcgccggctgcgagactggggccgtggctgctggtcccgggtgatgctaggcggctccctgggctccaggctgttgcggggtgtaggtgggagtcacggacggttcggggcccgaggtgtccgcgaaggtggcgcagccatggcggcaggggagagcatggctcagcggatggtctgggtggacctggagatgacaggattggacattgagaaggaccagattattgagatggcctgtctgataactgactctgatctcaacattttggctgaaggtcctaacctgattataaaacaaccagatgagttgctggacagcatgtcagattggtgtaaggagcatcacgggaggtctggccttaccaaggcagtgaaggagagtacaattacattgcagcaggcagagtatgaatttctgtcctttgtacgacagcagactcctccagggctctgtccacttgcaggaaattcagttcatgaagataagaagtttcttgacaaatacatgccccagttcatgaaacatcttcattatagaataattgatgtgagcactgttaaagaactgtgcagacgctggtatccagaagaatatgaatttgcaccaaagaaggctgcttctcatagggcacttgatgacattagtgaaagcatcaaagagcttcagttttaccgaaataacatcttcaagaaaaaaatagatgaaaagaagaggaaaattatagaaaatggggaaaatgagaagaccgtgagttgatgccagttatcatgctgccactacatcgttatctggaggcaacttctggtggtttttttttctcacgctgatggcttggcagagcaccttcggttaacttgcatctccagattgattactcaagcagacagcacacgaaatactatttttctcctaatatgctgtttccattatgacacagcagctcctttgtaagtaccaggtcatgtccatcccttggtacatatatgcatttgcttttaaaccatttcttttgtttaaataaataaataagtaaataaagctagttctattgaaatgcaaaaaaaaaaaaaaaaaaaaa

SEQ ID NO: 4360 - protein, 237 aa, Homo sapien
MLGGSLGSRLLRGVGGSHGRFGARGVREGGAAMAAGESMAQRMVWVDLEMTGLDIEKDQIIEMACLITDSDLNILAEGPNLIIKQPDELLDSMSDWCKEHHGRSGLTKAVKESTITLQQAEYEFLSFVRQQTPPGLCPLAGNSVHEDKKFLDKYMPQFMKHLHYRIIDVSTVKELCRRWYPEEYEFAPKKAASHRALDDISESIKELQFYRNNIFKKKIDEKKRKIIENGENEKTVS

SEQ ID NO: 4361 - DNA, 2990 bp, Homo sapien
atggaagtgtgttaccagctgccggtactgcccctggacaggccggtcccccagcacgtcctcagccgccgaggagccatcagcttcagctccagctccgctctcttcggctgccccaatccccggcagctctctcagaggcgtggagctatttcctatgacagttctgatcagactgcattatacattcgtatgctaggagatgtacgtgtaaggagccgagcaggatttgaatcagaaagaagaggttctcacccatatattgattttcgtattttccactctcaatctgaaattgaagtgtctgtctctgcaaggaatatcagaaggctactaagtttccagcgatatcttagatcttcacgcttttttcgtggtactgcggtttcaaattccctaaacattttagatgatgattataatggacaagccaagtgtatgctggaaaaagttggaaattggaattttgatatctttctatttgatagactaacaaatggaaatagtctagtaagcttaacctttcatttatttagtcttcatggattaattgagtacttccatttagatatgatgaaacttcgtagatttttagttatgattcaagaagattaccacagtcaaaatccttaccataacgcagtccacgctgcggatgttactcaggccatgcactgttacttaaaggaacctaagcttgccaattctgtaactccttgggatatcttgctgagcttaattgcagctgccactcatgatctggatcatccaggtgttaatcaacctttccttattaaaactaaccattacttggcaactttatacaagaatacctcagtactggaaaatcaccactggagatctgcagtgggcttattgagagaatcaggcttattctcacatctgccattagaaagcaggcaacaaatggagacacagataggtgctctgatactagccacagacatcagtcgccagaatgagtatctgtctttgtttaggtcccatttggatagaggtgatttatgcctagaagacaccagacacagacatttggttttacagatggctttgaaatgtgctgatatttgtaacccatgtcggacgtgggaattaagcaagcagtggagtgaaaaagtaacggaggaattcttccatcaaggagatatagaaaaaaaatatcatttgggtgtgagtccactttgcgatcgtcacactgaatctattgccaacatccagattggtaactatacatatttagatatagctggttagaaaaatgccactgtttttatcaagaagggaaatatatttgaaatataaaatattaaaattatgctcatttctatttttaaaaataatttaagaaattttacccttgttttcccttgttatggctcttctaattctcatttaattttaggatgtaaaaagtatatttttgcagaacaggcagcagcaataacttgtttctgttcttatgtaaataagaatccattattcgctcatgtggaagcttcttttgcatcatttgggactgccatttaaaaaaggataggtaaacaaagaaatgacaaaaataaaataaataaaataaaaatggataggtggtgacccactgagcctgatcataatacgaagaccagcttctgccactgcctttccagactcttaccactgcctgttgattaaatctaactcttcaacatcctagacaggcccttataatcttgcttcaaatgctgtgcagccatcttgcctcaacttccctctcatttgcctacagcatctcgggacgcttctgtgtttcccaagtatacgctgttctttcgctctttgtgcttcgccagtgctttccatgtgcctcgtagagttatttttcttgaagaggcagctcaaatgtcaccttctccagaagctgctctccacttgctttaggcagagtcagtcacttttcttctagattccaaagtgcctgatccacttggttgtggattcctggagcctagcaccacaccagaagcacgaggcccttgagaactgtgtgttgagtgaactaataactgtattatagaaagcataatgaaaatgtcctgtgactgaagtatgtgtagcttgttgcaggagtcacaggaaagttgactaggattgagtgtgttgggctttgggtataaaggagggggattctacgggggcagtagctcaacaaggaatagagggaggagtgtaattttggtagctggtgttgaatagggcctttgagaatcagactgaacacagtgaaatatgtgcccaaagttcagaaagatgaagtttccagaaactaagaaggtagcacaatatgtggcatcatactcagaaaggaagaccatgccatggggccagaaattcagaaacgtaattcttacattgtgattgcaatggatactcatgaaagaaagtgggtagtggccgatttgccttcagagtgacaggtagagaagggaagagcgtgtagaactgtggccatactttaggagtgtgagggatgctgaatctcccagagagctcacactggccaggaatgctgagagtagcagatgcttttcttttgggaggatagtaaaacaatttagaaccagatatgctttgtcttgattctcaagtagaataatcttcaaatgcaaaagaatacattagaaatggacaaaagtggccaggagcggtagctcatacttgtaacccagcactttgggaagccgaggcgggctgatcgcttgaggtcaggagttcgagaccagcctggccaaaatagtgaaactcacgtttctactaaaaatacaaaaattagctgggtgtgatggccacttgggaggctgagataggagaatcgcttgaacctgggaggcagaggttgcagtgagccaatatcgtgccactgcattccagcctgggtgacagaatgaaactccatcactccatctcaaaaaaaaaaaaaaaaaaaaaaaaaa

SEQ ID NO: 4362 - protein, 424 aa, Homo sapien
MEVCYQLPVLPLDRPVPQHVLSRRGAISFSSSSALFGCPNPRQLSQRRGAISYDSSDQTALYIRMLGDVRVRSRAGFESERRGSHPYIDFRIFHSQSEIEVSVSARNIRRLLSFQRYLRSSRFFRGTAVSNSLNILDDDYNGQAKCMLEKVGNWNFDIFLFDRLTNGNSLVSLTFHLFSLHGLIEYFHLDMMKLRRFLVMIQEDYHSQNPYHNAVHAADVTQAMHCYLKEPKLANSVTPWDILLSLIAAATHDLDHPGVNQPFLIKTNHYLATLYKNTSVLENHHWRSAVGLLRESGLFSHLPLESRQQMETQIGALILATDISRQNEYLSLFRSHLDRGDLCLEDTRHRHLVLQMALKCADICNPCRTWELSKQWSEKVTEEFFHQGDIEKKYHLGVSPLCDRHTESIANIQIGNYTYLDIAG

SEQ ID NO: 4363 - DNA, 921 bp, Homo sapien
tcctttggtgccttgtgaccagggccctgatggttcattagatggagccttcgagtcttagggagttgccgcagggtccccacagcggctcccgacggttgtgaaccagcatccatcctccacggattccggcaacccgcctggccctggacgtgtctcaactggcccgcgtgaggggccgccccggaaatgacgcgctgccccgctggccaagcggaagtggagatggcggagctgtacgtgaagccgggcaacaaggaacgcggctggaacgacccgccgcagttctcatacgggctgcagacccaggccggcggacccaggcgctcgctgcttaccaagagggtagccgcaccccaggatggatcccccagagtccccgcatcagagacttctcctgggcctcccccaatggggcctccacctccttcaagtaaggctcccaggtccccacctgtggggagtggtcctgcctctggcgtggagcccacaagtttcccagtcgagtctgaggctcgactgatggaggatgtgctgagacctttggaacaggcattggaagactgccgtggccacacaaggaagcaggtatgtgatgacatcagccgacgcctggcactgctgcaggaacagtgggctggaggaaagttgtcaatacctgtaaagaagagaatggctctactggtgcaagagctttcaagccaccggtgggacgcagcagatgacatccaccgctccctcatggttgaccatgtgactgaggtcagtcagtggatggtaggagttaaaagattaattgcagaaaagaggagtctgttttcagaggaggcagccaatgaagagaaatctgcagccacagctgagaagaaccataccataccaggcttccagcaggcttcataatcctcggttccccagact

SEQ ID NO: 4364 - protein, 237 aa, Homo sapien
MTRCPAGQAEVEMAELYVKPGNKERGWNDPPQFSYGLQTQAGGPRRSLLTKRVAAPQDGSPRVPASETSPGPPPMGPPPPSSKAPRSPPVGSGPASGVEPTSFPVESEARLMEDVLRPLEQALEDCRGHTRKQVCDDISRRLALLQEQWAGGKLSIPVKKRMALLVQELSSHRWDAADDIHRSLMVDHVTEVSQWMVGVKRLIAEKRSLFSEEAANEEKSAATAEKNHTIPGFQQAS

SEQ ID NO: 4365 - DNA, 2026 bp, Homo sapien
cagaagactacattagtgagatgtaagaattattaaatattccatttccgctttggctacaattatgaagaagttgaaggtacttcttttagaccaccagtaaataatcctccttcaaaaaataaaaataaaagaaaaaggaaaatcattcaggaagaaatgacctgtctaaaaaaacctaaggaagaataataatataagaaaggaaatttaaaaacattccacaagaagaaaaattattgtttatactcctacttatggttatatcttatattctctattcaagtgacctgtcttttaaaaaggcagtgctgtcttacctcttgctagtgggttaaatgttttcaaaaattatagcagtagtagaagttttgtataaaatttgtccttatttgttaattgtatataaatgttaattatttgatacgaatgttatgcatttagtatgcacattgaagtctaaactgtagaagagtctaaaacaagttctctttttgcagattcacatactaatggtttaattctgtgctctgtttaaagtactattataactagagtagatctgaatgaggataaccctaaaatcatgaggaatggaagaatggaccttgaaactacctaggcttttatgcatggcacctctttataatgaagacactttttaaagtttttgtttttgtttcaattaccgctagatttttttttctctttttttaaaatccattttactggaaagttggccagcagagggagtagaaattattaaaattctagtgtttggattgggcccttctctaacagtacatactcattcccaaagcaatccaaaaacaaaatgtgaaccatttgggtttcaaatgttaagaacactaaatagcatgatttaaaaaatgaaaaatgctaacacccaagaaaagaagatattaagtgccttttaacaactcctagagtacaaaatgagtacatcataatgctggctcttctactaatgaaccatcgagtgatattgaataaattatttatcttctcagtttccttatctgtaaattacaatattagactaagtaagtttttccaactcttcactaccaattaccttaggcttttataatgctccgcctacttcagtcccatgtttcagaagcttttgtctattttttaaactcattgattaaataatgattaatgcattctccacattttaatattgcaaaggcccattggagtttctgaagtggctccacagaattgaaataatttcaaataactgtaaaggaactgaaaatcttcacagagatgaagtggggtttccattaggtgctttgaaatttgataacaaatcatcaacttccactggtcaatatatagattttgggtgtctgaggccccaagattagatgccactaatctccaaagattccctccaattatgaaatattttaatgtctacttttagagagcactagccagtatatgaccatgtgattaatttcttttcacactagataaaattacctggttcaaaagtggtttttgtttattaaatttggtaataaatatatataatacacagacaggatagtttttatgctgaagtttttggccagctttagtttgaggactccttgataagcttgctaaactttcagagtgccctgagacacttccagccatccctcctcctgccttcattggggcagacttgcattgcagtctgacagtaattttttttctgattgagaattatgtaaattcaatacaatgtcagtttttaaaagtcaaagttagatcaagagaatatttcagagttttggtttacacatcaagaaacagacacacatacctaggaaagatttacacaatagataatcatcttaatgtgaaagatatttgaagtattaattttaatatattaaatatgatttctgttatagtcttctgtatggaattttgtcacttaagatgagctgcaaataaataataccttcaatggaaaaaaaaaaaaaaaaaaaaaaaaaaaaaaaaa

SEQ ID NO: 4366 - DNA, 1969 bp, Homo sapien
ccgggcaggtctcctgtggtttccagccgcgtgagtccagggacaagaccaacagctatggggtctttcagctcacacatgacagagtttccacgaaaacgcaaaggaagtgattcagacccatcccatcagaatccccttacctatcttctttcaacaaggatagaaatatcagcctccagtggcagcagagaagctcatagccaaactgaaaagcggaggagagataaaatgaataacctgattgaagaactgtctgcaatgatccctcagtgcaaccccatggcgcgtaaactggacaaacttacagttttaagaatggctgttcaacacttgagatctttaaaaggcttgacaaattcttatgtgggaagtaattatagaccatcatttcttcaggataatgagctcagacatttaatccttaagactgcagaaggcttcttatttgtggttggatgtgaaagaggaaaaattctcttcgtttctaagtcagtctccaaaatacttaattatgatcaggctagtttgactggacaaagcttatttgacttcttacatccaaaagatgttgccaaagtaaaggaacaactttcttcttttgatatttcaccaagagaaaagctaatagataccaaaactggtttgcaagttcacagtaatctccacgctggaaggacacgtgtgtattttggctcaagacgatcttttttctgtcggataaagagttgtaaaatctctgtcaaagaagagcatggatgcttacccaactcaaagaagaaagagcacagaaaattctatactatccattgcactggttacttgagaagctggcctccaaatattgttggaatggaagaagaaaggaacagtaagaaagacaacagtaattttacctgccttgtggccattggaagattacagccatatattgttccacagaacagtggagagattaatgtgaaaccaactgaatttataacccggtttgcagtgaatggaaaatttgtctatgtagatcaaagggcaacagcgattttaggatatctgcctcaggaacttttgggaacttcttgttatgaatattttcatcaagatgaccacaataatttgactgacaagcacaaagcagttctacagagtaaggagaaaatacttacagattcctacaaattcagagcaaaagatggctcttttgtaactttaaaaagccaatggtttagtttcacaaatccttggacaaaagaactggaatatattgtatctgtcaacactttagttttgggacatagtgagcctggagaagcatcatttttaccttgtagctctcaatcatcagaagaatcctctagacagtcctgtatgagtgtacctggaatgtctactggaacagtacttggtgctggtagtattggaacagatattgcaaatgaaattctggatttacagaggttacagtcttcttcataccttgatgattcgagtccaacaggtttaatgaaagatactcatactgtaaactgcaggagtatgtcaaataaggagttgtttccaccaagtccttctgaaatgggggagctagaggctaccaggcaaaaccagagtactgttgctgtccacagccatgagccactcctcagtgatggtgcacagttggatttcgatgccctatgtgacaatgatgacacagccatggctgcatttatgaattacttagaagcagaggggggcctgggagaccctggggacttcagtgacatccagtggaccctctagcctttgatttttaactccaaaaatgagaaacattttaaagcatttcatttacgaaaaactgtctcaactattcttaagtactgtattgatattgtttgtatcttttattaatgttctaccactttttatagatttgcatcttcctgtcacagggatgtggggaaatacgttttcctcccaagagaaccaagtt

SEQ ID NO: 4367 - protein, 572 aa, Homo sapien [sequence omitted]

SEQ ID NO: 4368 - DNA, 1869 bp, Homo sapien
gcacacactcatcgaaaaaaatttggattattagaagagagaggtctgcggcttccacaccgtacagcgtggtttttcttctcggtataaaagcaaagttgtttttgatacgtgacagtttcccacaagccaggctgatccttttctgtcagtccacttcaccaagcctgcccttggacaaggacccgatgcccaaccccaggcctggcaagccctcggccccttccttggcccttggcccatccccaggagcctcgcccagctggagggctgcacccaaagcctcagacctgctgggggcccggggcccagggggaaccttccagggccgagatcttcgaggcggggcccatgcctcctcttcttccttgaaccccatgccaccatcgcagctgcagctgcccacactgcccctagtcatggtggcaccctccggggcacggctgggccccttgccccacttacaggcactcctccaggacaggccacatttcatgcaccagctctcaacggtggatgcccacgcccggacccctgtgctgcaggtgcaccccctggagagcccagccatgatcagcctcacaccacccaccaccgccactggggtcttctccctcaaggcccggcctggcctcccacctgggatcaacgtggccagcctggaatgggtgtccagggagccggcactgctctgcaccttcccaaatcccagtgcacccaggaaggacagcaccctttcggctgtgccccagagctcctacccactgctggcaaatggtgtctgcaagtggcccggatgtgagaaggtcttcgaagagccagaggacttcctcaagcactgccaggcggaccatcttctggatgagaagggcagggcacaatgtctcctccagagagagatggtacagtctctggagcagcagctggtgctggagaaggagaagctgagtgccatgcaggcccacctggctgggaaaatggcactgaccaaggcttcatctgtggcatcatccgacaagggctcctgctgcatcgtagctgctggcagccaaggccctgtcgtcccagcctggtctggcccccgggaggcccctgacagcctgtttgctgtccggaggcacctgtggggtagccatggaaacagcacattcccagagttcctccacaacatggactacttcaagttccacaacatgcgaccccctttcacctacgccacgctcatccgctgggccatcctggaggctccagagaagcagcggacactcaatgagatctaccactggttcacacgcatgtttgccttcttcagaaaccatcctgccacctggaagaacgccatccgccacaacctgagtctgcacaagtgctttgtgcgggtggagagcgagaagggggctgtgtggaccgtggatgagctggagttccgcaagaaacggagccagaggcccagcaggtgttccaaccctacacctggcccctgacctcaagatcaaggaaaggaggatggacgaacaggggccaaactggtgggaggcagaggtggtgggggcagggatgataggccctggatgtgcccacagggaccaagaagtgaggtttccactgtcttgcctgccagggcccctgttcccccgctggcagccaccccctcccccatcatatcctttgccccaaggctgctcagaggggccccggtcctggccccagcccccacctccgccccagacacaccccccagtcgagccctgcagccaaacagagccttcacaaccagccacacagagcctgcctcagctgctcgcacagattacttcagggctggaaaagtcacacagacacacaaaatgtcacaatcctgtccctcac

SEQ ID NO: 4369 - protein, 431 aa, Homo sapien
MPNPRPGKPSAPSLALGPSPGASPSWRAAPKASDLLGARGPGGTFQGRDLRGGAHASSSSLNPMPPSQLQLPTLPLVMVAPSGARLGPLPHLQALLQDRPHFMHQLSTVDAHARTPVLQVHPLESPAMISLTPPTTATGVFSLKARPGLPPGINVASLEWVSREPALLCTFPNPSAPRKDSTLSAVPQSSYPLLANGVCKWPGCEKVFEEPEDFLKHCQADHLLDEKGRAQCLLQREMVQSLEQQLVLEKEKLSAMQAHLAGKMALTKASSVASSDKGSCCIVAAGSQGPVVPAWSGPREAPDSLFAVRRHLWGSHGNSTFPEFLHNMDYFKFHNMRPPFTYATLIRWAILEAPEKQRTLNEIYHWFTRMFAFFRNHPATWKNAIRHNLSLHKCFVRVESEKGAVWTVDELEFRKKRSQRPSRCSNPTPGP

SEQ ID NO: 4370 - DNA, 10011 bp, Homo sapien
ttcctccgcgaaggctcctttgatattaatagtgttggtgtcttgaaactgacgtaatgcgcggagactgaggtcctgacaagcgataacatttctgataaagacccgatcttactgcaatctctagcgtcctcttttttggtgctgctggtttctccagacctcgcgtcctctcgattgctctctcgccttcctatttcttttttttttttttaaacaaaaaacaacaccccctcccctctcccacccggcaccgggcacatccttgctctatttcctttctctttctctctctctctctctcttttttaataagggtgggggagggaaaggggggggaggcaggaaagacctttttctctcccccccgcaataatccaagatcaactctgcaaacaacagaagacggttcatggctttggccgccgcgccaccatctttcgggctgccgagggtgttcttgacgattaatcaacagatgtacagatcagctctcaaaatgtcttctgtgtcttctgagcgtcttctaagacaattgcattagcctcctgctagttgactaatagaattaataattgtaaaaagcactctaaagccacatgccttatgaagtcaatgctgggtatgattttacaaatatggtccggaaaaagaacccccctctgagaaacgttgcaagtgaaggcgagggccagatcctggagcctataggtacagaaagcaaggtatctggaaagaacaaagaattctctgcagatcagatgtcagaaaatacggatcagagtgatgctgcagaactaaatcataaggaggaacatagcttgcatgttcaagatccatcttctagcagtaagaaggacttgaaaagcgcagttctgagtgagaaggctggcttcaattatgaaagccccagtaagggaggaaactttccctcctttccgcatgatgaggtgacagacagaaatatgttggctttctcatttccagctgctgggggagtctgtgagcccttgaagtctccgcaaagagcagaggcagatgaccctcaagatatggcctgcaccccctcaggggactcactggagacaaaggaagatcagaagatgtcaccaaaggctacagaggaaacagggcaagcacagagtggtcaagccaattgtcaaggtttgagcccagtttcagtggcctcaaaaaacccacaagtgccttcagatgggggtgtaagactgaataaatccaaaactgacttactggtgaatgacaacccagacccggcacctctgtctccagagcttcaggactttaaatgcaatatctgtggatatggttactacggcaacgaccccacagatctgattaagcacttccgaaagtatcacttaggactgcataaccgcaccaggcaagatgctgagctggacagcaaaatcttggcccttcataacatggtgcagttcagccattccaaagacttccagaaggtcaaccgttctgtgttttctggtgtgctgcaggacatcaattcttcaaggcctgttttactaaatgggacctatgatgtgcaggtgacttcaggtggaacattcattggcattggacggaaaacaccagattgccaagggaacaccaagtatttccgctgtaaattctgcaatttcacttatatgggcaactcatccaccgaattagaacaacattttcttcagactcacccaaacaaaataaaagcttctctcccctcctctgaggttgcaaaaccttcagagaaaaactctaacaagtccatccctgcacttcaatccagtgattctggagacttgggaaaatggcaggacaagataacagtcaaagcaggagatgacactcctgttgggtactcagtgcccataaagcccctcgattcctctagacaaaatggtacagaggccaccagttactactggtgtaaattttgtagtttcagctgtgagtcatctagctcacttaaactgctagaacattatggcaagcagcacggagcagtgcagtcaggcggccttaatccagagttaaatgataagctttccaggggctctgtcattaatcagaatgatctagccaaaagttcagaaggagagacaatgaccaagacagacaagagctcgagtggggctaaaaagaaggacttctccagcaagggagccgaggataatatggtaacgagctataattgtcagttctgtgacttccgatattccaaaagccatggccctgatgtaattgtagtggggccacttctccgtcattatcaacagctccataacattcacaagtgtaccattaaacactgtccattctgtcccagaggactttgcagcccagaaaagcaccttggagaaattacttatccgtttgcttgtagaaaaagtaattgttcccactgtgcactcttgcttctgcacttgtctcctggggcggctggaagctcgcgagtcaaacatcagtgccatcagtgttcattcaccacccctgacgtagatgtactcctctttcactatgaaagtgtgcatgagtcccaagcatcggatgtcaaacaagaagcaaatcacctgcaaggatcggatgggcagcagtctgtcaaggaaagcaaagaacactcatgtaccaaatgtgattttattacccaagtggaagaagagatttcccgacactacaggagagcacacagctgctacaaatgccgtcagtgcagttttacagctgccgatactcagtcactactggagcacttcaacactgttcactgccaggaacaggacatcactacagccaacggcgaagaggacggtcatgccatatccaccatcaaagaggagcccaaaattgacttcagggtctacaatctgctaactccagactctaaaatgggagagccagtttctgagagtgtggtgaagagagagaagctggaagagaaggacgggctcaaagagaaagtttggaccgagagttccagtgatgaccttcgcaatgtgacttggagaggggcagacatcctgcgggggagtccgtcatacacccaagcaagcctggggctgctgacgcctgtgtctggcacccaagagcagacaaagactctaagggatagtcccaatgtggaggccgcccatctggcgcgacctatttatggcttggctgtggaaaccaagggattcctgcagggggcgccagctggcggagagaagtctggggccctcccccagcagtatcctgcatcgggagaaaacaagtccaaggatgaatcccagtccctgttacggaggcgtagaggctccggtgttttttgtgccaattgcctgaccacaaagacctctctctggcgaaagaatgcaaatggcggatatgtatgcaacgcgtgtggcctctaccagaagcttcactcgactcccaggcctttaaacatcattaaacaaaacaacggtgagcagattattaggaggagaacaagaaagcgccttaacccagaggcacttcaggctgagcagctcaacaaacagcagaggggcagcaatgaggagcaagtcaatggaagcccgttagagaggaggtcagaagatcatctaactgaaagtcaccagagagaaattccactccccagcctaagtaaatacgaagcccagggttcattgactaaaagccattctgctcagcagccagtcctggtcagccaaactctggatattcacaaaaggatgcaacctttgcacattcagataaaaagtcctcaggaaagtactggagatccaggaaatagttcatccgtatctgaagggaaaggaagttctgagagaggcagtcctatagaaaagtacatgagacctgcgaaacacccaaattattcaccaccaggcagccctattgaaaagtaccagtacccactttttggacttccctttgtacataatgacttccagagtgaagctgattggctgcggttctggagtaaatataagctctccgttcctgggaatccgcactacttgagtcacgtgcctggcctaccaaatccttgccaaaactatgtgccttatcccaccttcaatctgcctcctcatttttcagctgttggatcagacaatgacattcctctagatttggcgatcaagcattccagacctgggccaactgcaaacggtgcctccaaggagaaaacgaaggcaccaccaaatgtaaaaaatgaaggtcccttgaatgtagtaaaaacagagaaagttgatagaagtactcaagatgaactttcaacaaaatgtgtgcactgtggcattgtctttctggatgaagtgatgtatgctttgcatatgagttgccatggtgacagtggacctttccagtgcagcatatgccagcatctttgcacggacaaatatgacttcacaacacatatccagaggggcctgcataggaacaatgcacaagtggaaaaaaatggaaaacctaaagagtaaaaccttagcacttagcacaattaaatagaaataggttttcttgatgggaattcaatagcttgtaatgtcttatgaagacctattaaaaaaatacttcatagagcctgccttatccaacatgaaattcccttcttttgttattctttcttttgatgagtaggttaccaagattaaaaagtgagataaatggtcaatgagaaagaatggaagatggtaaacaatcactttttaaaacctgttaagtcaaaaccatcttggctaatatgtactggggaaataatccataagagatatcaccagactagaattaatatatttataaagaaagagaccaaaactgtctagaatttgaaagggtttacatattattatactaaagcagtactggactggccattggaccatttgttccaaaacccataaattgttgcctaaatttataatgatcatgaaaccctaggcagaggaggagaaattgaaggtccagggcaatgaaagaaaaatggcgccctctcaatttagtcttctctcattggccatgtttcagattttgacctagaaatgcgagctgtggttaggcttggttagagtgcagcaagcaacatgacagatggtggcacgctgtttttacccagccctgcctgtacatacacatgcacaccctctctgatatttttgtcctttagatgttcaaatactcagtagtccttttgtttgcggtttagattcattttgtccacacatgtacccattttaaaaaacaatgtcctcgatgcttctgtagtgatttcattttagccaggtatttctttcttgtgtgtgatgaaccagtatggatttgcttttctaagcctcctgttggttactaatctcacttggcacattataactaaaggaatcccctcaattcaaaagcatagatggatacaaatgtcagaccgtgggtttaatttgtttagaacacatggcatttcttcacaaggtaacctgctgtatttatttattttcttttggttaaatataatttccaaactttgtggtcaggcagcgtctaaggttacgttaccacagactgacagttggtatatgtaccagccaatcccttcattaaatgtatacagatttagttaagtagcattaaataggattcttagaagtatgtcctcatagaacttttaatacttaaggctttgtaaaaactatccatgaagggaaagctcctcagcataactgctcagggaaatagggctaaataactgaacattaaataattggttaaaggtgctgttagtcgagcctcaatgcttgctacaaggatgtatgtacaaggactgactttaataatttgcattatattgtcccaaccagtagtttattttttgccacggagatgtagaagatattacaagctactggatgcactgtcagattaacttatttcattaaagaagttgggagaacaaataggaaaaaaaaaacttatttttctagtaaatattaatgtattacatttcaaataatggtgcctgacatattgaataattattttctacagtgtacgtatgcaacaaagatattccatcatgcattagagtcagttctggctctgcctagctgtttacatttgcaaatgtagcaaacaaggtaatgaagcaactatttctattgcagtagatatccttttgtgtgtgtgtgtgtgcattaaagttgtaaacggtaacatgaaacaaatgaaagttcttgctataatggtatggaaaacaagaaggaaatgaaaatatttttatgcctacttaggaaaaaaagggtagcacttattcattccaagtacttttttttttttaatttttaagctcttaactcacattgttatgcttaagatgataaacatatatcctctttttattgctttgtctatgtttcatatgaaacatttcagaaattattttgataagtgttgctggaatctgcaacgctgatttttttttgcattctgtagtcgcatttgcactccatttttacattaattcgcagttgctttgtatcattgttttgtttgggttttgtttctttttcacagtgccgggtcttcgtttcttaaagttggatggcaggtagagttcaaccagttcgtgactgttgtagcgaatgaagttaaaaaaatgtctttctgatgttgtgttgtcattttcatttttgcatttttttgtttgcatattaaaaaaagagaaaagagaaagcaagagacagaaatcaggactaagtcctctgcttcagtttcattgttaacgggccttattctgatctcacctgtcgcgtagctctaatattcacataaactgaaataaagaagtggaatgaggagctttgacattcaaattatgtgatgtaatttatcttccttaggaattttgatggatgcatctcaaaatgtatagccagacttgagaggtgacaattaaagatctaaaaaagagaggagattcccccaaacaacaatatttaattttcttagtaaaaagaataacagaatgcatcgtggcaatccttaagcaacattatctatgtggactgcttaaatcagcaaaacaccagaagtttggttaacttgggcaatatgacaagtattactttttgggcaaaactactcattaagcaatttctctagtgtgtcggacacaaataggttctttatttttggcatgtatgcctttttattttcattcaattttttttttttctcagacagacatagtagtatcaactagcattggaaaatacatatcactattcttggaatatttatggtcagtctactttttagtaaaatatttttggatagcgttgacacgatagatcttattccatacttctttattattgataattttattttcattttttgctttcattattatacatattttggtggagaagaggttgggcttttttgaaagagacaaaaatttattataacactaaacactccttttttgacatattaaagcctttattccatctctcaagatatattataaaatttatttttttaatttaagatttctgaattattttatcttaaattgtgattttaaacgagctattatggtacggaactttttttaatgaggaatttcatgatgatttaggaattttctctcttggaaaaggcttcccctgtgatgaaaatgatgtgccagctaaaattgtgtgccatttaaaaactgaaaatattttaaaattatttgtctatattctaaattgagctttggatcaaactttaggccaggaccagctcatgcgttctcattcttccttttctcactctttctctcatcactcacctctgtattcattctgttgtttgggatagaaaaatcataaagagccaacccatctcagaacgttgtggattgagagagacactacatgactccaagtatatgagaaaaggacagagctctaattgataactctgtagttcaaaaggaaaagagtatgcccaattctctctacatgacatattgagattttttttaatcaacttttaagatagtgatgttctgttctaaactgttctgttttagtgaaggtagatttttataaaacaagcatggggattcttttctaaggtaatattaatgagaagggaaaaaagtatctttaacagctctttgttgaagcctgtggtagcacattatgtttataattgcacatgtgcacataatctattatgatccaatgcaaatacagctccaaaaatattaaatgtatatatattttaaaatgcctgaggaaatacatttttcttaataaactgaagagtctcagtatggctattaaaataattattagcctcctgttgtgtggctgcaaaacatcacaaagtgaccggtcttgagacctgtgaactgctgccctgtttagtaaataaaattaatgcatttctagagggggaatatctgccatccagtggtggaaatgtggagtaaagaagctggtggtctgcttctgtgctgtatgccagccttttgccttaagttgagaggaggtcaactttagctactgtctttggtttgagagccatggcaaaaaaaaaaaaagaaaaaaagatcaagtcgtctttggtgagccagtaaggtgaaagcttgctgactgtccaaggcacaagagaaaattgaggaattgaaatgcaacctgagtatcaaactaaatattctaatcaaaggtaggtactgttaggtggaattctatcagcaggcaactgcaaatgagaagaagatagaaggacgcccgtcgggactttggagggcattgttattttcccaaagaaagacggccaagggcagaggcatggattctttgcagagcacttccttttggtttttcagtactgtttcatagacagtgggctcacatgttcctgatagtgctgcagttgcttagaaagcatcccagttaattgcagtaattagaacttctggaatatgctagggcagaagtatgtcaagtatgtcacatgaagaaaatgtgaaattcaagagtaatccacacgtgagaaactagacaatgtacattcatgtgttctcttgaaaggaaagggagagctgtaagcttcactctgtcctacaccggagaaaagcaggaataactttaccgtggaaataatgtttagcttttatcagagaaaattgtccttctagagcatagagtcccaaaactcaattctggttttcccctgttttttttttttttttttttcccaacatatgaactgcagcatatcactttttctttttgtgcctcaggttcctcacctgtaaaattgaaaaatatatgtattaataatattattaataataataatggtaatgtagtacttgtttgtaaagcactttgagatccttggttgaaaggcaccataggagtgccaagtattattatgtggccaagggggttatttaaactgtcagttcccaaaggccaggaaaggttggggtcatttttcttaaagacgagctgtaaatatcaactaggcagccaatagtgttgactatgaagatgcaaaactattactaggctgataaaatcatagtttcttaatggctaccaataaggcaaatatcacaataataaacgccaaattccttagggcggactatttgacaaccacatggaaaactttgggggaggcatgaggggggaacatctcaaaatgccaatgtaaaatttaacttacagcaatattcaccagcagaaaatgtctttcatatggaatgatttcatgttgctaagaaaaagaattcaatttgtagtcctgatttgaatactagaatgttggctataatagttctgttcttacaacacatgaaattttttcgttttattttattttgttttcatagtgcatgttcatttctactcacaaacatgttcttggtgtatttcttatgcaaacaatcttcaggcagcaaagatgtctgttacatctaaacttgaataataaagttttaccaccagttacaca

SEQ ID NO: 4371 - protein, 1281 aa, Homo sapien
MVRKKNPPLRNVASEGEGQILEPIGTESKVSGKNKEFSADQMSENTDQSDAAELNHKEEHSLHVQDPSSSSKKDLKSAVLSEKAGFNYESPSKGGNFPSFPHDEVTDRNMLAFSFPAAGGVCEPLKSPQRAEADDPQDMACTPSGDSLETKEDQKMSPKATEETGQAQSGQANCQGLSPVSVASKNPQVPSDGGVRLNKSKTDLLVNDNPDPAPLSPELQDFKCNICGYGYYGNDPTDLIKHFRKYHLGLHNRTRQDAELDSKILALHNMVQFSHSKDFQKVNRSVFSGVLQDINSSRPVLLNGTYDVQVTSGGTFIGIGRKTPDCQGNTKYFRCKFCNFTYMGNSSTELEQHFLQTHPNKIKASLPSSEVAKPSEKNSNKSIPALQSSDSGDLGKWQDKITVKAGDDTPVGYSVPIKPLDSSRQNGTEATSYYWCKFCSFSCESSSSLKLLEHYGKQHGAVQSGGLNPELNDKLSRGSVINQNDLAKSSEGETMTKTDKSSSGAKKKDFSSKGAEDNMVTSYNCQFCDFRYSKSHGPDVIVVGPLLRHYQQLHNIHKCTIKHCPFCPRGLCSPEKHLGEITYPFACRKSNCSHCALLLLHLSPGAAGSSRVKHQCHQCSFTTPDVDVLLFHYESVHESQASDVKQEANHLQGSDGQQSVKESKEHSCTKCDFITQVEEEISRHYRRAHSCYKCRQCSFTAADTQSLLEHFNTVHCQEQDITTANGEEDGHAISTIKEEPKIDFRVYNLLTPDSKMGEPVSESVVKREKLEEKDGLKEKVWTESSSDDLRNVTWRGADILRGSPSYTQASLGLLTPVSGTQEQTKTLRDSPNVEAAHLARPIYGLAVETKGFLQGAPAGGEKSGALPQQYPASGENKSKDESQSLLRRRRGSGVFCANCLTTKTSLWRKNANGGYVCNACGLYQKLHSTPRPLNIIKQNNGEQIIRRRTRKRLNPEALQAEQLNKQQRGSNEEQVNGSPLERRSEDHLTESHQREIPLPSLSKYEAQGSLTKSHSAQQPVLVSQTLDIHKRMQPLHIQIKSPQESTGDPGNSSSVSEGKGSSERGSPIEKYMRPAKHPNYSPPGSPIEKYQYPLFGLPFVHNDFQSEADWLRFWSKYKLSVPGNPHYLSHVPGLPNPCQNYVPYPTFNLPPHFSAVGSDNDIPLDLAIKHSRPGPTANGASKEKTKAPPNVKNEGPLNVVKTEKVDRSTQDELSTKCVHCGIVFLDEVMYALHMSCHGDSGPFQCSICQHLCTDKYDFTTHIQRGLHRNNAQVEKNGKPKE

SEQ ID NO: 4372 - DNA, 1217 bp, Homo sapien
caactcatggcggcggcggcggcggcggcagctgcttgggcgcggtgcggtggtgactgagctacgagcctggcggcgggtgtgcgccgagccccggcccggcccggccctcgcgtgcctcccaggctccgcacccctgatgctgcgcgggtgctgagcccgcttcggccgggacgatggtgaagtatttcctgggccagagcgtgctccggagttcctgggaccaagtgttcgccgccttctggcagcggtacccgaatccctatagcaaacatgtcttgacggaagacatagtacaccgggaggtgacccctgaccagaaactgctgtcccggcgactcctgaccaagaccaacaggatgccacgctgggccgagcgactatttcctgccaatgttgctcactcggtgtacgtcctggaggactctattgtggacccacagaatcagaccatgactaccttcacctggaacatcaaccacgcccggctgatggtggtggaggaacgatgtgtttactgtgtgaactctgacaacagtggctggactgaaatccgccgggaagcctgggtctcctctagcttatttggtgtctccagagctgtccaggaatttggtcttgcccggttcaaaagcaacgtgaccaagactatgaagggttttgaatatatcttggctaagctgcaaggcgaggccccttccaaaacacttgttgagacagccaaggaagccaaggagaaggcaaaggagacggcactggcagctacagagaaggccaaggacctcgccagcaaggcggccaccaagaagcagcagcagcagcaacagtttgtgtagccagtctaccaccaccacagcaccccagacagctaggcttagcccctctgccctcccttcattgtactttatcattaaaaatcaacttccagccctgtctgctgtctacgtggtgggttgtggggatgcagtttggcatctgcagtacaccaagcacatgattcatgtctgagccaggtctgcttattctcccattgggcagctgaggaccgaggcacagaggtgcggtgacttgcccggggctccaggtagcctgcaggttaactggcggtaagtgctagactgtaagcccgacaagggcagggcttttggttttgttctctgatgtgtctcagtatctagcacataatagacactcaataaatacttgttgaattcaaa

SEQ ID NO: 4373 - protein, 219 aa, Homo sapien
MVKYFLGQSVLRSSWDQVFAAFWQRYPNPYSKHVLTEDIVHREVTPDQKLLSRRLLTKTNRMPRWAERLFPANVAHSVYVLEDSIVDPQNQTMTTFTWNINHARLMVVEERCVYCVNSDNSGWTEIRREAWVSSSLFGVSRAVQEFGLARFKSNVTKTMKGFEYILAKLQGEAPSKTLVETAKEAKEKAKETALAATEKAKDLASKAATKKQQQQQQFV

SEQ ID NO: 4374 - DNA, 1898 bp, Homo sapien
agcgcagtatggcgggcggggcccgggaggtgctcacactgcagttgggacattttgccggtttcgtgggcgcgcactggtggaaccagcaggatgctgcgctgggccgagcgaccgattccaaggagcccccgggagagctgtgccccgacgtcctgtatcgtacgggccggacgctgcacggccaggagacctacacgccgcgactcatcctcatggatctgaagggtagtttgagctccctaaaagaggaaggtggactctacagggacaaacagttggatgctgcaatagcatggcaggggaagctcaccacacacaaagaggaactctatcccaagaacccttatctccaagactttctgagtgcagagggagtgctgagtagtgatggtgtctggagggtcaaatccattcccaatggcaaaggttcctcaccactccccaccgctacaactccaaaaccacttatccctacagaggccagcatcagggtctggtcagacttcctcagagtccatctccatccccggagcatctgtatgattcagaagtacaaccacgatggggaagcaggtcggctggaggcttttggccaaggggaaagtgtcctaaaggaacccaagtaccaggaagagctggaggacaggctgcatttctacgtggaggaatgtgactacttgcagggcttccagatcctgtgtgacctgcacgatggcttctctggggtaggcgcgaaggcggcagagctgctacaagatgaatattcagggcggggaataataacctggggcctgctacctggtccctaccatcgtggggaggcccagagaaacatctatcgtctattaaacacagcttttggtctcgtgcacctgactgctcacagctctcttgtctgccccttgtccttgggtgggagcctgggcctgcgacccgagccacctgtcagcttcccttacctgcattatgatgccactctgcccttccactgcagtgccatcctggctacagccctggacacagtcactgttccttatcgcctgtgttcctctccagtttccatggttcatctggctgacatgctgagcttctgtgggaaaaaggtggtgacagcaggagcaatcatccctttccccttggctccaggccagtcccttcctgattccctggtgcagtttggaggagccaccccatggaccccactgtctgcatgtggggagccttctggaacacgttgctttgcccagtcagtggtgctgaggggtatagacagagcatgccacacaagccagctcaccccagggacacctccaccctctgcccttcatgcatgtaccactggggaagaaatcttggctcagtatttacaacagcagcagcctggagtcatgagttcttcccatctgctgctgactccctgcagggtggctcctccttacccccacctcttctcaagctgcagtccaccgggtatggttctggatggttcccccaagggagcagcagtggagagcatcccagtgtttggggcactgtgttcctcttcgtccctgcaccagaccctggaagccttggccagagacctcaccaaactcgacttgcggcgctgggccagcttcatggatgctggagtggagcacgatgacgtagcagagctgctgcaggagctacaaagcctggcccagtgctaccagggtggtgacagcctcgtggactaaagttcccagtgtgggagaaaggagctagtttgcaataaaaacagctggatgcaggagcccagtgtcttcatgcagaggagctcaatgtcgcgggactagctacaccaacatatgcactttttacatttagaaacactgtgattagaccacagaacaataaatatgtgccatcagacc

SEQ ID NO: 4375 - protein, 570 aa, Homo sapien
MAGGAREVLTLQLGHFAGFVGAHWWNQQDAALGRATDSKEPPGELCPDVLYRTGRTLHGQETYTPRLILMDLKGSLSSLKEEGGLYRDKQLDAAIAWQGKLTTHKEELYPKNPYLQDFLSAEGVLSSDGVWRVKSIPNGKGSSPLPTATTPKPLIPTEASIRVWSDFLRVHLHPRSICMIQKYNHDGEAGRLEAFGQGESVLKEPKYQEELEDRLHFYVEECDYLQGFQILCDLHDGFSGVGAKAAELLQDEYSGRGIITWGLLPGPYHRGEAQRNIYRLLNTAFGLVHLTAHSSLVCPLSLGGSLGLRPEPPVSFPYLHYDATLPFHCSAILATALDTVTVPYRLCSSPVSMVHLADMLSFCGKKVVTAGAIIPFPLAPGQSLPDSLVQFGGATPWTPLSACGEPSGTRCFAQSVVLRGIDRACHTSQLTPGTPPPSALHACTTGEEILAQYLQQQQPGVMSSSHLLLTPCRVAPPYPHLFSSCSPPGMVLDGSPKGAAVESIPVFGALCSSSSLHQTLEALARDLTKLDLRRWASFMDAGVEHDDVAELLQELQSLAQCYQGGDSLVD

SEQ ID NO: 4376 - DNA, 2112 bp, Homo sapien
ggtcgggaccggcaagatggcggcgcggacagcgttcggtgctgtgtgccggcgcctctggcagggattggggaatttttctgtaaacacttctaagggcaatacagccaaaaatggtggcttgcttctcagtaccaatatgaagtgggtacagttttcaaacctacacgttgatgttccaaaggatttgaccaaacctgtggtaacaatctctgatgaaccagacatattatataagcgcctctcggttttggtgaaaggtcacgataaggctgtattggacagttatgaatattttgctgtgcttgctgctaaagaacttggtatctctattaaagtacatgaacctccaaggaaaatagagcgatttactcttctccaatcagtgcatatttacaagaagcacagagttcagtatgaaatgagaacactttacagatgtttagagttagaacatctaactggaagcacagcagatgtctacttggaatatattcagcgaaacttacctgaaggggttgccatggaagtaacaaagacacaattagaacagttaccagaacacatcaaggagccaatctgggaaacactatcagaagaaaaagaagaaagcaagtcataaagcctcagggaggccatttttgcctaaatttgaaatgagggtgggccagatgagtatgtttaagtggagagtgcttccagctgagatgatttgagtctgtcctaactgctccattgagttctcgtgccctcatcagctgagggcagggaatggaactttaatggaagaaccacttttatctattctttttattcattgtttcagttctgatttcagcaaacatgagcaaaccactttgactgaaagcagaaagagtgaaaattctattttgttacgctactggtgttcaattattagtttgtaccatttttaatttatgtcagttgatgcatctgaaaataagtgcttggagtgttcgtacccttatttttttttaagattcctagaaggaatctttggttaattcagattgagcagttaaagtttttgctatttacctttgtgcaggctggcatatgctaatttgggggtggtaaccaaccgattttatctcatgtaagcattacattttgaagactgaatatacttcacagcagatcaaacacatttatggcatgcactgacctcttcttggagcccagaactttatagagttgcctaccagggttactgtaatggaatttatgatcttaagaaattactagttgtattatttatcctatgattcattcattcaataagcttttactgcataaactttacatccagcactgtagttaagtacccaaaattgaatagaaataatggcttttgaaaattgcacaaagcaggccaggcacggtggctcacgcctgtaatcccagcactttgggaggccgaggcaggcggatcacgaggtcaagagatccagaccatcctggctaacacggtgaaaccccgtctctaataaaaatacaaaaattagctggacatggtggcacgtgcctgtaatcccagctactcaggaggctgaggcaggagaatcgcgtgaacccgggcccggtggaggctgcagtgagacgagatcgcgccactgcactccagcctggcgacagagcgagacaccgtctcaaaaaaaaaaaaaaagaaaattgtgcaaagcataggtaaatatttttctttattaagcttctcactgagaagccctctttattttggtaaatgtcactctgtttgttaggagatgtctgcttttccatgaaatgaaatagtggctaaagccctgaaagaggcaagactacaatgggctgaaacagttggtatagcaaccccagagaagtgcttcattttctttttatagtagaagcaggtccatgtcttttgtggtttcctgcacatctttggagtagttatgacttctcagtttttccccccttaaactgcattgcctattcttttttcctgacatgctatcaggtatcagtgtgttgaatacataatgcttgtgtatcagacttacgttactgtcatcaccattaaaagaattgcagccttgtgccccatgaccttca

SEQ ID NO: 4377 - protein, 201 aa, Homo sapien
MAARTAFGAVCRRLWQGLGNFSVNTSKGNTAKNGGLLLSTNMKWVQFSNLHVDVPKDLTKPVVTISDEPDILYKRLSVLVKGHDKAVLDSYEYFAVLAAKELGISIKVHEPPRKIERFTLLQSVHIYKKHRVQYEMRTLYRCLELEHLTGSTADVYLEYIQRNLPEGVAMEVTKTQLEQLPEHIKEPIWETLSEEKEESKS

SEQ ID NO: 4378 - DNA, 5894 bp, Homo sapien
ctctgcctttcctctcgcagccacccttcctctcagaccagtacggtggccgacgggagtcagacgctggggatgaatgaaggatcaacaaacagtaataatgactgaatgtacaagtcttcagtttgtcagcccttttgcttttgaggcaatgcagaaggtggatgttgtttgcctggcatctttaagtgatccagaattaagacttcttctgccctgtttggtacggatggcactttgtgcacctgctgaccagagccaaagctgggctcaggataagaaactcatccttcgccttctttctggagtggaagctgtcaactccattgttgcattgttgtccgtggactttcatgctttagaacaagatgccagcaaagaacagcagcttaggcataaacttggaggaggcagtggagagagcatcctggtatcacagcttcagcatggactgacgttagagtttgaacacagtgattcacctcgtcgattgcgtcttgtgcttagtgaactgttggcaattatgaacaaggtgtctgagtccaacggagaattttttttcaagtcttctgaactttttgagagtccagtatatttggaggaagctgcagatgtactttgtattttacaagcagagctcccttccttgctccctatagttgatgtagctgaagctttgctacatgttagaaatggtgcctggttcttgtgtctcttggtggccaatgttcctgatagttttaatgaagtttgtaggggcctgataaaaaatggagaacgacaagatgaagaaagtcttggaggaaggcgcaggacagatgccttacgcttcttgtgtaaaatgaatccttctcaggccctcaaggtccgaggcatggtggtggaagaatgtcacttgccaggccttggtgtggctttgacattggatcatactaaaaatgaagcttgtgaggatggagtgagtgacttggtttgttttgtaagtggtttgcttcttggaacaaatgcgaaagtccggacttggtttggaacttttatccgaaatggacagcagagaaaaagagagaccagcagttctgtcctttggcagatgagaaggcagcttcttctggagttgatgggcattcttcccacagtaagaagcacccgaattgtggaagaagctgatgtggatatggagcccaatgtgtctgtgtattcggggctgaaagaagagcatgttgtgaaagccagtgcactcttacgtctgtactgtgctttgatggggatcgctggactcaaaccaactgaagaagaagctgagcaattactgcagttgatgacgagccgtcctcctgctacgccagctggggttcgctttgtttcactttccttttgtatgctactggccttttctacacttgtcagtacacctgaacaggagcagctgatggtggtgtggctaagttggatgataaaagaagaagcgtattttgagagtacttcaggcgtctctgcttcttttggggagatgttattattggtggctatgtactttcacagcaaccagcttagtgctatcattgacttggtctgttccactttggggatgaagattgtaattaagccaagctccttgagcaggatgaagacaatcttcacacaggaaatttttactgagcaggttgtcacagctcatgcagttcgggtccctgtcaccagcaacctgagtgccaacattactggatttttgcctattcattgtatttaccagcttctcaggagccgttcctttaccaagcacaaagtgtcaataaaagattggatttatagacagctgtgtgaaacctctactccacttcatcctcaattacttcctttgattgatgtgtacataaattctatacttactcctgcgtcgaaatctaatccagaagccacaaatcagccagtcacagaacaggagatactcaatattttccaaggagtcattgggggtgacaacatccgccttaatcagcgtttcagtatcacagcacagcttttggtgctctactatatactgtcttatgaagaggctcttctagcaaacacgaagactttagctgccatgcaaagaaagcccaaatcatattcttcttctttaatggatcagattcctatcaaattccttattcgacaggctcaagggctgcagcaggagttgggagggttgcattcagctttactacgtctccttgctactaactacccacatttatgtattgtggatgactggatttgtgaagaagaaatcacagggactgatgccctgctacggcgaatgctcctgactaataatgctaaaaatcattctcccaaacaactccaagaagcattttcagctgtcccagtaaatcacacacaagtgatgcagattatagaacacttgactctactctctgccagtgaacttataccatatgcggaagtgttaacatccaatatgagccagctattgaattcaggggttccacggagaattctgcaaacagtcaataaactatggatggttcttaatactgtgatgcctagaaggctatgggtaatgacggttaatgcacttcagccttcaataaagtttgtacgacaacaaaagtatactcagaatgacctgatgatagatcctctcattgtcctaaggtgtgatcagagggttcacagatgccccccactgatggatattaccctacacatgttgaatggatatcttcttgcatctaaagcctaccttagtgctcatctgaaggaaacagagcaagataggccttcccagaataatacaattggtttagttggacaaactgatgctccggaagttaccagggaagaattgaaaaatgcattactggccgctcaggatagtgcagctgtccagattctcttagagatttgcctacctactgaagaggagaaagcaaatggtgtcaatccagatagcttgttaagaaatgttcaaagtgttattaccaccagcgctccaaataagggaatggaggaaggagaagacaatttgctctgtaaccttcgagaagttcagtgccttatctgttgtctcttgcaccaaatgtacattgcagatcccaacattgctaagcttgttcactttcagggttatccatgtgaacttttgcctctgacggtcgcaggtattccatctatgcacatctgtctagatttcatacctgagcttattgcacagccagaacttgagaaacagatatttgctatccagttgctttctcacttgtgtatacaatatgcattaccaaagtcacttagtgtggctcgtttagctgtcaatgtcatgggaactttgttaacagttttaacacaggctaagcggtatgctttttttatgccaactctgccaagtttggtctctttttgtcgagcatttcctccattgtatgaggatattatgtctttgctgatccaaatagggcaagtttgtgcctctgatgttgccactcagacaagagacattgatccaattattacacgtcttcaacaaataaaggagaaaccaagtggatggtctcaaatctgtaaagattcatcttataaaaatggatccagggacactggaagcatggatcctgatgtacagctctgtcactgtattgaaagaacagtaattgaaataataaatatgagtgttagtggaatttaaaacaaaatttaaaacaacaaaaagttgtttgctgcatatacccaacatgaatctgcatattagtaacaactctaaactgaatgggaacagtaaagtattgtcttggaatcactaaaacaattcaattcaacatgagtatagtttagaactttatgagaattatgcttgcttgtttctgattggcacatctttggatctactttgctgatatgtttctattgtagcagctgagctttttttttttccactgggaacacatgtaagaaactcattattggaaagggaatttggccttgtatttagcttttgaagtgaagactgccatgcctttaatttcttataaaaatgagtctgtgggtagccctagtgtttattttaactgtgagcttgtaacagaatgtgacaaagatgcaaagatgggagaggaaaaaagggtaaagggaaaggagaattaaggaaataataggagttaaaaacacaagtagaaatctcaaagatttgcagtgcaagtaatagtaatgcaagttggaattctagttctcaagaaagagtattgagaagacttttaaaaaggcaagtagcttttgtaaatgatttctgtggaaatacagatgaggatttaaagatttcacatatttgcttcaatttttattaatatatgaagccatatgtttaaagagatacttgaataatttggaattttaagatactggtgtaaaagtgtttacagaaacatctttgttcaaagaagaacctgagagatctcatttagttttatgttttaaatttatttttataatgctttattaacttacctaatgctcagaggggggaaatatgtatcaaattaaatgaaggtagagcaataaaacccactggattaaagagctcttggtttgtcatcaggattataattcatatcttactttgagaagatctttgagtaagaaaatgcagtgtttgaacctgaggaaaagttaaagtgtagaaaatattgtcttgccgaaggattttgcagtcctctgtcagtaacttccattgattaggcagacatattcaggtaaaccctaatcattaaaaaaaaattatcaatgtagaaagtaattcccttttttctctctgagatatacctcaatcacacacttccccacccccacttgaaacagacctcttcacttgtgttttttttttttttttcctgaggtggagtcttcccctgttgcccaggctggagtgcagtgggatgatcttggctcactgcaacttctgccacctgggttcaagggattctcgtgcctcaacctcctgagtagctgggactgcaggcacgcgccacctgtatttttgtatttttagtagagacgggggtttgccatgttgcccagactggttttgaactcctggcctcaggtgatctgcccaccttggcctcccaaagtgctgggattacaggtgtgagccaccgcacctggccagaccgcttcacttgtaaaagaaattaggctaataagaaggtgtagtttttgagaaatgaaatttaactttagccttttcactagtaaatagtcacatctcattttcttcctttgtaaaatggggttactactggccctacctcatattctatgagaatgagtttgtagctgtttcaaatcatgaagtgcatagtatcacatgtgatagaatatttataactttttattagatgcttaatgttcaattaagtaattttgatgtgaaaaataaaagtaataaaagtatcttaaaaatagcataagaattttcatatttttaaacaaggcagttttgtagtcccttaagattaaatacaactgctccttttttttttaaactgaggccttgcgatattttgtgtgaatagatatgccctaggagttcagaaaaagttaaaagtatgttttctaattaaatgcagtgcacattcctggatcaatattcaaagactggtcataacctgctgtgttaaaataatcacatatgctctttttcatcagatttgttgatgatgtaaataaaatgtgtaaatatattagtaaatgttaatattcatgtattttaagttaaggttataaaatttgtcacaatgtgtttttttattcaagtgaaaacagatgtgtgcagctattttgaatattggtttataaacattcatattctttatcaaacaaaaaaaaaaaaaaaa

SEQ ID NO: 4379 - protein, 1204 aa, Homo sapien
MKDQQTVIMTECTSLQFVSPFAFEAMQKVDVVCLASLSDPELRLLLPCLVRMALCAPADQSQSWAQDKKLILRLLSGVEAVNSIVALLSVDFHALEQDASKEQQLRHKLGGGSGESILVSQLQHGLTLEFEHSDSPRRLRLVLSELLAIMNKVSESNGEFFFKSSELFESPVYLEEAADVLCILQAELPSLLPIVDVAEALLHVRNGAWFLCLLVANVPDSFNEVCRGLIKNGERQDEESLGGRRRTDALRFLCKMNPSQALKVRGMVVEECHLPGLGVALTLDHTKNEACEDGVSDLVCFVSGLLLGTNAKVRTWFGTFIRNGQQRKRETSSSVLWQMRRQLLLELMGILPTVRSTRIVEEADVDMEPNVSVYSGLKEEHVVKASALLRLYCALMGIAGLKPTEEEAEQLLQLMTSRPPATPAGVRFVSLSFCMLLAFSTLVSTPEQEQLMVVWLSWMIKEEAYFESTSGVSASFGEMLLLVAMYFHSNQLSAIIDLVCSTLGMKIVIKPSSLSRMKTIFTQEIFTEQVVTAHAVRVPVTSNLSANITGFLPIHCIYQLLRSRSFTKHKVSIKDWIYRQLCETSTPLHPQLLPLIDVYINSILTPASKSNPEATNQPVTEQEILNIFQGVIGGDNIRLNQRFSITAQLLVLYYILSYEEALLANTKTLAAMQRKPKSYSSSLMDQIPIKFLIRQAQGLQQELGGLHSALLRLLATNYPHLCIVDDWICEEEITGTDALLRRMLLTNNAKNHSPKQLQEAFSAVPVNHTQVMQIIEHLTLLSASELIPYAEVLTSNMSQLLNSGVPRRILQTVNKLWMVLNTVMPRRLWVMTVNALQPSIKFVRQQKYTQNDLMIDPLIVLRCDQRVHRCPPLMDITLHMLNGYLLASKAYLSAHLKETEQDRPSQNNTIGLVGQTDAPEVTREELKNALLAAQDSAAVQILLEICLPTEEEKANGVNPDSLLRNVQSVITTSAPNKGMEEGEDNLLCNLREVQCLICCLLHQMYIADPNIAKLVHFQGYPCELLPLTVAGIPSMHICLDFIPELIAQPELEKQIFAIQLLSHLCIQYALPKSLSVARLAVNVMGTLLTVLTQAKRYAFFMPTLPSLVSFCRAFPPLYEDIMSLLIQIGQVCASDVATQTRDIDPIITRLQQIKEKPSGWSQICKDSSYKNGSRDTGSMDPDVQLCHCIERTVIEIINMSVSGI

SEQ ID NO: 4380 - DNA, 1392 bp, Homo sapien
atggcaggcgctggtgagcgcaaaggcaagaaggatgacaatggcattggcacggccattgactttgtgctctccaatgcccggctggtgctgggggtgggtggagcggccatgctgggcatcgccacgctggcagttaagcggatgtacgatcgggcgatcagtgcccctaccagccccacccgcctgagccattcggggaaaaggagctgggaagaacccaactggatgggctccccacgactgctgaacagggacatgaagacgggcctgagccggtccttgcagacccttcccacagactcctccaccttcgacacagatacattctgcccgccccggcccaagccagtggccaggaagggccaggtagacttgaagaagtcacgactccgcatgtccctgcaggagaaacttcttacttactaccggaaccgggcagccatccctgctggagagcaggctcgggccaagcaagctgctgtggacatatgtgccgagctccggagcttcctgcgggccaagttgcctgacatgccgcttcgggacatgtacttgagtggcagcctctacgatgacctgcaggtggtgacagctgaccacatccaactcattgtgccccttgtgctggagcagaacctgtggtcatgtattcctggtgaagacaccatcatgaatgtccctggcttcttcctggtgcgtcgtgagaatccagagtactttcctcgtgggagcagttactgggaccgctgtgtagtagggggctacctctctccaaagacagtcgcagatacatttgagaaggtagtggctggctccatcaattggccagccatagggtccctcttggactatgtgatccgcccggccccacccccagaagccctcacactggaggtgcagtatgagcgtgacaaacatctcttcattgacttcctgccatcagtgaccctcggtgacacagtcttggtggccaaaccacaccggctagcccagtatgacaacctgtggcggctgagcctgcgtcccgcggagacggcacgcctgcgggctctggaccaggctgactcgggctgccgatctctgtgcctcaagatcctcaaggccatatgcaagtccaccccggctctgggccacctcactgccagccagctaaccaatgtcatcctccacttggcccaggaggaggctgactggtctccggatatgctggccgaccgtttcctgcaggccttgaggggacttatcagctacttagaggctggagtcctgcccagtgccctaaaccccaaggtgaacttatttgcagagctcacccctgaagaaatagacgaattaggatacactctgtattgctcattgtctgagccagaggtgctgctgcagacgtag

SEQ ID NO: 4381 - protein, 463 aa, Homo sapien
MAGAGERKGKKDDNGIGTAIDFVLSNARLVLGVGGAAMLGIATLAVKRMYDRAISAPTSPTRLSHSGKRSWEEPNWMGSPRLLNRDMKTGLSRSLQTLPTDSSTFDTDTFCPPRPKPVARKGQVDLKKSRLRMSLQEKLLTYYRNRAAIPAGEQARAKQAAVDICAELRSFLRAKLPDMPLRDMYLSGSLYDDLQVVTADHIQLIVPLVLEQNLWSCIPGEDTIMNVPGFFLVRRENPEYFPRGSSYWDRCVVGGYLSPKTVADTFEKVVAGSINWPAIGSLLDYVIRPAPPPEALTLEVQYERDKHLFIDFLPSVTLGDTVLVAKPHRLAQYDNLWRLSLRPAETARLRALDQADSGCRSLCLKILKAICKSTPALGHLTASQLTNVILHLAQEEADWSPDMLADRFLQALRGLISYLEAGVLPSALNPKVNLFAELTPEEIDELGYTLYCSLSEPEVLLQT

SEQ ID NO: 4382 - DNA, 3254 bp, Homo sapien
  Unsure 2907: Unknown base
ctttgagcggaagttggatcactgaagcgccaaaaaagaatttaggggaagacctgattttcgcttgaggcatttttgcggcgctgtgcgctacagacaccttctggaagctgcggtggggaaactgagtttcccgagccgttgagacagatggggttcagcaccgcgcggggacgacaggaaagctgcggctgaagagaactgcggacttggcaggagtcgcctgaggagctaagatcccggagactcttagccccgtggtgcttctctacgggagcgggggagggagaatccggccggacagatctgcgcgtatcctggagccggcccagttgtgaactaggagagctttgggacctctgtcccaagcaagagagatgaatggagagtatagaggcagaggatttggacgaggaagatttcaaagctggaaaaggggaagaggtggtgggaacttctcaggaaaatggagagaaagagaacacagacctgatctgagtaaaaccacaggaaaacgtacttctgaacaaaccccacagtttttgctttcaacaaagaccccacagtcaatgcagtcaacattggatcgattcataccatataaaggctggaagctttatttctctgaagtttacagcgatagctctcctttgattgagaagattcaagcatttgaaaaatttttcacaaggcatattgatttgtatgacaaggatgaaatagaaagaaagggaagtattttggtagattttaaagaactgacagaaggtggtgaagtaactaacttgataccagatatagcaactgaactaagagatgcacctgagaaaaccttggcttgcatgggtttggcaatacatcaggtgttaactaaggaccttgaaaggcatgcagctgagttacaagcccaggaaggattgtctaatgatggagaaacaatggtaaatgtgccacatattcatgcaagggtgtacaactatgagcctttgacacagctcaagaatgtccgagcaaattactatggaaaatacattgctctaagagggacagtggttcgtgtcagtaatataaagcctctttgcaccaagatggcttttctttgtgctgcatgtggagaaattcagagctttcctcttccagatggaaaatacagtcttcccacaaagtgtcctgtgcctgtgtgtcgaggcaggtcatttactgctctccgcagctctcctctcacagttacgatggactggcagtcaatcaaaatccaggaattgatgtctgatgatcagagagaagcaggtcggattccacgaacaatagaatgtgagcttgttcatgatcttgtggatagctgtgtcccgggagacacagtgactattactggaattgtcaaagtctcaaatgcggaagaaggttctcgaaataagaatgacaagtgtatgttccttttgtatattgaagcaaattctattagtaatagcaaaggacagaaaacaaagagttctgaggatgggtgtaagcatggaatgttgatggagttctcacttaaagacctttatgccatccaagagattcaagctgaagaaaacctgtttaaactcattgtcaactcgctttgccctgtcatttttggtcatgaacttgttaaagcaggtttggcattagcactctttggaggaagccagaaatacgcagatgacaaaaacagaattccaattcggggagacccccacatccttgttgttggagatccaggcctaggaaaaagtcagatgctacaggcagcgtgcaatgttgccccacgtggcgtgtatgtttgtggtaacaccacgaccacctctggtctgacggtaactctttcaaaagatagttcctctggagattttgctttggaagctggtgccctggtacttggtgatcaaggtatttgtggaatcgatgaatttgataagatggggaatcaacatcaagccttgttggaagccatggagcagcaaagtattagtcttgctaaggctggtgtggtttgtagccttcctgcaagaacttccattattgctgctgcaaatccagttggaggacattacaataaagccaaaacagtttctgagaatttaaaaatggggagtgcactactatccagatttgatttggtctttatcctgttagatactccaaatgagcatcatgatcacttactctctgaacatgtgattgcaataagagctggaaagcagagaaccattagcagtgccacagtagctcgtatgaatagtcaagattcaaatacttccgtacttgaagtagtttctgagaagccattatcagaaagactaaaggtggttcctggagaaacaatagatcccattccccaccagctattgagaaagtacattggctatgctcggcagtatgtgtacccaaggctatccacagaagctgctcgagttcttcaagatttttaccttgagctccggaaacagagccagaggttaaatagctcaccaatcactaccaggcagctggaatctttgattcgtctgacagaggcacgagcaaggttggaattgagagaggaagcaaccaaagaagacgctgaggatatagtggaaattatgaaatatagcatgctaggaacttactctgatgaatttgggaacctagattttgagcgatcccagcatggttctggaatgagcaacaggtcaacagcgaaaagatttatttctgctctcaacaacgttgctgaaagaacttataataatatatttcaatttcatcaacttcggcagattgccaaagaactaaacattcaggttgctgattttgaaaattttattggatcactaaatgaccagggttacctcttgaaaaaaggcccaaaagtttaccagcttcaaactatgtaaaaggacnttcaccaagttagggcctcctgggtttattgcagattaaagccatctcagtgaagatatgcgtgcacgcacagacagacagacacacacacacacacacacacacacacacacacacacacacagtcaaatactgttctctgaaaaatgatgtcccaaaagtattataataggaaaaaagcattaaatataataaactaatttaagaagtgataaagtctccagatgcagtagctcacactgtaatcacagtgactcaggaggctgaggtgagaggattccttgaggccagggttcgagaccaaccttgggcaacatagcaagaccccatttcttaaaaaaaaaaaa

SEQ ID NO: 4383 - protein, 840 aa, Homo sapien
MNGEYRGRGFGRGRFQSWKRGRGGGNFSGKWREREHRPDLSKTTGKRTSEQTPQFLLSTKTPQSMQSTLDRFIPYKGWKLYFSEVYSDSSPLIEKIQAFEKFFTRHIDLYDKDEIERKGSILVDFKELTEGGEVTNLIPDIATELRDAPEKTLACMGLAIHQVLTKDLERHAAELQAQEGLSNDGETMVNVPHIHARVYNYEPLTQLKNVRANYYGKYIALRGTVVRVSNIKPLCTKMAFLCAACGEIQSFPLPDGKYSLPTKCPVPVCRGRSFTALRSSPLTVTMDWQSIKIQELMSDDQREAGRIPRTIECELVHDLVDSCVPGDTVTITGIVKVSNAEEGSRNKNDKCMFLLYIEANSISNSKGQKTKSSEDGCKHGMLMEFSLKDLYAIQEIQAEENLFKLIVNSLCPVIFGHELVKAGLALALFGGSQKYADDKNRIPIRGDPHILVVGDPGLGKSQMLQAACNVAPRGVYVCGNTTTTSGLTVTLSKDSSSGDFALEAGALVLGDQGICGIDEFDKMGNQHQALLEAMEQQSISLAKAGVVCSLPARTSIIAAANPVGGHYNKAKTVSENLKMGSALLSRFDLVFILLDTPNEHHDHLLSEHVIAIRAGKQRTISSATVARMNSQDSNTSVLEVVSEKPLSERLKVVPGETIDPIPHQLLRKYIGYARQYVYPRLSTEAARVLQDFYLELRKQSQRLNSSPITTRQLESLIRLTEARARLELREEATKEDAEDIVEIMKYSMLGTYSDEFGNLDFERSQHGSGMSNRSTAKRFISALNNVAERTYNNIFQFHQLRQIAKELNIQVADFENFIGSLNDQGYLLKKGPKVYQLQTM

SEQ ID NO: 4384 - DNA, 728 bp, Homo sapien
ttttcgagaccggaagtgagtgatcgaaagcatggcgtcggtggtgttggcgctgaggacccggacagccgttacatccttgctaagccccactccggctacagctcttgctgtcagatacgcatccaagaagtcgggtggtagctccaaaaacctcggtggaaagtcatcaggcagacgccaaggcattaagaaaatggaaggtcactatgttcatgctgggaacatcattgcaacacagcgccatttccgctggcacccaggtgcccatgtgggtgttgggaagaataaatgtctgtatgccctggaagaggggatagtccgctacactaaggaggtctacgtgcctcatcccagaaacacggaggctgtggatctgatcaccaggctgcccaagggtgctgtgctctacaagacttttgtccacgtggttcctgccaagcctgagggcaccttcaaactggtagctatgctttgatgtcctgttgaggccatcggacagagactggagcccaggtgacaggagatggtgataccagaagtcaagggttggggtggcgacacggcctcccgaggaagaggtctgcttgatggtgactctgcaggagactctgaagtgactgctgggaaaccctttgggagacctgacctggggccaaaaataaagtgagccagcgtcatgaacgcatgctatttagggacaaaaaaaaaaaaaaaaaaaaaaaaaa

SEQ ID NO: 4385 - protein, 148 aa, Homo sapien
MASVVLALRTRTAVTSLLSPTPATALAVRYASKKSGGSSKNLGGKSSGRRQGIKKMEGHYVHAGNIIATQRHFRWHPGAHVGVGKNKCLYALEEGIVRYTKEVYVPHPRNTEAVDLITRLPKGAVLYKTFVHVVPAKPEGTFKLVAML

SEQ ID NO: 4386 - DNA, 676 bp, Homo sapien; identical to SEQ ID NO: 4179

SEQ ID NO: 4387 - protein, 128 aa, Homo sapien; identical to SEQ ID NO: 4180

SEQ ID NO: 4388 - DNA, 4790 bp, Homo sapien
gaaagagacattcacttggagggctcttgctgaaaatgggtttaactctccttttgccagtcaccaccagcctgacctcatacacttttagtacaatggagtggctgagcctttgagcacaccaccattacatcatcgtggcaaattaaagaaggaggtgggaaaagaggacttattgttgtcatggcccatgagatgattggaactcaaattgttactgagaggttggtggctctgctggaaagtggaacggaaaaagtgctgctaattgatagccggccatttgtggaatacaatacatcccacattttggaagccattaatatcaactgctccaagcttatgaagcgaaggttgcaacaggacaaagtgttaattacagagctcatccagcattcagcgaaacataaggttgacattgattgcagtcagaaggttgtagtttacgatcaaagctcccaagatgttgcctctctctcttcagactgttttctcactgtacttctgggtaaactggagaagagcttcaactctgttcacctgcttgcaggtgggtttgctgagttctctcgttgtttccctggcctctgtgaaggaaaatccactctagtccctacctgcatttctcagccttgcttacctgttgccaacattgggccaacccgaattcttcccaatctttatcttggctgccagcgagatgtcctcaacaaggagctgatgcagcagaatgggattggttatgtgttaaatgccagcaatacctgtccaaagcctgactttatccccgagtctcatttcctgcgtgtgcctgtgaatgacagcttttgtgagaaaattttgccgtggttggacaaatcagtagatttcattgagaaagcaaaagcctccaatggatgtgttctagtgcactgtttagctgggatctcccgctccgccaccatcgctatcgcctacatcatgaagaggatggacatgtctttagatgaagcttacagatttgtgaaagaaaaaagacctactatatctccaaacttcaattttctgggccaactcctggactatgagaagaagattaagaaccagactggagcatcagggccaaagagcaaactcaagctgctgcacctggagaagccaaatgaacctgtccctgctgtctcagagggtggacagaaaagcgagacgcccctcagtccaccctgtgccgactctgctacctcagaggcagcaggacaaaggcccgtgcatcccgccagcgtgcccagcgtgcccagcgtgcagccgtcgctgttagaggacagcccgctggtacaggcgctcagtgggctgcacctgtccgcagacaggctggaagacagcaataagctcaagcgttccttctctctggatatcaaatcagtttcatattcagccagcatggcagcatccttacatggcttctcctcatcagaagatgctttggaatactacaaaccttccactactctggatgggaccaacaagctatgccagttctcccctgttcaggaactatcggagcagactcccgaaaccagtcctgataaggaggaagccagcatccccaagaagctgcagaccgccaggccttcagacagccagagcaagcgattgcattcggtcagaaccagcagcagtggcaccgcccagaggtcccttttatctccactgcatcgaagtgggagcgtggaggacaattaccacaccagcttccttttcggcctttccaccagccagcagcacctcacgaagtctgctggcctgggccttaagggctggcactcggatatcttggccccccagacctctaccccttccctgaccagcagctggtattttgccacagagtcctcacacttctactctgcctcagccatctacggaggcagtgccagttactctgcctacagctgcagccagctgcccacttgcggagaccaagtctattctgtgcgcaggcggcagaagccaagtgacagagctgactcgcggcggagctggcatgaagagagcccctttgaaaagcagtttaaacgcagaagctgccaaatggaatttggagagagcatcatgtcagagaacaggtcacgggaagagctggggaaagtgggcagtcagtctagcttttcgggcagcatggaaatcattgaggtctcctgagaagaaagacacttgtgacttctatagacaatttttttttcttgttcacaaaaaaattccctgtaaatctgaaatatatatatgtacatacatatatatttttggaaaatggagctatggtgtaaaagcaacaggtggatcaacccagttgttactctcttaacatctgcatttgagagatcagctaatacttctctcaacaaaaatggaagggcagatgctaggatcccccctagacggaggaaaaccattttattcagtgaattacacatcctcttgttcttaaaaaagcaagtgtctttggtgttggaggacaaaatcccctaccattttcacgttgtgctactaagagatctcaaatattagtctttgtccggacccttccatagtacaccttagcgctgagactgagccagcttgggggtcaggtaggtagaccctgttagggacagagcctagtggtaaatccaagagaaatgatcctatccaaagctgattcacaaacccacgctcacctgacagccgagggacacgagcatcactctgctggacggaccattaggggccttgccaaggtctaccttagagcaaacccagtacctcagacaggaaagtcggggctttgaccactaccatatctggtagcccattttctaggcattgtgaataggtaggtagctagtcacacttttcagaccaattcaaactgtctatgcacaaaattcccgtgggcctagatggagataatttttttttcttctcagctttatgaagagaagggaaactgtctaggattcagctgaaccaccaggaacctggcaacatcacgatttaagctaaggttgggaggctaacgagtctacctccctctttgtaaatcaaagaattgtttaaaatgggattgtcaatcctttaaataaagatgaacttggtttcaagccaaatgtgaatttatttgggttggtagcagagcagcagcaccttcaaattctcagccaaagcagatgtttttgccctttctgcttcactgcatggatacagttggtaaaatgtaataatatggcagaattttataggaaacttcctagggaggtaaattatgggaagattaagaaaggtacaaattgctgaggagaagcaggaaacctgtttccttagtggcttttatcccctcggcatgcgatggggctgatgtttctataattgcctcagactttcacatttactagtagggctgagagaggctttagtgaggaaggaatattcagaataaaacggttgagaaagctgagaagaccattgagttttgatcagttgtgaatagagtgcaaagccatggccaagctgtttttggaaacgctggccggcgtgtcttcagtggaaaaagcaaatcaaaatggagcgagagcaaaggggcgtcctcagtcctcaacctacaatcactgtatggaatcggtcctggcagctgaacataggaggtcactggaacaagtgatagtgcagattggctttcaaacatcctcctggcttgagttttatcagctacagtgtgggtcctcttttgaagccttaattcacaacagcagctttttgggggtggggctgggcgggtgttgtcattgttctttcccttcctgtaagtgtcgctagttgctgcctcgtatctcaggtttttctctgtttttgagaaatggacagttttttgaccaggatgtgacttcatgtttcctatggtgacttctaaaaccagcacagaatgatatgactcaacacagaccgacttggttatggggatgatgagccgcacagacctcactagttgtgcacaaataatgtgctatgatggggtgtaaagtgaaggcagaagagggtcagccgcattgttatgatactgggaaagtgctggtcaacgatttgagttagtttttagatatacattgaaatctttaatcagacattctcaagtttcacacagtagtttttgatgttatgtacacacacaccaaatgtgtaacagttcaccacttccagagtgtggtcatgcccaaaacatgtttaagaaaggaaagcagtagctccttgctaacgatgtttcaggaggtttgggggacttggttttaatgagcttctgtcatttagggcttctcttggccatggtccccttccttctggaactgtgatgtagtcacatcctacagcctttagtgctggttcactagtgtcagataatcagttcttggaatcgagactgccgtggcgaaggggtggcctcggaggcaggctctggagctgcttggatgtctttaggtggggtggtggctggctctcttcagcatgtaattggggaaaccctcgtttctactaggggtgatacagatggtgattttaaagagcaaaactagacttctatgtgagaagtgctggaaaatgatttaggacatgtgtaaagttagatggaaagactgtaaatgtttaatatgaatatagtgttcttttgaagtaaggccagctgttgaacggttaaactgtgcatttctcattttgatgtgtcatgtatgttaatgtatgaaatgattaaataaaatcaaaactggtacctgtttatacat

SEQ ID NO: 4389 - protein, 690 aa, Homo sapien
AFEHTTITSSWQIKEGGGKRGLIVVMAHEMIGTQIVTERLVALLESGTEKVLLIDSRPFVEYNTSHILEAININCSKLMKRRLQQDKVLITELIQHSAKHKVDIDCSQKVVVYDQSSQDVASLSSDCFLTVLLGKLEKSFNSVHLLAGGFAEFSRCFPGLCEGKSTLVPTCISQPCLPVANIGPTRILPNLYLGCQRDVLNKELMQQNGIGYVLNASNTCPKPDFIPESHFLRVPVNDSFCEKILPWLDKSVDFIEKAKASNGCVLVHCLAGISRSATIAIAYIMKRMDMSLDEAYRFVKEKRPTISPNFNFLGQLLDYEKKIKNQTGASGPKSKLKLLHLEKPNEPVPAVSEGGQKSETPLSPPCADSATSEAAGQRPVHPASVPSVPSVQPSLLEDSPLVQALSGLHLSADRLEDSNKLKRSFSLDIKSVSYSASMAASLHGFSSSEDALEYYKPSTTLDGTNKLCQFSPVQELSEQTPETSPDKEEASIPKKLQTARPSDSQSKRLHSVRTSSSGTAQRSLLSPLHRSGSVEDNYHTSFLFGLSTSQQHLTKSAGLGLKGWHSDILAPQTSTPSLTSSWYFATESSHFYSASAIYGGSASYSAYSCSQLPTCGDQVYSVRRRQKPSDRADSRRSWHEESPFEKQFKRRSCQMEFGESIMSENRSREELGKVGSQSSFSGSMEIIEVS

SEQ ID NO: 4390 - DNA, 744 bp, Homo sapien
ggggactccaacgctgggtgacattgagctcaccagcgccaccgtccccggcgaagttctgcgctggtcggcggagtagcaagtggccatggggagcctcagcggtctgcgcctggcagcaggaagctgttttaggttatgtgaaagagatgtttcctcatctctaaggcttaccagaagctctgatttgaagagaataaatggattttgcacaaaaccacaggaaagtcccggagttccatcccgcacttacaacagagtgcctttacacaaacctacggattggcagaaaaagatcctcatatggtcaggtcgcttcaaaaaggaagatgaaatcccagagactgtctcgttggagatgcttgatgctgcaaagaacaagatgcgagtgaagatcagctatctaatgattgccctgacggtggtaggatgcatcttcatggttattgagggcaagaaggctgcccaaagacacgagactttaacaagcttgaacttagaaaagaaagctcgtctgaaagaggaagcagctatgaaggccaaaacagagtagcagaggtatccgtgttggctggattttgaaaatccaggaattatgttataacgtgcctgtattaaaaaggatgtggtatgaggatccatttcataaagtatgatttgcccaaacctgtaccatttccgtatttctgctgtagaagtagaaataaattttccaaaaaaaaaaaaaaaaaaaaaaaaaaaaaa

SEQ ID NO: 4391 - protein, 154 aa, Homo sapien [sequence omitted]

SEQ ID NO: 4392 - DNA, 2963 bp, Homo sapien; identical to SEQ ID NO: 3245

SEQ ID NO: 4393 - protein, 286 aa, Homo sapien
MDELQDVQLTEIKPLLNDKNGTRNFQDFDCQEHDIETTHGVVHVTIGVGAGAYILSRFALNHPELVEGLVLINVDPCAKGWIDWAASKLSGLTTNVVDIILAHHFGQEELQANLDLIQTYRMHIAQDINQDNLQLFLNSYNGRRDLEIERPILGQNDNKSKTLKCSTLLVVGDNSPAVEAVVECNSRLNPINTTLLKMADCGGLPQVVQPGKLTEAFKYFLQGMGYIPSASMTRLARSRTHSTSSSLGSGESPFSRSVTSNQSDGTQESCESPDVLDRHQTMEVSC

SEQ ID NO: 4394 - DNA, 1104 bp, Homo sapien
cctgctctgtagagccggcggcaaccgggtagcttggccaggttgtgaggaaccgcagcgcccgcaggaccgggccgctgagcctgcagccgccccgcgccgtgacctgcgaccctagaccccgactaccctttggctcagcccgcgcgccccaggcccggcccgggcggcgcgacgggaggatgagcggcgggcggcggaaggaggagccgcctcagccgcagctggccaacggggccctcaaagtctccgtctggagtaaggtgctgcggagcgacgcggcctgggaggataaggatgaatttttagatgtgatctactggttccgacagatcattgctgtggtcctgggtgtcatttggggagttttgccattacgagggttcttgggaatagcaggattctgcctgatcaatgcaggagtcctgtacctctacttcagcaattacctacagattgatgaggaagaatatggtggcacgtgggagctcacgaaggaagggtttatgacctcttttgccttgttcatggtcatttggatcatcttttacactgccatccattatgactgatggtgtacagctcccaagtgctccctatccagtccaaaggaccctcttgattacagcacaggaacttgatcgttggggaaccccagccccttggaacttggaagacccgtgtttcctggaccgcgaatcagtgtgttgggcatcagtgttttctgcaagggttgtgacctgaaactttttaaaaaccacccacctttggggaagcatttctgaatttatccatcaccaaccatttcttcttggataccatcaagtaacagctattatttgccaagtggagctgtcatttaatttgatgcacctctggattcagatgaaacattaaattgtcttcctcgattctccatcgggtgtagagtttttaaactatcaatggcatttcaagtcttctgaaacagcatggctgtatgtgcgtggtccatagcacagtacatgcagcatctaataagagtttccattgtagaatgttttcacatacttgaataaatcaaatctttaattgagaaaaaaaaaaaaaaaaaaaaaaaaaaaa

SEQ ID NO: 4395 - protein, 129 aa, Homo sapien
MSGGRRKEEPPQPQLANGALKVSVWSKVLRSDAAWEDKDEFLDVIYWFRQIIAVVLGVIWGVLPLRGFLGIAGFCLINAGVLYLYFSNYLQIDEEEYGGTWELTKEGFMTSFALFMVIWIIFYTAIHYD

SEQ ID NO: 4396 - DNA, 1240 bp, Homo sapien
tgctggcctggggttgtggttgaggccgggtctccgctcctgtgcccgggaagatggtgctaggtggttgcccggttagttacttacttctgtgcggccaggcggctttgctgctggggaatttacttctgctgcattgtgtgtctcggagccactcgcaaaatgcgaccgctgagcctgagctcacatccgctggcgccgcccagccggagggccccgggggtgctgcgagctgggaatatggcgacccccactctccggtcatcctctgctcttacctacctgatgaatttatagaatgtgaagacccagtggatcatgttggaaatgcaactgcatcccaggaacttggttatggttgtctcaagttcggcggtcaggcctacagcgacgtggaacacacttcagtccagtgccatgccttagatggaattgagtgtgccagtcctaggacctttctacgagaaaataaaccttgtataaagtataccggacactacttcataaccactttactctactccttcttcctgggatgttttggtgtggatcgattctgtttgggacacactggcactgcagtagggaagctgttgacgcttggaggacttgggatttggtggtttgttgaccttattttgctaattactggagggctgatgccaagtgatggcagcaactggtgcactgtttactaaaaagagctgccatcatggcccagggaggcgggtgaaagctccgtcttctgaattcatctctacaggctcaaaactcctctttgatatcagacctgatgttattttccttcttttggagggcatttgtttggttaagaaggcttctttggactttggaatttcaacccagattttaccttgcagacggaatgacaagcaaaaagtgttgtggggaatcaaatttgttcctttcctcatgcacaaaacataaaggatagtggcgagtttacaagctgtggatgggtttccatagtcttcctttctgtacattgctatatcttcagtcctttggagcaagtggacctaacaagttgagcaaaatgaatatttggatccatgttcctcttgtgaccctgagtcttcatgcaaggagatctgaagctgaacaatgaaaatcttcagcagaaatagaaatggccgtggattgtaatacacactgaaattctgactttctgaatttaaatgtagaataaattttaccaacttggaaaaaaaaaaaaaaa

SEQ ID NO: 4397 - protein, 214 aa, Homo sapien
MVLGGCPVSYLLLCGQAALLLGNLLLLHCVSRSHSQNATAEPELTSAGAAQPEGPGGAASWEYGDPHSPVILCSYLPDEFIECEDPVDHVGNATASQELGYGCLKFGGQAYSDVEHTSVQCHALDGIECASPRTFLRENKPCIKYTGHYFITTLLYSFFLGCFGVDRFCLGHTGTAVGKLLTLGGLGIWWFVDLILLITGGLMPSDGSNWCTVY

SEQ ID NO: 4398 - DNA, 3109 bp, Homo sapien
ggcacgagacaatcctgacatttcattgttttgttacttggggcagtattaaccagtggcctttgtatgtacattcattgcttacatttattgtttaagtggtagagtagcatttttatgaacttccctgttcagtattagtgaaattgacagatgcgtatatgtaaagatagaaaagaaacgaatacaattaattttttattccttgaggcctatttatttgttttggccctggatcttttctaatcacaattatatttctttatttttgcctttgagcagtttcatttatctttgtgggcagggaagattaaatatgaaattcagtccagtcattttgctactggttagctttagtttgaggcaagtaaaaatttttgattaaaattagtttcttaaaattatgcccttgctttaccaaataatcaaattggctaaaaaataagggtatgtaactttgcattttgaagaacaaaccaataatttttcatgagccctactcgatcttctttaaagaagaccttcctaagagacaattagggatgagtttgattaatgggaaatagctctaggttagattattttaaattccatacaccaagtgatttaaccacagtggcagtggcagtttctgaaccgtcaagtatgaacatcacttaaaaattaaaagatgcttaataataaactcttaattttcattaagccaatctgtaattcagaagaaaagcatatgtctgccatgggactattgcagtgcgtctccatcagtgttaacacaggagagatatgttattttatgtgtatgtcttagtttgggatatgtggtagtaagaacatgtcaagagtgctttcttcaaacctgtcagctcaactgagaagacagttacttcattgcttattttttcccttgttttattgaaatctgtatctcatatccagtatctaacactttgtagagatacttacatataatgtaagtgcacacctacccagaggaatggataactgttaaagtgttaataatagctcgtcttagttgatttcagcataatttacattagggagacctaaaaagcaccttcaaagtattaaaagcaccttttttttttctttttcctaaaaaagcaattaaaatggtcactgctaacatttattaaacttcatgttagttgatgaaacagctggagggaagctgccacatctcctagctaagcagtctgacttacctgttgggaaacaaagggatattgctctaagattgattaggatgattgtagctagagtcttgaattctatctgtatacggcagagaaactttatagagtgtagagaggtgagcgaaaggatgcaaaagcactttgagggctttataataatatgctgcttgaaaaaaaaaatgtgtagttgatactcagtgcatctccagacatagtaaggggttgctctgaccaatcaggtgatcattttttctatcacttcccaggttttatgcaaaaattttgttaaattctataatggtgatatgcatcttttaggaaagatatacatttttaaaaatctattttatgtaagaactgacagaggaatttgctttgtataatgcaggctggctttacaaaagcactgtagcaaatttactacaagtctaaaagtatacatatatgttaatagatatatgtgcaactagatatggacagcagttgtatttttttaaataaatatttttaacaaaaaaaaaaaaaaaaaactcgagcaaacatggcggctccactagggggtatgttttctgggcagccacccggtccccctcaggccccgccgggccttccgggccaagcttcgcttcttcaggcagctccaggcgctcctagaccttccagcagtactttggtggacgagttggagtcatctttcgaggcttgctttgcatctctggtgagtcaggactatgtcaatggcaccgatcaggaagaaattcgaaccggtgttgatcagtgtatccagaagtttctggatattgcaagacagacagaatgttttttcttacaaaaaagattgcagttatctgtccagaaaccagagcaagttatcaaagaggatgtgtcagaactaaggaatgaattacagcggaaagatgcactagtccagaagcacttgacaaagctgaggcattggcagcaggtgctggaggacatcaacgtgcagcacaaaaagcccgccgacatccctcagggctccttggcctacctggagcaggcatctgccaacatccctgcacctctgaagccaacgtgagcaaagggcagaggcagttggcctatgagtgggctgatgcgtgaggttggccacacattccttcctgtggacttgacattttggaagaactctttgccagataatgagttcattttagttttatgctcccattgaaaaattttccactatttttataagctgttaatttcttgagtactttataacatgtctgtagcttggataaaccaagtaagtattttttttttgtctttagcaaagtttagactgtgaatatgatgacacagattcttttttatggtggctttgcttgttttaaatttttgcatgacttttcatctttttatgtgtgtttcctgtagtttgatccgaaggaaaagagtatagtagcctgagaatcaggagatgggagttttagtcgtaggccttatgataattaccccgcggtggtgtgtagaaaagtatgtaaatttgctctgttttaagactttgaactacctcaagaagaggaatctaatacaatatttgtaatgtttccagagctctcagaatgaggatttttttgtaaataggtcagaagacgatggaactgtcctgggttagtatagtaatcttacagtaggatccttaggttgatgctgacttctgtttggggtatgtttatattttatgtggtgtttactttttttttttgacataaaaggatatagtgggagcagtgatacgctaacattcattacattctgcagtaatgaatctgaaaaaaaaaaaaaaaaaaaaaaaaaaaaaaaaaaaaaaaaaaaaaaaaaaaaaaaaaaaaaaaaaaaaaaaaaaa

SEQ ID NO: 4399 - protein, 178 aa, Homo sapien
MAAPLGGMFSGQPPGPPQAPPGLPGQASLLQAAPGAPRPSSSTLVDELESSFEACFASLVSQDYVNGTDQEEIRTGVDQCIQKFLDIARQTECFFLQKRLQLSVQKPEQVIKEDVSELRNELQRKDALVQKHLTKLRHWQQVLEDINVQHKKPADIPQGSLAYLEQASANIPAPLKPT

SEQ ID NO: 4400 - DNA, 2824 bp, Homo sapien
cccgagccccgcccctccgggcccgggtcggcgcgcccagcctgccagccgcgctgctgctgctcctcctgctgtgggaccgctgaccgcgcggctgctccgctctccccgctccaagcgccgatctgggcacccgccaccagcatggacgctcgccgcgtgccgcagaaagatctcagagtaaagaagaacttaaagaaattcagatatgtgaagttgatttccatggaaacctcgtcatcctctgatgacagttgtgacagctttgcttctgataattttgcaaacacgaaacctaaattcaggtcagatatcagtgaagaactggcaagtgttttttatgaggactctgataatgaatctttctgcggcttttcagaaagtgaggtgcaagatgtattagaccattgtggatttttacagaaaccaaggccagatgtcactaacgaactggccggtatttttcatgccgactctgacgatgaatcattttgcggtttctcagagagtgagatacaagatggaatgaggctgcagtcagttcgggaaggctgtaggacccgcagccagtgcaggcactctggacctctcagggtggcgatgaagtttccagcgcggagtaccaggggagcaaccaacaaaaaagcagagtcccgccagccctcagagaattctgtgactgattccaactccgattcagaagatgaaagtggaatgaattttttggagaaaagggctttaaatataaagcaaaacaaagcaatgcttgcaaaactcatgtctgaattagaaagcttccctggctcgttccgtggaagacatcccctcccaggctccgactcacaatcaaggagaccgcgaaggcgtacattcccgggtgttgcttccaggagaaaccctgaacggagagctcgtcctcttaccaggtcaaggtcccggatcctcgggtcccttgacgctctacccatggaggaggaggaggaagaggataagtacatgttggtgagaaagaggaagaccgtggatggctacatgaatgaagatgacctgcccagaagccgtcgctccagatcatccgtgacccttccgcatataattcgcccagtggaagaaattacagaggaggagttggagaacgtctgcagcaattctcgagagaagatatataaccgttcactgggctctacttgtcatcaatgccgtcagaagactattgataccaaaacaaactgcagaaacccagactgctggggcgttcgaggccagttctgtggcccctgccttcgaaaccgttatggtgaagaggtcagggatgctctgctggatccgaactggcattgcccgccttgtcgaggaatctgcaactgcagtttctgccggcagcgagatggacggtgtgcgactggggtccttgtgtatttagccaaatatcatggctttgggaatgtgcatgcctacttgaaaagcctgaaacaggaatttgaaatgcaagcataatatctggaaaatttgctgcctgccttctacttctcaaatctttcttgtaaaagtttccaattttttcactgaaacctgagttaaaaatcttgatgatcagcctgtttcataagaaactccaatcaagttaatcttagcagacatgtgtttctggagcatcacagaaggtatattgctagttacactttgccctcctgcagtttcttctctgctcccaacccccatctcatagcatccccctctatttccaatgctcctctccaaccgcttagtttctgaatttcttttaaattacagttttatgaaagcatattttatttacttggtgttgaaatagccctcataaaacctaagcacttggaaacacaataatagtattaactaactagatctattgaatttcagagaagagccttctaacttgtttacacaaaaacgagtatgatttagcattcatactagttgaaatttttaatagaatcaaggcacaaaagtcttaaaaccatgtggaaaaattaggtaattattgcagattgatgtctctcaatcccatgtattgcgcttatgttacaagttgttgtcacagttgagacttaatttctcctaatttcttctgcccgaagggtaagtggtgcgtccagcttacacaatcataattcaaaggttggtgggcaatgtaatacttaattaaaataatgatggaagagctatctggagattatgagtaagctgatttgaattttcagtataaaactttagtataattgtagtttgcaaagtttatttcagttcacatgtaaggtattgcaaataaattcttggacaattttgtatggaaacttgatattaaaaactagtctgtggttctttgcagtttcttgtaaatttataaaccaggcacaaggttcaagtttagattttaagcacttttataacaatgataagtgcctttttggagatgtaacttttagcagtttgttaacctgacatctctgccagtctagtttctgggcaggtttcctgtgtcagtattccccctcctctttgcattaatcaaggtatttggtagaggtggaatctaagtgtttgtatgtccaatttacttgcatatgtaaaccattgctgtgccattcaatgtttgatgcataattggaccttgaatcgataagtgtaaatacagcttttgatctgtaatgcttttatacaaaagtttattttaataataaaatgtttgttctaacttgtctgcttttttaaaaataatcttactgtacttaattctaattttttcctcatatttaaataaaaggccatttccaccttttct

SEQ ID NO: 4401 - protein, 450 aa, Homo sapien
MDARRVPQKDLRVKKNLKKFRYVKLISMETSSSSDDSCDSFASDNFANTKPKFRSDISEELASVFYEDSDNESFCGFSESEVQDVLDHCGFLQKPRPDVTNELAGIFHADSDDESFCGFSESEIQDGMRLQSVREGCRTRSQCRHSGPLRVAMKFPARSTRGATNKKAESRQPSENSVTDSNSDSEDESGMNFLEKRALNIKQNKAMLAKLMSELESFPGSFRGRHPLPGSDSQSRRPRRRTFPGVASRRNPERRARPLTRSRSRILGSLDALPMEEEEEEDKYMLVRKRKTVDGYMNEDDLPRSRRSRSSVTLPHIIRPVEEITEEELENVCSNSREKIYNRSLGSTCHQCRQKTIDTKTNCRNPDCWGVRGQFCGPCLRNRYGEEVRDALLDPNWHCPPCRGICNCSFCRQRDGRCATGVLVYLAKYHGFGNVHAYLKSLKQEFEMQA

SEQ ID NO: 4402 - DNA, 2162 bp, Homo sapien
ggagttcggagtagagatggccgcgcttgcaccgctgcccccgctccccgcacagttcaagagcatacagcatcatctgaggacggctcaggagcatgacaagcgagaccctgtggtggcttattactgtcgtttatacgcaatgcagactggaatgaagatcgatagtaaaactcctgaatgtcgcaaatttttatcaaagttaatggatcagttagaagctctaaagaagcagttgggtgataatgaagctattactcaagaaatagtgggctgtgcccatttggagaattatgctttgaaaatgtttttgtatgcagacaatgaagatcgtgctggacgatttcacaaaaacatgatcaagtccttctatactgcaagtcttttgatagatgtcataacagtatttggagaactcactgatgaaaatgtgaaacacaggaagtatgccagatggaaggcaacatacatccataattgtttaaagaatggggagactcctcaagcaggccctgttggaattgaagaagataatgatattgaagaaaatgaagatgctggagcagcctctctgcccactcagccaactcagccatcatcatcttcaacttatgacccaagcaacatgccatcaggcaactatactggaatacagattcctccgggtgcacacgctccagctaatacaccagcagaagtgcctcacagcacaggtgtagcaagtaatactatccaacctactccacagactatacctgccattgatcccgcacttttcaatacaatttcccagggggatgttcgtctaaccccagaagacttgctagagctcagaagtactgcaaatatgctggcagtgctttgcagtatgaagatgtaagcactgctggccagaatctacaaaaaggctctcaagttactgacgacaggcagagaatgaagcctttgtatgacagacccatgtatttttggtatgaggaactaacagtccattactctatcttcagcctatcaggatcacagttttaaggaagacttggttttgttgaatatgacaatgaaatctgtgtgtatcagatttttattgaagcattcatcagcagcctcaaccagttttcattgtccatttactagattcaatcgtctctgagtatatagggctgatgttagcaagaccctaaaaatgtccattgaaccctgcttcaaaaaatgaaaacacacctctataaaatgtgtactgggaataagctttgtatttacatacattaggggaattttttaaaatctgtaatgtttggacaaacagatgatattactttgctataaaattataaatgtaacttttaataaagatagccagaatattctaaattagaaattacgtttttgtttccctcaagacataaaccaaatataaacattctaaactgctggatgaatctgaaaagacattaagttcaaattttaatttattctcatattaaatataactccattaaaagtttaaaatttcatgggagaaaatataataaggtaaagaggtagaatcactttcagacttaagaataatgttgatttcccaagtgctttaccttatctgttaaagcgtaagatgaattggtatttgcttccataggcagtttgactgccatgtattagagaatgaaaagaagatatttgtagtaatgcctggaaacttggtgctttaaattaaggtactcctctgctgctgtagaatggattccacacagtggatagctatgggtgattcagaatattatgtttagattcccatttgttaagtttataagttttgtggggaattatgaacttactgtgtactacctgcatttgtgctgtgtgaaaaataaatacaaggattcgtttagctaattcaacttactacaaagacaaatgtctgtttttatttgcctgctaggattgtcttttttaaaagtcatttttatttataggaatatgggtgtttctataggaagaaacaggttttttgttttttgttttttaagataaatttgacaaagttaactgaaatttatctggtccattttattcatgctactaagatgggaatctttaaacacaagggtcagcaagctttggcccatggattggccacctgttacgtaaataaagtttctttg

SEQ ID NO: 4403 - protein, 287 aa, Homo sapien
MAALAPLPPLPAQFKSIQHHLRTAQEHDKRDPVVAYYCRLYAMQTGMKIDSKTPECRKFLSKLMDQLEALKKQLGDNEAITQEIVGCAHLENYALKMFLYADNEDRAGRFHKNMIKSFYTASLLIDVITVFGELTDENVKHRKYARWKATYIHNCLKNGETPQAGPVGIEEDNDIEENEDAGAASLPTQPTQPSSSSTYDPSNMPSGNYTGIQIPPGAHAPANTPAEVPHSTGVASNTIQPTPQTIPAIDPALFNTISQGDVRLTPEDLLELRSTANMLAVLCSMKM

SEQ ID NO: 4404 - DNA, 536 bp, Homo sapien
gccgactcctcccgctaaggcgggaacacgcggggcccaagatggcggccagccggtaccggcgttttcttaagctctgtgaggaatggccagtggacgagaccaaacggggccgggacttgggcgcttacctgcgacagcgggtagcacaggcctttcgggagggagagaatacccaggttgcagagcctgaggcctgtgatcagatgtacgagagcttagcgcgactccattcaaactactacaaacacaagtaccctcgccccagagacaccagcttcagtggcctgtcgttggaagagtacaagctgatcctgtccacagacaccttggaagagcttaaggaaatagataaaggcatgtggaagaaactgcaggagaagtttgcccccaagggtcctgaggaggatcataaggcctgagctcaggccttacctcgtgcacatacctaggtgtggagtcttgtacattgccatcgtcaataaaactgccccagtttccccttgcaaaaaaaaaaaaaaaaaaaaaaaaaaaaa

SEQ ID NO: 4405 - protein, 126 aa, Homo sapien
MAASRYRRFLKLCEEWPVDETKRGRDLGAYLRQRVAQAFREGENTQVAEPEACDQMYESLARLHSNYYKHKYPRPRDTSFSGLSLEEYKLILSTDTLEELKEIDKGMWKKLQEKFAPKGPEEDHKA

SEQ ID NO: 4406 - DNA, 2495 bp, Homo sapien
gggtggtggatctgtcggtcccgttttcccgtcgcacgtggtggccactgttggcttctgaatggtttgcaaggcggatatccacgccaaggcctttggatcggccgtgggtacatccgtctgagccgttcctttccatcgcagagcggcggcctccggcggcgctctccagtcatggactaccggcggcttctcatgagccgggtggtccccgggcaattcgacgacgcggactcctctgacagtgaaaacagagacttgaagacagtcaaagagaaggatgacattctgtttgaagaccttcaagacaatgtgaatgagaatggtgaaggtgaaatagaagatgaggaggaggagggttatgatgatgatgatgatgactgggactgggatgaaggagttggaaaactcgccaagggttatgtctggaatggaggaagcaacccacaggcaaatcgacagacctccgacagcagttcagccaaaatgtctactccagcagacaaggtcttacggaaatttgagaataaaattaatttagataagctaaatgttactgattccgtcataaataaagtcaccgaaaagtctagacaaaaggaagcagatatgtatcgcatcaaagataaggcagacagagcaactgtagaacaggtgttggatcccagaacaagaatgattttattcaagatgttgactagaggaatcataacagagataaatggctgcattagcacaggaaaagaagctaatgtataccatgctagcacagcaaatggagagagcagagcaatcaaaatttataaaacttctattttggtgttcaaagatcgggataaatatgtaagtggagaattcagatttcgtcatggctattgtaaaggaaaccctaggaaaatggtgaaaacttgggcagaaaaagaaatgaggaacttaatcaggctaaacacagcagagataccatgtccagaaccaataatgctaagaagtcatgttcttgtcatgagtttcatcggtaaagatgacatgcctgcaccactcttgaaaaatgtccagttatcagaatccaaggctcgggagttgtacctgcaggtcattcagtacatgagaagaatgtatcaggatgccagacttgtccatgcagatctcagtgaatttaacatgctgtaccacggtggaggcgtgtatatcattgacgtgtctcagtccgtggagcacgaccacccacatgccttggagttcttgagaaaggattgcgccaacgtcaatgatttctttatgaggcacagtgttgctgtcatgactgtgcgggagctctttgaatttgtcacagatccatccattacacatgagaacatggatgcttatctctcaaaggccatggaaatagcatctcaaaggaccaaggaagaacggtctagccaagatcatgtggatgaagaggtgtttaagcgagcatatattcctagaaccttgaatgaagtgaaaaattatgagagggatatggacataattatgaaattgaaggaagaggacatggccatgaatgcccaacaagataatattctataccagactgttacaggattgaagaaagatttgtcaggagttcagaaggtccctgcactcctagaaaatcaagtggaggaaaggacttgttctgattcagaagatattggaagctctgagtgctctgacacagactctgaagagcagggagaccatgcccgccccaagaaacacaccacggaccctgacattgataaaaaagaaagaaaaaagatggtcaaggaagcccagagagagaaaagaaaaaacaaaattcctaaacatgtgaaaaaaagaaaggagaagacagccaagacgaaaaaaggcaaatagaatgagaaccatattatgtacagtcattttcctcagttccttttctcgcctgaactcttaagctgcatctggaagatggcttattggttttaaccagattgtcatcgtggcactgtctgtgaagacggattcaaatgttttcatgtaactatgtaaaaagctctaagctctagagtctagatccagtcactgactctgtctggtgttgacagaggatttatttaagctattattttaataaagaactttgtacatttttatttttatatttttttctcttacaaatatgtttttggaagcatgataaatgtttaaatgtagtcaacatctgtaactcttacatgagtgtccagaggcactcatgggaaaattggttttgctttctttgtacacaccagagacccatctgaggtcatctgattataaggccatgtttatataaagggaatttcacccacagttcagctggctgttgattttcactgcaactctgcctttgtgtgtattggcgatcatttgtaatgctcttacacttcgtctttaatgttctttttggagttaggacctctcagttcataaagttttttacaattcaaaaaaaaaaaaaaaaaaaa

SEQ ID NO: 4407 - protein, 561 aa, Homo sapien [sequence omitted]

SEQ ID NO: 4408 - DNA, 2937 bp, Homo sapien
gctggaagcaacagatggggactgcagaggaggtggtggtattgggatagtgctgcagccaagaacttaacgactgaaagtaactgggatatcttcataattatctgaaggtcacagtgggagaacaaaattaaaagaactgagaagacttacaagagaacctcctaagagtcacccaaacaatcggctgagaatgagaagaggttcaagtgattcttgtgcctcaggctcccaagtagctgggactacagtagctgggccagcacacccagaaagcctcacattgtgcagtggagaagctgagagaagaggaaaagaggagtggccagactcccaccactacccaggaccaactcctgctcctgaatcttctgatgggccccacaaggtgacagtgctggctacaatgctatccagccggtggtggccaagttcctgggggatcctagggctgggcccccgaagccctcctcggggatcccagctctgtgccctctatgcctttacttatactggggcagatggccagcaggtgtctctggctgaaggggataggttcctactgcttcgaaagaccaactccgactggtggttggcaagacgcctagaagctccctccacctctcgacccatcttcgtcccagcagcctatatgatagaggaatccatcccttcccagagtccaactaccgtcatccccggccaattgctctggactcctgggccgaagttgtttcatggttccctggaggagttgtctcaggccctcccaagcagggctcaggctagctcggagcagcctcctccacttccccgcaaaatgtgtaggagcgtcagcactgacaatctgagccccagctttctgaagcctttccaggaaggaccaagcggaagatccctctcccaggaagacttgccgtcagaagccagtgccagcacagcaggcccccagcccctcatgtcagagccccctgtgtactgtaacctggtggaccttcgccgctgtcctcggtccccacccccaggccctgcatgccccctgctgcagaggctggatgcctgggagcagcacctggaccccaactctggacgctgcttctacataaattcactgactggctgcaagtcctggaagcccccgcgccgcagtcgcagcgagacgaaccctggctccatggaggggacacagaccctgaagaggaacaatgatgtcctgcaacctcaggcaaagggcttcagatctgacacagggaccccagaaccgcttgacccacagggttcactcagcctcagccaacgcacctcgcagcttgaccctccagccttgcaggcccctcgacctctgccgcagctcctggacgacccccatgaggtggaaaagtcgggtctgctcaacatgaccaagattgcccaaggggggcgcaagctcaggaagaactggggcccgtcttgggtggtgttaacgggtaacagcctggtgttctaccgagagccaccgccgacagcgccctcctcaggctggggaccagcgggtagccggcccgaaagtagcgtggacctgcgcggggcggccctggcgcacggccgccacctgtccagccgccgcaacgtcctgcacatccgcacgatccctggccacgagttcctgctgcagtcggaccacgagacagagctgcgagcctggcaccgcgcgctgcggactgtcatcgagcggctggttagatgggtggaggcccggagggaggctccgaccggccgggaccaagggagtggggatcgggagaaccccctggagctgcgtctgtcgggctctggacccgcggagctgagcgccggggaggacgaagaagaggagtcggagctggtgtccaagccgctgctgcgcctcagcagccgccggagctccattcgggggcccgaaggcaccgagcagaaccgcgtgcgcaacaaactaaagcggctcatcgcgaagagaccgcccttacaaagcctgcaggagcggggtctgctccgagaccaggtgttcggctgccagttggaatcactctgccagcgggaaggagacacggtgcccagctttttgcggctctgcattgctgctgtggataaaagaggtctagatgtggatggcatttatcgggtgagcgggaacttggcagtggtccagaagcttcgctttctggtggacagagagcgtgcggtcacctccgatgggaggtatgtgttcccagaacagccaggacaagaaggtcggttagatttggacagtactgagtgggatgacattcatgtggtcaccggagccctgaagctttttctccgggagctgccccagcctctggtgccaccactgctgctgccccatttccgtgctgcccttgcactctccgaatcagagcagtgcctctctcagatacaagaattaataggctcaatgccaaagcccaaccatgacactctacggtacctcctggagcatttatgcagggtgatagcacactcagataagaatcgcatgacaccccacaacctgggaattgtgtttggaccaaccctgtttcggccagagcaggagacatctgacccagcagcccatgctctctacccagggcagctggtccagctgatgctcaccaacttcaccagcctcttcccctgatgcagggaaggaagaagagaaaacatatttccggtcatctctggtggtgagaggctggtgttctgttttgaggatatccctttaaatctcccaaatgactgtctctatcttcatgagtgtgacttgaggtgttgggatgggtgagggagcttctctaaagaggaaagtgagtggattaacccctgcttctcttcttgttccctgttatcattcctccccaacataataatacataaagtggcatggtatttttaaaaaaaaaaaaaaaaaaaaaaaaa

SEQ ID NO: 4409 - protein, 750 aa, Homo sapien
MLSSRWWPSSWGILGLGPRSPPRGSQLCALYAFTYTGADGQQVSLAEGDRFLLLRKTNSDWWLARRLEAPSTSRPIFVPAAYMIEESIPSQSPTTVIPGQLLWTPGPKLFHGSLEELSQALPSRAQASSEQPPPLPRKMCRSVSTDNLSPSFLKPFQEGPSGRSLSQEDLPSEASASTAGPQPLMSEPPVYCNLVDLRRCPRSPPPGPACPLLQRLDAWEQHLDPNSGRCFYINSLTGCKSWKPPRRSRSETNPGSMEGTQTLKRNNDVLQPQAKGFRSDTGTPEPLDPQGSLSLSQRTSQLDPPALQAPRPLPQLLDDPHEVEKSGLLNMTKIAQGGRKLRKNWGPSWVVLTGNSLVFYREPPPTAPSSGWGPAGSRPESSVDLRGAALAHGRHLSSRRNVLHIRTIPGHEFLLQSDHETELRAWHRALRTVIERLVRWVEARREAPTGRDQGSGDRENPLELRLSGSGPAELSAGEDEEEESELVSKPLLRLSSRRSSIRGPEGTEQNRVRNKLKRLIAKRPPLQSLQERGLLRDQVFGCQLESLCQREGDTVPSFLRLCIAAVDKRGLDVDGIYRVSGNLAVVQKLRFLVDRERAVTSDGRYVFPEQPGQEGRLDLDSTEWDDIHVVTGALKLFLRELPQPLVPPLLLPHFRAALALSESEQCLSQIQELIGSMPKPNHDTLRYLLEHLCRVIAHSDKNRMTPHNLGIVFGPTLFRPEQETSDPAAHALYPGQLVQLMLTNFTSLFP

SEQ ID NO: 4410 - DNA, 878 bp, Homo sapien
ctccgacaacaggaattttctccgagagcgggccgggctcagttcagctgctgtccagacccggatcggcaacagtgccgcctccagacgttctcctgccgctcgcccgcccgtcccagcgcccccagccctcccgcgagggcgccccgggacggaaggatccaccagtctgtcggcgcccgccgttctcgtggtcgccgtcgccgtcgtcgtggtggtagtctccgccgtcgcctgggccatggccaattacatccacgtccctcccggctccccggaggtgcccaagctgaacgtcaccgttcaggatcaggaggagcatcgctgccgggagggggccctgagcctcctgcaacacctgcggcctcactgggacccccaggaggtgaccctgcagctcttcacagatggaatcacaaataaacttattggctgttacgtgggaaacaccatggaggatgtagtcctggtgagaatttatggcaataagactgagttattagtcgatcgagatgaggaagtaaagagttttcgagtgttgcaggctcatgggtgtgcaccacaactctactgtaccttcaataatggactatgctatgaatttatacaaggagaagcactggatccaaagcatgtctgcaacccagccattttcagtttatcatcgttgactctttgcaaaggaaaaactacaagatgttttggattaaccggctgcagagggtcaaggcttctgcttagttttttctagttagtgtttgagttgaagtgttatacatttcttactgccgattgcttattacttaattgttcatgttttcagagttcttgcctattaaaattttattaatttggttaacaaaaaaaaaaaaaaaaaa

SEQ ID NO: 4411 - protein, 169 aa, Homo sapien
MANYIHVPPGSPEVPKLNVTVQDQEEHRCREGALSLLQHLRPHWDPQEVTLQLFTDGITNKLIGCYVGNTMEDVVLVRIYGNKTELLVDRDEEVKSFRVLQAHGCAPQLYCTFNNGLCYEFIQGEALDPKHVCNPAIFSLSSLTLCKGKTTRCFGLTGCRGSRLLLSFF

SEQ ID NO: 4412 - DNA, 1125 bp, Homo sapien
ggcggctggtgagcgcccgctggaggctggagcttccgggccctggaaaggggtccccgcgcgccccgggtcggaggcagacccctgggtttgggggacatgggcatttggggcgcctgaacccaagacctctggatgagctgccccgttcagaccatggatcctgaggtgaccttgctgctgcagtgccctggcgggggcctgccccaggagcagatacaggccgagctgagccccgcccatgaccgtcgcccactgccaggtggggacgaggccatcactgccatctgggagacccggctaaaggcccaaccctggctcttcgacgcccccaagttccgcctgcactcagccaccctggcgcctattggctctcgggggccacagctgctcctgcgcctgggccttacttcctaccgagacttcctgggcaccaactggtccagctcagctgcctggctgcgacagcagggtgccaccgactggggtgacacgcaggcctatctggcggacccactgggggtgggcgctgcactagccacagccgatgacttccttgtcttcctgcgccgctcccggcaggtggctgaggcccctgggctggtggacgtacctggtgggcaccctgagcctcaggccctgtgccctggtggcagcccccagcaccaggacctcgctgggcagctggtggtacatgaactcttttccagtgtccttcaggagatctgtgatgaggtgaacctgccgctgctcaccctgagccagcccctgctgttgggcatcgcccgaaatgagaccagtgctggccgagccagtgccgagttctatgtccagtgcagcctgacttctgagcaggtgaggaagcactacctgagtgggggacccgaggcccacgagtctacaggaatcttctttgtggagacacagaacgtgcggagattgcccgagacggagatgtgggctgaactctgcccctcggccaaaggcgccatcatcctctacaaccgggttcagggaagtcccactggagcggccctagggtccccagccctactcccgccgctctgaaaataataaacgactttattcttggaaaaaaaaaaaaaaaaaaaaaaaaaaaaaaaa

SEQ ID NO: 4413 - protein, 303 aa, Homo sapien
MDPEVTLLLQCPGGGLPQEQIQAELSPAHDRRPLPGGDEAITAIWETRLKAQPWLFDAPKFRLHSATLAPIGSRGPQLLLRLGLTSYRDFLGTNWSSSAAWLRQQGATDWGDTQAYLADPLGVGAALATADDFLVFLRRSRQVAEAPGLVDVPGGHPEPQALCPGGSPQHQDLAGQLVVHELFSSVLQEICDEVNLPLLTLSQPLLLGIARNETSAGRASAEFYVQCSLTSEQVRKHYLSGGPEAHESTGIFFVETQNVRRLPETEMWAELCPSAKGAIILYNRVQGSPTGAALGSPALLPPL

SEQ ID NO: 4414 - DNA, 1174 bp, Homo sapien
tagtttgcgttttcacctggtcgcccggcggccatggcggccgttctgaagccggtgctgctgggccttcgagatgcgccggtgcacggcagccccacagggccgggtgcctggactgctagcaagctgggcggcattccggatgctctgcccaccgtggctgcgcccaggcccgtgtgtcagcgctgcgggcagccgctcgctctggtcgtgcaggtgtattgcccgctggaaggctccccgtttcaccgtctgctgcacgtgttcgcgtgcgcctgccccggctgtagcaccggcggtgcgcgcagctggaaggtgttccgctcccagtgcctgcaggtgccagagagagaggcgcaggacgctcagaaacagggaaacagccttgcagctgaggactggtgtgaaggtgctgatgactggggaagtgatactgaggaggggccttcaccacagtttaccttggattttgggaatgatgccagcagtgccaaagacgtagactggactgctcggctccaagacctccgcctgcaggatgctgtcctgggtgctgcccatcctgtgcctcctgggctgccgctcttcctgccctactacatctgtgttgcagatgaggatgattacagggactttgtcaacctggatcatgcccacagccttctgagggactatcagcagagagaaggcattgccatggatcagttgctttcccaaagccttcctaatgatggtgatgaaaaatatgagaagaccataattaaaagtggagatcagacgttttacaaattcatgaagcgaattgctgcttgtcaggagcagattttgaggtattcctggagtggagagccactctttttgacctgccctacatcagaagtcaccgagctcccagcctgcagccagtgtggaggccaaaggatatttgagtttcagcttatgccagcactggtcagcatgctcaagagtgctaatttaggtctttctgtggaatttggaacaattctagtttacacatgtgagaagagttgctggcccccaaatcatcagactcccatggaagaattttgtattatacaagaagacccagatgaattattgtttaagtagagcatttccttttattaatataaattaaaacaaatgtttacatccaaaaaaaaaaaaaaaaaaa

SEQ ID NO: 4415 - protein, 358 aa, Homo sapien
MAAVLKPVLLGLRDAPVHGSPTGPGAWTASKLGGIPDALPTVAAPRPVCQRCGQPLALVVQVYCPLEGSPFHRLLHVFACACPGCSTGGARSWKVFRSQCLQVPEREAQDAQKQGNSLAAEDWCEGADDWGSDTEEGPSPQFTLDFGNDASSAKDVDWTARLQDLRLQDAVLGAAHPVPPGLPLFLPYYICVADEDDYRDFVNLDHAHSLLRDYQQREGIAMDQLLSQSLPNDGDEKYEKTIIKSGDQTFYKFMKRIAACQEQILRYSWSGEPLFLTCPTSEVTELPACSQCGGQRIFEFQLMPALVSMLKSANLGLSVEFGTILVYTCEKSCWPPNHQTPMEEFCIIQEDPDELLFK

SEQ ID NO: 4416 - DNA, 2225 bp, Homo sapien
ggcacgaggcgtctctctgcccccgccgctgccatggcggcagctccgccgctttccaaggccgagtatctgaagcgttacttgtccggggcagatgccggcgtcgaccggggatctgagtccggtcgcaagcgtcgcaaaaagcggccgaagcctggcggggccggcggcaagggaatgcggattgtggatgatgatgtgagctggacagctatctccacaaccaaactagaaaaggaggaagaggaagatgatggagatttgcctgtggtggcagagtttgtggatgagcggccagaagaggtaaagcagatggaggcctttcgttccagtgccaaatggaagcttctgggaggccacaacgaagacctaccctcaaacagacattttcgtcacgataccccggattcatctcctaggagggtccgtcatggtaccccagatccatctcctaggaaggaccgtcatgacaccccggatccatctcctaggagggcccgtcatgacaccccagatccttctcccctcagaggggctcgtcatgactcagacacatctcctcccaggaggatccgtcatgactcctcagacacttcacccccaaggagggcccgtcatgattctccagatccttctcccccaaggaggcctcagcataattcttcaggtgcatctcctaggagagtccgtcatgattcaccagatccctctcctcctaggcgagcccgtcatggttcctcagatatctcttcccccagaagggtccataacaactcccctgacacatctaggaggactcttggctcttcagacacacagcaactcagaagggcccgtcatgactcccctgatttggctcctaatgtcacttattccctgcccagaaccaaaagtggtaaagccccagaaagagcctctagcaagacttctccacattggaaggagtcaggagcctcccatttgtcattcccaaagaacagcaaatatgagtatgaccctgacatctctcctccacgaaaaaagcaagcaaaatcccattttggagacaagaagcagcttgattccaaaggtgactgccagaaagcaactgattcagacctttcttctccacggcataaacaaagtccagggcaccaggattctgattcagatctgtcacctccacggaatagacctagacaccggagctctgattctgacctctctccaccaaggaggagacagaggaccaaatcttctgattctgacctgtccccgcctcgaaggagtcagcctcctggaaagaaggctgcacacatgtattctggggctaaaactgggttggtgttaactgacatacagcgagaacagcaggagctcaaggaacaggatcaagaaaccatggcatttgaagctgaatttcaatatgctgaaaccgtatttcgagataagtctggtcgtaagaggaatttgaaactcgaacgtttagagcaaaggaggaaagcagaaaaggactcagagagagatgagctgtatgcccagtggggaaaagggcttgcccagagccggcaacagcaacaaaatgtggaggatgcaatgaaagagatgcaaaagcctctggcccgctatattgatgacgaagatctggataggatgctaagagaacaggaaagagagggggaccctatggccaacttcatcaagaagaataaggccaaggagaacaagaataaaaaagtgagacctcgctacagtggtccagcacctcctcccaacagatttaatatctggcctggatatcgctgggacggagtggacagatccaatggatttgaacagaagcgctttgccaggcttgccagcaagaaggcagtggaggaacttgcctacaaatggagtgttgaggatatgtaactttcctgaggctgtgggggtggctgggctgtggtagtgggcataggcagcgagatatccagtggtaacagttgtctgtgctaataattggagcccacacagaccagcaacttgttgaatgccagttttgaccacagaagaatattcgagacctgatgtttggactgaggtacctgtacttcttgggtgtgacagcaccggctgttgctggctttcagaggaagcattgatttctcattgaccagggtttgttcttggtagggtttttctttttcttttttaaataaacatgtatttatttttttaaaaaaaaaaaaaaaaaaaaaaaaaaa

SEQ ID NO: 4417 - protein, 619 aa, Homo sapien
MAAAPPLSKAEYLKRYLSGADAGVDRGSESGRKRRKKRPKPGGAGGKGMRIVDDDVSWTAISTTKLEKEEEEDDGDLPVVAEFVDERPEEVKQMEAFRSSAKWKLLGGHNEDLPSNRHFRHDTPDSSPRRVRHGTPDPSPRKDRHDTPDPSPRRARHDTPDPSPLRGARHDSDTSPPRRIRHDSSDTSPPRRARHDSPDPSPPRRPQHNSSGASPRRVRHDSPDPSPPRRARHGSSDISSPRRVHNNSPDTSRRTLGSSDTQQLRRARHDSPDLAPNVTYSLPRTKSGKAPERASSKTSPHWKESGASHLSFPKNSKYEYDPDISPPRKKQAKSHFGDKKQLDSKGDCQKATDSDLSSPRHKQSPGHQDSDSDLSPPRNRPRHRSSDSDLSPPRRRQRTKSSDSDLSPPRRSQPPGKKAAHMYSGAKTGLVLTDIQREQQELKEQDQETMAFEAEFQYAETVFRDKSGRKRNLKLERLEQRRKAEKDSERDELYAQWGKGLAQSRQQQQNVEDAMKEMQKPLARYIDDEDLDRMLREQEREGDPMANFIKKNKAKENKNKKVRPRYSGPAPPPNRFNIWPGYRWDGVDRSNGFEQKRFARLASKKAVEELAYKWSVEDM

SEQ ID NO: 4418 - DNA, 728 bp, Homo sapien
cctcgccccgcctacgcgggaacccaaccgcggcgaccggacgtgcactcctccagtagcggctgcacgtcgtgcaatggcccgctatgaggaggtgagcgtgtccggcttcgaggagttccaccgggccgtggaacagcacaatggcaagaccattttcgcctactttacgggttctaaggacgccggggggaaaagctggtgccccgactgcgtgcaggctgaaccagtcgtacgagaggggctgaagcacattagtgaaggatgtgtgttcatctactgccaagtaggagaaaagccttattggaaagatccaaataatgacttcagaaaaaacttgaaagtaacagcagtgcctacactacttaagtatggaacacctcaaaaactggtagaatctgagtgtcttcaggccaacctggtggaaatgttgttctctgaagattaagattttaggatggcaatcatgtcttgatgtcctgatttgttctagtatcaataaactgtatacttgctttgaattcatgttagcaataaatgatgttaaaaaaactggcatgtgtctaaacaatagagtgctattaaaatgcccatgaacctttagtttgcctgtaatacatggatatttttaagatataaagaagtcttcagaaatagcagtaaaggctcaaaggaacgtgattcttgaaggtgacggtaatacctaaaaactcctaaaggtgcagagc

SEQ ID NO: 4419 - protein, 123 aa, Homo sapien
MARYEEVSVSGFEEFHRAVEQHNGKTIFAYFTGSKDAGGKSWCPDCVQAEPVVREGLKHISEGCVFIYCQVGEKPYWKDPNNDFRKNLKVTAVPTLLKYGTPQKLVESECLQANLVEMLFSED

SEQ ID NO: 4420 - DNA, 2632 bp, Homo sapien
ggcggctgagcctgagcggggatgtagaggcggcggcagcagaggcggcactggcggcaagagcagacgcccgagccgagcgagaagagcggcagagccttatcccctgaagccgggccccgcgtcccagccctgcccagcccgcgcccagccatgcgcgccgcctgctgagtccgggcgccgcacgctgagccctccgcccgcgagccgcgctcagctcgggggtgattagttgctttttgttgttttttaatttgggccgcggggagggggaggaggggcaggtgctgcaggctcccccccctccccgcctcgggccagccgcggcggcgcgactcgggctccggacccgggcactgctggcggctggagcggagcgcaccgcggcggtggtgcccagagcggagcgcagctccctgccccgcccctccccctcggcctcgcggcgacggcggcggtggcggcttggacgactcggagagccgagtgaagacatttccacctggacacctgaccatgtgcctgccctgagcagcgaggcccaccaggcatctctgttgtgggcagcagggccaggtcctggtctgtggaccctcggcagttggcaggctccctctgcagtggggtctgggcctcggccccaccatgtcgagcctcggcggtggctcccaggatgccggcggcagtagcagcagcagcaccaatggcagcggtggcagtggcagcagtggcccaaaggcaggagcagcagacaagagtgcagtggtggctgccgccgcaccagcctcagtggcagatgacacaccaccccccgagcgtcggaacaagagcggtatcatcagtgagcccctcaacaagagcctgcgccgctcccgcccgctctcccactactcttcttttggcagcagtggtggtagtggcggtggcagcatgatgggcggagagtctgctgacaaggccactgcggctgcagccgctgcctccctgttggccaatgggcatgacctggcggcggccatggcggtggacaaaagcaaccctacctcaaagcacaaaagtggtgctgtggccagcctgctgagcaaggcagagcgggccacggagctggcagccgagggacagctgacgctgcagcagtttgcgcagtccacagagatgctgaagcgcgtggtgcaggagcatctcccgctgatgagcgaggcgggtgctggcctgcctgacatggaggctgtggcaggtgccgaagccctcaatggccagtccgacttcccctacctgggcgctttccccatcaacccaggcctcttcattatgaccccggcaggtgtgttcctggccgagagcgcgctgcacatggcgggcctggctgagtaccccatgcagggagagctggcctctgccatcagctccggcaagaagaagcggaaacgctgcggcatgtgcgcgccctgccggcggcgcatcaactgcgagcagtgcagcagttgtaggaatcgaaagactggccatcagatttgcaaattcagaaaatgtgaggaactcaaaaagaagccttccgctgctctggagaaggtgatgcttccgacgggagccgccttccggtggtttcagtgacggcggcggaacccaaagctgccctctccgtgcaatgtcactgctcgtgtggtctccagcaagggattcgggcgaagacaaacggatgcacccgtctttagaaccaaaaatattctctcacagatttcattcctgtttttatatatatattttttgttgtcgttttaacatctccacgtccctagcataaaaagaaaaagaaaaaaatttaaactgctttttcggaagaacaacaacaaaaaagaggtaaagacgaatctataaagtaccgagacttcctgggcaaagaatggacaatcagtttccttcctgtgtcgatgtcgatgttgtctgtgcaggagatgcagtttttgtgtagagaatgtaaattttctgtaaccttttgaaatctagttactaataagcactactgtaatttagcacagtttaactccaccctcatttaaacttcctttgattctttccgaccatgaaatagtgcatagtttgcctggagaatccactcacgttcataaagagaatgttgatggcgccgtgtagaagccgctctgtatccatccacgcgtgcagagctgccagcagggagctcacagaaggggagggagcaccaggccagctgagctgcacccacagtcccgagactgggatcccccaccccaacagtgattttggaaaaaaaaatgaaagttctgttcgtttatccattgcgatctggggagccccatctcgatatttccaatcctggctacttttcttagagaaaataagtcctttttttctggccttgctaatggcaacagaagaaagggcttctttgcgtggtcccctgctggtgggggtgggtccccagggggccccctgcggcctgggcccccctgcccacggccagcttcctgctgatgaacatgctgtttgtattgttttaggaaaccaggctgttttgtgaataaaacgaatgcatgtttgtgtcacgaaaaaaaaaaaaaaaaaaaaaaaaaaaaaaaaaaaaaaaaaaaaa

SEQ ID NO: 4421 - protein, 227 aa, Homo sapien
MMGGESADKATAAAAAASLLANGHDLAAAMAVDKSNPTSKHKSGAVASLLSKAERATELAAEGQLTLQQFAQSTEMLKRVVQEHLPLMSEAGAGLPDMEAVAGAEALNGQSDFPYLGAFPINPGLFIMTPAGVFLAESALHMAGLAEYPMQGELASAISSGKKKRKRCGMCAPCRRRINCEQCSSCRNRKTGHQICKFRKCEELKKKPSAALEKVMLPTGAAFRWFQ

SEQ ID NO: 4422 - DNA, 1235 bp, Homo sapien
ggcacgagggtcatcgccgcggggcggaggcgacagtgtctagcgggagctccgcgtgtagctacgccggccgcctggctttgagacaacgtgattctccgcagctggtcgcctacccgtgatgttctgcccacgtcgagacctgagctgaaatggcagacgatctcggagacgagtggtgggagaaccagccgactggagcaggcagcagcccagaagcatcagatggtgaaggagaaggagacacagaagtgatgcagcaggagacagttccagttcctgtaccttcagagaaaaccaaacagcctaaagaatgttttttgatacaaccaaaggaaagaaaagagaataccaccaagaccaggaaaagaagaaagaagaaaattactgatgttcttgcaaaatcagaaccaaaaccagggttacctgaagacctacagaagctgatgaaggactattatagcagcagacgcttggtgattgaattagaagaactgaacctgccagactcctgtttcctcaaggccaatgatttgactcacagtctttcctcatacctaaaaggaatttgtcctaagtgggtaaaacttaggaagaaccacagtgagaagaaatcggtcctgatgctgatcatctgcagctcggccgtccgagccctggagctcattaggtcgatgacagcattcagaggagacggcaaagttataaaattatttgcaaagcacataaaggtccaggcgcaggtaaagttgctggagaagcgtgtggtgcacctgggtgtaggaactccggggagaattaaagaacttgttaaacaaggtggccttaatttgagccccttaaaatttctggtttttgactggaactggagagatcagaagttgaggagaatgatggacattcccgagataagaaaggaggtattcgaacttctggaaatgggagtgctcagtctgtgcaagtcagaatccttgaaactgggccttttctaagtctgtgtcctaatgaagattccagttttcacagtagaagttgcatcttatttaatgactctgatacattgcaagcactcagtaaatatcagcaaatagtttatgttaattgtgtcaacagatggatcactggaatgtggggattctgaaacagaaatgaaactgtccttttgacaactctcttatataataaagtatcaccggcttgtgtatgaaaaaaaaaaaaaaaaaaaaaaaaaaaaa

SEQ ID NO: 4423 - protein, 279 aa, Homo sapien
MADDLGDEWWENQPTGAGSSPEASDGEGEGDTEVMQQETVPVPVPSEKTKQPKECFLIQPKERKENTTKTRKRRKKKITDVLAKSEPKPGLPEDLQKLMKDYYSSRRLVIELEELNLPDSCFLKANDLTHSLSSYLKGICPKWVKLRKNHSEKKSVLMLIICSSAVRALELIRSMTAFRGDGKVIKLFAKHIKVQAQVKLLEKRVVHLGVGTPGRIKELVKQGGLNLSPLKFLVFDWNWRDQKLRRMMDIPEIRKEVFELLEMGVLSLCKSESLKLGLF

SEQ ID NO: 4424 - DNA, 1214 bp, Homo sapien; identical to SEQ ID NO: 4343

SEQ ID NO: 4425 - protein, 234 aa, Homo sapien
MAQHGAMGAFRALCGLALLCALSLGQRPTGGPGCGPGRLLLGTGTDARCCRVHTTRCCRDYPGEECCSEWDCMCVQPEFHCGDPCCTTCRHHPCPPGQGVQSQGKFSFGFQCIDCASGTFSGGHEGHCKPWTDCTQFGFLTVFPGNKTHNAVCVPGSPPAEPLGWLTVVLLAVAACVLLLTSAQLGLHIWQLRKTQLLLEVPPSTEDARSCQFPEEERGERSAEEKGRLGDLWV

SEQ ID NO: 4426 - DNA, 3562 bp, Homo sapien
cagaaccagaaggtgaagtcgggccccctaagatcaacggagaggcccagccgtggctgtccacatccacagaggggctcaagatccccatgactcctacatcctcttttgtgtctccgccaccacccactgcctcacctcattccaaccggaccacaccgcctgaagcggcccagaatggccagtcccccatggcagccctgatcttagtagcagacaatgcagggggcagtcatgcctcaaaagatgccaaccaggttcactccactaccaggaggaatagcaacagtccgccctctccgtcctctatgaaccaaagaaggctgggccccagagaggtggggggccagggagcaggcaacacaggaggactggagccagtgcaccctgccagcctcccggactcctctctggcaaccagtgccccgctgtgctgcaccctctgccacgagcggctggaggacacccattttgtgcagtgcccgtccgtcccttcgcacaagttctgcttcccttgctccagacaaagcatcaaacagcagggagctagtggagaggtctattgtcccagtggggaaaaatgccctcttgtgggctccaatgtcccctgggcctttatgcaaggggaaattgcaaccatccttgctggagatgtgaaagtgaaaaaagagagagactcgtgacttttccggtttcagaaaaacccaatgattacccttaattaaaactgcttgaattgtatatatatctccatatatatatatatccaagacaagggaaatgtagacttcataaacatggctgtataattttgattttttttgaatacattgtgtttctatattttttttgacgacaaaaggtatgtacttataaagacatttttttcttttgttaacgttattagcatatctttgtgctttattatcctggtgacagttaccgttctatgtaggctgtgacttgcgctgcttttttagagcacttggcaaatcagaaatgcttctagctgtatttgtatgcacttattttaaaaagaaaaaagccaaatacattttctgacattgtaagattgccttactgtctgtcattccttattgctggcccctttctcaggccggaggccaagtggtggagaaggaaaggaaatgatcgaacgggcatgttgtcaagtgggcatgccactgggaaataccaccagtttaccctgaaacattgtcctcagaggagtaggaaagtggattttgaatctctattttgctcaaaagttcagttcctgagatactgatgactgagagtgctgctgggaaattttcaggattgtgtggtcttttggggttttttgtttttttttttttaagacaaagttgaccgctgttcactgtccacgtgatcagttgtaagattacaatgctgcatgctagttggttacataagatacaattccagtgatggaaggcggttataatggatggtggtgtgtacaagatggcactgccatctttgagcagagcccagctctgcagcgccacttcatctttttaaacaccctagaggtctgtttgttgttgctgttgtcctttattttgaaagagttgcaagagaagttacagtccaggtgaacttggagattgtgggattggttttgtttctgttttgttttgtttatcatttacctgtagtgctattgctgttgatactatcacctataccctgtttctagtgagtgctgaatacagtatggtacaatgacagtaacagccgcgtggtgctgccaggactgcccttgggcatatcagtgacagcccaaatgtgggtggaggaaacctgtaatttccttcttaacatgtgtttgaaataccaagtgaataatactgttctggaaaaaaatgataaactagtggaaattaaagaaattaagggttttatataatagacaggccccacctctcaaaatatttttagaagtctttttgtaaactaatttcttttgatcactattttgcatcagtaaaatgatttttttaaaaccaataaatcatcaattattagaaatagttgtctcacagtgatactggtttttcttttgtgctgttatgatttaacattgacaggaacactattttaaatccttacgttcaggtgtttgtaacttggccttataattaggctgaattatggcttcaaggtctacaatttatgtgtatggttcacagcctagcttctatttacatttgaaaatacagatttttaccaactttggattcttttttagttatatgtttgtctttcctttttaaattgttcaaaactattttttaatggtcaagttactaacacttgaaaatcagatactgcaccaaatacagtgtttttccgtagtgtttttaatgagtgcacctattactactgtgcgagaattcatgttttaccagtcattgttatattacaaacagacttgcatgattaaccagttgttacacttactttttcaagttggagtatatatgactcagtgcagactggtctctcttatgtgaatgcacacatgcagaaatgcagagtcaattttacatgcccataaagacatttgtaaagaattcagctcttatggtctgttgtataaatgtgtatctaggcactttggaatttgacctcacagatgttacaacttgatcagtcgtttgacctaatttgtggtagctatctgtatgttttgcaatcttaatacagacatgctttccaaaaagattaatacagaaccatcctgccgttttggataagtctatccagctgtggaaagggcaacctgtggtttctctgtactggtgtttaatgggggaagaatatgaacagctttaaagagctgtgtattgtggttactactattaaaaaataagatctgcacgagtctgactggcctttgggtggcctttgtggacggctcgtagctggaaagtgttgatctgggttttctggcattcttttaagttaaaaagttaacatcgggacatgggtttgatcttttgttgtacctgatgacagtgcagagattctccacagctggataaaaatgtcacaaagctacttactgtacatgggcagtatcagatttcaaatcctaatatttcagctgtgcttttaatactcaaaatattaggggatggggtgttgaagctttcccttttttgcttttaacaatttatagaatttaacagatgtactgtctttcatgtggcctcacatttaaagttatgagaacatacacatggtttacaacttttactatatacctttccttggccaccaagtattttaaaagtgtgccaccttttaacctttactttttttaagttgaaggtgatactttttctatatatgatgaaactcatgtcaactgaagtgagtgtaatctcagataccaacattattatattttaaaatcacgctatggaaatatcacctgaattctgtcatttgtcagatttacagtacctttttttctttaacttttagcattaaataaaaataaaattgggagcactgaaaaaaaaaaaaaaaa

SEQ ID NO: 4427 - DNA, 4028 bp, Homo sapien
ggaagctcgtatttacattttaagtgtatctggtgagtgggctggagccctcgtctgggccggaaaaaaaaaagccctccgatccgtcttttagttgcttctcttccttttttctctccggtttctcatcactccaaccagccgcgaccatgcccaggaagaaggcggcggcggcggcctgggaggagccgagctcgggcaacggcactgcccgcgccgggcccaggaaacgcggcggcccggcgggcaggaagcgcgagcggcccgagcgctgcagtagcagcagcggcggcggcagcagcggcgacgaggacggcctggagctcgacggggcccccggcgggggcaagcgcgcggcgcggccggcgacagcaggcaaggcgggcggcgcggccgtggtcatcaccgaacccgagcacaccaaggagcgcgtcaaacttgaagggtcaaagtgcaaagggcagcttttgatttttggggcaaccaactgggacttgattggtcgaaaagaagtgcctaaacagcaagctgcttaccgcaatctcggtcagaatttgtgggggccccacagatatgggtgcctggcgggggtccgggtgcggacagtggtctcgggctcgtgtgctgcacacagcctcctcatcaccacggaagggaagctgtggagctggggtcgaaatgagaaggggcagctgggacatggtgacaccaagagagtagaagcccctagactcatcgagggtcttagccacgaagtgattgtgtctgcagcatgtgggcggaaccacaccttggccttgacggaaacgggctccgtgtttgcgtttggggaaaacaagatggggcagctgggccttggcaaccagacagacgctgttcccagccccgcgcagataatgtacaacggccagccaattaccaaaatggcctgtggggctgaattcagtatgataatggactgcaaaggaaacctctattcctttgggtgccctgaatatggtcagctgggacacaactcagatgggaagttcatcgcccgggcacagcggatagagtacgactgtgaactagttccccggcgagtggccatcttcattgagaagacgaaagatggacagattctgcctgtaccaaacgtggttgtacgagacgtggcctgtggcgctaaccacacgctggtcctggactcccagaagcgagtcttctcctggggctttggtggctatggccggctgggccacgcagagcagaaggatgagatggtcccccgcctggtgaagctgtttgacttccctgggcgtggggcttcccagatctatgctggttacacctgctcctttgctgtcagtgaagtgggtggtctgtttttctggggggccaccaacacctcccgtgaatctaccatgtacccaaaagcagtgcaggacctctgcggctggagaattcggagcctggcttgtgggaagagcagcatcattgtggccgccgatgagagcaccatcagctggggtccgtcaccgacctttggggaactgggctacggggaccacaagcccaagtcttccactgcagcccaggaggtaaagactctggatggcattttctcagagcaggtcgccatgggctactcacactccttggtgatagcaagagatgaaagtgagactgagaaagagaagatcaagaaactgccagaatacaacccccgaaccctctgatgctcccggagactcctccgactccacacctctcgcggcagctgtcatttccatgtgcactgggacgggaagtcaaacgaggaatttaaaaaagcaaaagttgaccgaaggtgcatttttgtttagactccctgaggttccgttttacacatgatccaacgttaactacctttttttctgtatgctttccaaagtccttttttttcccttaatgttgaattaaaatacttgctcatagttgatttaccattcctacaaaagaggcagaaactttgagcaatctaggtttttttttttttttttaagttttttctttcttcctttcctgaatacactccccaaaacacccctttccagttacaattagcatcgtgatccaagcagatgccacatggaagaggaatcgccatttactcagaaaaaatgtcccttacaggaaccggcagcagctaggcagtcaccggcccgcctccatccaaaatcacgctcgcgtgcttcggaagcatccgggtcactccttctccgctttttcttgcagatgggcctaggccggtgtcggttctgtttctccccttggctgcctgtacgcccacagccttctggctgcgacattatagaatcggccgtgtcccccctggtgggggattggggatctgtgtttagccatttatatctactttagctgttaaagaggtccaaatgaaaatcaggtgattgtggaaccatggggacttgggggtggggcagaggtgggaacatttgtatcagttgagtcagcttggtggctccctgtggagccagggctgagccttgtcacgcgcactcgccaattaagagatggaccagccagcagtcaagtgcattctccagtccttgcaagaaggatcagccctttctgtgccagcctcgatcgccttgtgctttggtctctttttctcccccccgcctggatcctgcctcgcgcgggccgtcctgttgctgagactcggggtaccgttctgctgacccagctccctttagtcacgtttgcttggctctggtaccaaatagttgggattaccgaagagtccccttccttgcgtgtcagcacggatgctgtgactgccacctgcgtcctcgtcaagtgcccgagctcgccgccgtgtgtgctgcgctgagtgagttatgaggtgcctttcccggaaccctcctctcgcctggacccaagagaggcgacagctgtggctggggctcttggtttccagagggtctggactggtttgggtgctttaaaatagatatttagttcagtggtgcttatgggggagatgggactagaacttaagtgtgagacttgggtggatgggaaagttaaatattggtctcttcaagttttttttttcttttgctttgttaccacttgtcactgtctccatgttaaaatgccaaaaatgatgtagttgttgttgcttttttccctattttccaccccagtcgctccttaccgtgactcctgcccttggagggcatgtagcagtgtctgtcctgccagtcccaaggccctgtgggaggagactggcctgcatctctctaagacttagtctgacgccacgcgcatctcttgttctgtgttcaatcagtagtccaggggagaagcttctgctacttcagagctttgctaaactaacctaatttgtccaaatcaccccaaaaccaccatctctgacgtaagcttccatgcgacagcctgatccgtttccctggacaggtctctttcctggaatgcagcccaggcacctgtgctcctggcacccttgaggtctctcctttgagccgtggtcaccgagagggttgaggacgcagcacccgaggtcccagcctttgcaggagcctccctgggcttagctggacttagatcttcggtggcctcatgtaaacgtggcagccagcctcttctagaaccctagcccagggactggagcaggaaagggaccttcaaagtgaagactgccttgtcccgcagctccttctggcttagattgaaacatgggcttcctaatgggttaaatcctttaaaacaaggagttgtgggggaagggtgtcgtgcactcctagagaaaggtacacagttgcccggttgggaatgtgcttggcgctgaccctgcgggcatctgactggtcttccagctcaggaaaaagaatttgaaagaggcttagcgtgaaggggaatcaaagaggaggttgtgatttggtcgaaggtgcctggtttagtgctgtaattgtcttattattttttttatatatatatttcttggagtaaacattttaaat

SEQ ID NO: 4428 - DNA, 1233 bp, Homo sapien
atccgctattgtgcatataatattggggaccagtcagccatcaatgaactcatgcagatgagattgaggtctgggggcactgagggtctcttggctgaaaaattggaggctttgatcactcagactcgagccaaacaggcagctaccatgagtgaagtggagtggagagggagaacggttccagtgaagattgacaaagtgcgcattttcttattaggactggctgataacgaagcagctattgtccaggctgaaagcgaagaaactaaggagcgcctgtttgaatcaatgctcagcgagtgtcgggacgccatccaggtggttcgggaggagctcaagccagatcagaaacagagagattatatccttgaaggagagccagggaaggtgtctaatcttcaatacttgcatagctacctgacttacatcaagctatcaacggcaatcaagcgtaatgagaacatggccaaaggtctgcagagggctctgctgcagcagcagccagaggatgacagcaagcgctcaccccggccccaggacctgatccgactctatgacatcatcttacagaatctggtggaattgctccagcttcctggtttagaggaagacaaagccttccagaaagagataggcctcaagactctggtgttcaaagcttacaggtgttttttcattgctcagtcctatgtgctggtgaagaagtggagcgaagcccttgtcctgtatgacagagtcctgaaatatgcaaatgaagtaaattctgatgctggcgccttcaagaacagcctaaaggacctgcctgatgtgcaagagctcatcactcaagtgcggtcagagaagtgctccctgcaggccgcagccatccttgatgcaaacgacgctcatcaaacagagacctcctcctcccaagtcaaggacaataagcctctggttgaacggtttgagtccacaccaggcacagatggggccttgaaacgctttgtcatgcttcttcagtaccatggatttgaaatgaactcatccttgctgtgagcatccaggagcccttgagaagtttatctatgactatgaaactggcaacgtcaccccagaattacggtcagccttattccccttcacctcccagtgaacgcgaagtttcagacaagcagagagctctatttttagaagaaatatgttacactcagaaatgatgaaaccaaatcttatattaaaaggcaaagatgacgg

SEQ ID NO: 4429 - protein, 327 aa, Homo sapien
MQMRLRSGGTEGLLAEKLEALITQTRAKQAATMSEVEWRGRTVPVKIDKVRIFLLGLADNEAAIVQAESEETKERLFESMLSECRDAIQVVREELKPDQKQRDYILEGEPGKVSNLQYLHSYLTYIKLSTAIKRNENMAKGLQRALLQQQPEDDSKRSPRPQDLIRLYDIILQNLVELLQLPGLEEDKAFQKEIGLKTLVFKAYRCFFIAQSYVLVKKWSEALVLYDRVLKYANEVNSDAGAFKNSLKDLPDVQELITQVRSEKCSLQAAAILDANDAHQTETSSSQVKDNKPLVERFESTPGTDGALKRFVMLLQYHGFEMNSSLL

SEQ ID NO: 4430 - DNA, 1634 bp, Homo sapien
ggcacgaggaacccttcctgttgccttaggggaacgtggctttccctgcagagccggtgtctccgcctgcgtccctgctgcagcaaccggagctggagtcggatcccgaacgcaccctcgccatggactcggccctcagcgatccgcataacggcagtgccgaggcaggcggccccaccaacagcactacgcggccgccttccacgcccgagggcatcgcgctggcctacggcagcctcctgctcatggcgctgctgcccatcttcttcggcgccctgcgctccgtacgctgcgcccgcggcaagaatgcttcagacatgcctgaaacaatcaccagccgggatgccgcccgcttccccatcatcgccagctgcacactcttggggctctacctctttttcaaaatattctcccaggagtacatcaacctcctgctgtccatgtatttcttcgtgctgggaatcctggccctgtcccacaccatcagccccttcatgaataagttttttccagccagctttccaaatcgacagtaccagctgctcttcacacagggttctggggaaaacaaggaagagatcatcaattatgaatttgacaccaaggacctggtgtgcctgggcctgagcagcatcgttggcgtctggtacctgctgaggaagcactggattgccaacaacctttttggcctggccttctcccttaatggagtagagctcctgcacctcaacaatgtcagcactggctgcatcctgctgggcggactcttcatctacgatgtcttctgggtatttggcaccaatgtgatggtgacagtggccaagttcttcgaggcaccaataaaattggtgtttccccaggatctgctggagaaaggcctcgaagcaaacaactttgccatgctgggacttggagatgtcgtcattccagggatcttcattgccttgctgctgcgctttgacatcagcttgaagaagaatacccacacctacttctacaccagctttgcagcctacatcttcggcctgggccttaccatcttcatcatgcacatcttcaagcatgctcagcctgccctcctatacctggtccccgcctgcatcggttttcctgtcctggtggcgctggccaagggagaagtgacagagatgttcagttatgaggagtcaaatcctaaggatccagcggcagtgacagaatccaaagagggaacagaggcatcagcatcgaaggggctggagaagaaagagaaatgatgcagctggtgcccgagcctctcagggccagaccagacagatgggggctgggcccacacaggcgtgcaccggtagagggcacaggaggccaagggcagctccaggacagggcagggggcagcaggatacctccagccaggcctctgtggcctctgtttccttctccctttcttggccctcctctgctcctccccacaccctgcaggcaaaagaaacccccagcttcccccctccccgggagccaggtgggaaaagtgggtgtgatttttagattttgtattgtggactgattttgcctcacattaaaaactcatcccatggccaaaaaaaaaaaaaaaaaaaaaaaaaaaaaaaaaaaaaaaaaaaaaaaaaaaaaaa

SEQ ID NO: 4431 - protein, 377 aa, Homo sapien
MDSALSDPHNGSAEAGGPTNSTTRPPSTPEGIALAYGSLLLMALLPIFFGALRSVRCARGKNASDMPETITSRDAARFPIIASCTLLGLYLFFKIFSQEYINLLLSMYFFVLGILALSHTISPFMNKFFPASFPNRQYQLLFTQGSGENKEEIINYEFDTKDLVCLGLSSIVGVWYLLRKHWIANNLFGLAFSLNGVELLHLNNVSTGCILLGGLFIYDVFWVFGTNVMVTVAKFFEAPIKLVFPQDLLEKGLEANNFAMLGLGDVVIPGIFIALLLRFDISLKKNTHTYFYTSFAAYIFGLGLTIFIMHIFKHAQPALLYLVPACIGFPVLVALAKGEVTEMFSYEESNPKDPAAVTESKEGTEASASKGLEKKEK

SEQ ID NO: 4432 - DNA, 753 bp, Homo sapien
attttccgggaagatggcggcgcacaagtcaggtccggcacatgtttccgcggagcggacccagcaatgacggatgatatcacctcttcttctctggtgagagtctgaggatagagacttttttctcaccatgaatgtcaccccagaggtcaagagtcgtgggatgaagtttgctgaggagcagctgctaaagcatggatggactcaaggcaaaggcctcggccggaaggagaatggtatcactcaggctctcagggtgacactgaagcaagacactcatggggtaggacatgaccctgccaaggagttcacaaaccactggtggaatgagctcttcaacaagactgcggccaacttggtagtggaaactgggcaggatggagtacagataaggagcctttctaaggagaccacccgttataatcatcccaagcccaacttgctgtatcagaagtttgtgaagatggccacattgacttcaggtggagagaagccaaacaaagacttggagagctgcagtgatgacgacaaccaggggtccaagtccccaaagattctgactgatgagatgctgctccaagcctgtgaggggcgaacagcacacaaggctgcccgtcttgggatcacaatgaaggccaagcttgctcgcctagaggcccaggagcaggccttcctggctcgtctcaaaggccaggaccctggggcccctcaactgcagtcagagagcaagccccccaaaaaaaaaaaaaaaaa

SEQ ID NO: 4433 - protein, 207 aa, Homo sapien
MNVTPEVKSRGMKFAEEQLLKHGWTQGKGLGRKENGITQALRVTLKQDTHGVGHDPAKEFTNHWWNELFNKTAANLVVETGQDGVQIRSLSKETTRYNHPKPNLLYQKFVKMATLTSGGEKPNKDLESCSDDDNQGSKSPKILTDEMLLQACEGRTAHKAARLGITMKAKLARLEAQEQAFLARLKGQDPGAPQLQSESKPPKKKKK

SEQ ID NO: 4434 - DNA, 3324 bp, Homo sapien
ggcccagaacattgcggatcgggtcggcgccattttgggactgagactggttgtgggggagggaaaagcggcaaaaggggattattcaaagtaccgaaaaccttctcccgggatcaggcgcggcggcacccccaggccaggggcacctctggtggggcagaaggtgattgaattactcagatatgaagatcatcatctaggttttgtgtaaaaggccctggatattttaagtggccattttggatttacagtgtttttggataattttgccccagaagtttattaaaattggcaagaatcgtctgtgaagtgaattgatagtagtgaacaattcagcaagctacttaaaaagagacccaggcagcatttcttcagtattttggttcaaacggattatataactggttacagtatttcagctggtggtaatttttgcctccccttcccccaccccgttgttggggttcttcagccgaaactgagagacgttgatttgtgtactgagtagtttcagcagtttcaaatgactgagtattgctgaagtttcatggcagtttatttttacctttattgaaagttttaggaatttttgacttcagctctttcatgtcacaatgggacactttttctgaatgaagagattgaaagaatacagagtttttttccttttatcttttatttacgtggaaatttaagatgttgcagttttccggcagcatggtagtattgagatagctatgtgtgtctctgtatatgctgatgtttaggaatgctcttcagatgtgaaattttctttttgtttttgctttttggctcgtaaattggatatttcatctggagtggacaagtacaacagtggcaagtacatggaataataaagaagactttgatcttaaatctaaagaacttggctaattcgggagatagccatatgaaaactttaaaacagaagtatgggtagctgacttgaagtaactctatgtcaaatagtcgtaggttaagtatcttcaaagaacttcgatattatttcagaggatacaaaataaaaatacaaactggaaaataaagattacagagaaaaaaccaacaccttcctgtgcagtcctgttggaattttcgtcattgaattttgagaagcattctgaaaactttgcatggacagagaatcgttatgatgtgaaccgtcgacgacacaactcttcagatggctttgattctgctattggacgtcctaatggaggtaactttggaaggaaagaaaaaaatggatggcgtacacatggaagaaatggtacagaaaacataaatcatcgaggtggataccatggtggaagttcccgttctcgtagcagtattttccatgcaggaaaaagccaaggactacatgaaaacaacatacctgacaatgaaaccgggaggaaagaagacaagagagaacgcaaacagtttgaagctgaggattttccgtctttaaatcctgagtatgagagagaaccaaatcacaataagtctttagctgcaggtgtgtgggaatatcctccgaatcctaaatctagagctccaaggatgctggtcattaagaaaggtaatacaaaagacttacagctatctggattcccagtagtaggaaatcttccgtcacagccagttaagaatggaactggtccaagtgtttataaaggtttagtccctaaacctgctgctccacctacaaaacctacacaatggaaaagccaaacaaaagaaaataaagttggaacttctttccctcatgagtccacatttggcgttggcaactttaatgcttttaaatcaactgccaagaactttagtccatctacaaattcagtgaaagagtgtaatcgctcaaattcctcttctcctgttgacaaacttaatcagcagcctcgtctaaccaaactgacacgaatgcgcactgataagaagagtgaatttttgaaagcattgaaaagagacagagtagaagaggaacatgaagatgaaagccgtgctggctcagagaaggatgacgactcatttaatttacataacagcaatagtactcaccaagaaagggatataaaccgaaacttcgatgaaaatgaaattcctcaagagaatggcaatgcctcagtgatttcccagcagatcattcggtcttcaaccttcccacaaactgatgttctttcaagttcacttgaggcagaacacagattgttaaaggaaatgggctggcaggaagacagtgaaaatgatgaaacatgtgctcccttaactgaggatgaaatgagagaattccaagttattagtgaacagttacagaagaatggtctgagaaaaaatggtattttgaaaaatggcttgatctgtgacttcaagtttggaccgtggaagaacagcactttcaaacccacaactgagaatgatgacacagagacaagtagcagtgatacatcagatgacgacgatgtgtgaaggatttcctaacagctttagaaatcttagtgtgatacatctctcatacagtttggggtgaattgtaaaaatgaagaactataatttatgtagtgaaataccccattagaagaggattttttgggggacttcaatatgaagaaaaccaagaatgttttgttgggctgtgttgaacattatttctttgtaaatgaatgttgtaggaatgaggacttgggttggtccaacattgactttcttcatcactgcaacatttctctgactagcaatgtgacgatgtaacaaatgagattttctcatttaataataaaaaattgtgtaatgttttgcaaagcttctgtcttaaaatgtccaggtcttaagaaaaaaagcagcttacactgttttgcttgcagagtcatatctttttcgtacaatggaaatcctcaagtccactttgtgcggtctccctctccttcccccaaaaaacaacaacaacaaaacaaaaaccaaaaaggaaaatgtagcatgttggctaaaactggagcaaagtgcactaaaacaatttcctgaactcacctgttgtactattcaccttttaaaccataaattgctctttagccatttgtagtgcagtaaatgttacaggaaaagacttggcacattttcttccaaatttcaagaggtgattttcaaaagctttattggggtatgttgtcagaccagggttttcagagttgatggaaaagagtcttgtgagaaaacttattttgataaattattacacacgcagaaaaactgatcacactgactggatctgtccacgacatggaaaataaactggattttcaaaaaaaaaaaaaaaaaaag

SEQ ID NO: 4435 - protein, 492 aa, Homo sapien
VKYLQRTSILFQRIQNKNTNWKIKITEKKPTPSCAVLLEFSSLNFEKHSENFAWTENRYDVNRRRHNSSDGFDSAIGRPNGGNFGRKEKNGWRTHGRNGTENINHRGGYHGGSSRSRSSIFHAGKSQGLHENNIPDNETGRKEDKRERKQFEAEDFPSLNPEYEREPNHNKSLAAGVWEYPPNPKSRAPRMLVIKKGNTKDLQLSGFPVVGNLPSQPVKNGTGPSVYKGLVPKPAAPPTKPTQWKSQTKENKVGTSFPHESTFGVGNFNAFKSTAKNFSPSTNSVKECNRSNSSSPVDKLNQQPRLTKLTRMRTDKKSEFLKALKRDRVEEEHEDESRAGSEKDDDSFNLHNSNSTHQERDINRNFDENEIPQENGNASVISQQIIRSSTFPQTDVLSSSLEAEHRLLKEMGWQEDSENDETCAPLTEDEMREFQVISEQLQKNGLRKNGILKNGLICDFKFGPWKNSTFKPTTENDDTETSSSDTSDDDDV

SEQ ID NO: 4436 - DNA, 4692 bp, Homo sapien
gtggacccagggtggggaactacctcttcctctccacgcggttgagaagaccggtcggcctgggcaacctgcgctgaagatgccgggaaaactccgtagtgacgctggtttggaatcagacaccgcaatgaaaaaaggggagacactgcgaaagcaaaccgaggagaaagagaaaaaagagaagccaaaatctgataagactgaagagatagcagaagaggaagaaactgttttccccaaagctaaacaagttaaaaagaaagcagagccttctgaagttgacatgaattctcctaaatccaaaaaggcaaaaaagaaagaggagccatctcaaaatgacatttctcctaaaaccaaaagtttgagaaagaaaaaggagcccattgaaaagaaagtggtttcttctaaaaccaaaaaagtgacaaaaaatgaggagccttctgaggaagaaatagatgctcctaagcccaagaagatgaagaaagaaaaggaaatgaatggagaaactagagagaaaagccccaaactgaagaatggatttcctcatcctgaaccggactgtaaccccagtgaagctgccagtgaagaaagtaacagtgagatagagcaggaaatacctgtggaacaaaaagaaggcgctttctctaattttcccatatctgaagaaactattaaacttctcaaaggccgaggagtgaccttcctatttcctatacaagcaaagacattccatcatgtttacagcgggaaggacttaattgcacaggcacggacaggaactgggaagacattctcctttgccatccctttgattgagaaacttcatggggaactgcaagacaggaagagaggccgtgcccctcaggtactggttcttgcacctacaagagagttggcaaatcaagtaagcaaagacttcagtgacatcacaaaaaagctgtcagtggcttgtttttatggtggaactccctatggaggtcaatttgaacgcatgaggaatgggattgatatcctggttggaacaccaggtcgtatcaaagaccacatacagaatggcaaactagatctcaccaaacttaagcatgttgtcctggatgaagtggaccagatgttggatatgggatttgctgatcaagtggaagagattttaagtgtggcatacaagaaagattctgaagacaatccccaaacattgcttttttctgcaacttgccctcattgggtatttaatgttgccaagaaatacatgaaatctacatatgaacaggtggacctgattggtaaaaagactcagaaaacggcaataactgtggagcatctggctattaagtgccactggactcagagggcagcagttattggggatgtcatccgagtatatagtggtcatcaaggacgcactatcatcttttgtgaaaccaagaaagaagcccaggagctgtcccagaattcagctataaagcaggatgctcagtccttgcatggagacattccacagaagcaaagggaaatcaccctgaaaggttttagaaatggtagttttggagttttggtggcaaccaatgttgctgcacgtgggttagacatccctgaggttgatttggttatacaaagctctccaccaaaggatgtagagtcctacattcatcgatccgggcggacaggcagagctggaaggacgggggtgtgcatctgcttttatcagcacaaggaagaatatcagttagtacaagtggagcaaaaagcgggaattaagttcaaacgaataggtgttccttctgcaacagaaataataaaagcttccagcaaagatgccatcaggcttttggattccgtgcctcccactgccattagtcacttcaaacaatcagctgagaagctgatagaggagaagggagctgtggaagctctggcagcagcactggcccatatttcaggtgccacgtccgtagaccagcgctccttgatcaactcaaatgtgggttttgtgaccatgatcttgcagtgctcaattgaaatgccaaatattagttatgcttggaaagaacttaaagagcagctgggcgaggagattgattccaaagtgaagggaatggtttttctcaaaggaaagctgggtgtttgctttgatgtacctaccgcatcagtaacagaaatacaggagaaatggcatgattcacgacgctggcagctctctgtggccacagagcaaccagaactggaaggaccacgggaaggatatggaggcttcaggggacagcgggaaggcagtcgaggcttcaggggacagcgggacggaaacagaagattcagaggacagcgggaaggcagtagaggcccgagaggacagcgatcaggaggtggcaacaaaagtaacagatcccaaaacaaaggccagaagcggagtttcagtaaagcatttggtcaataattagaaatagaagatttatatagcaaaaagagaatgatgtttggcaatatagaactgaacattatttttcatgcaaagttaaaagcacattgtgcctccttttgaccacttgccaagtccctgtctctttcagacacagacaagcttcatttaaattatttcatctgatcattatcatttataactttattgttacttcttcatcagtttttccttttgaaaggtgtatgaattcattacatttttattctaatgtattatctgtagattagaagataaaatcaagcatgtatctgcctatactttgtgagttcacctgtctttatactcaaaagtgtcccttaatagtgtccttccctgaaataaatacctaagggagtgtaacagtctctggaggaccactttgagcctttggaagttaaggtttcctcagccacctgccgaacagtttctcatgtggtcctattatttgtctactgagacttaatactgagcaatgttttgaaacaagatttcaaactaatctgggttgtaatacagtttataccagtgtatgctctagacttggaagatgtagtatgtttgatgtggattacctatacttatgttcgttttgatacatttttagcttctcattataaggtgattcatgctttagtgaattcttcatagatagtatatataaaagtacattttaatagaaagccagggttttaaggaatttcacatgtataaggtggctccatagctttatttgtaagtaggctggataaatggtgcttaaatggtaatgtactccacttcttcctattggaagattaacattatttaccaagaaggacttaagggagtaaggggcgcagattagcattgctcaagagtatgtaaaaaaaaaaaaaaaaaaaagaaccaaaccactggaaataatcaaatgcaaaaaggtaacaaattcataactggaaagcaaagagaagaacaagtatgatttggatgataaagcattgttttaatggtgaaaacttcacagatcactaatgtttctagaggttaacttcaagtgggcaagctggggtttttaggtagtcagtggcctagttcctaaagccacagtataggatctgttaaactgaatgtctgttgaaagtttgttttagctgcttggaggcttccttttaagacaaactgtatgtgattaagttgttttgagggaactgaagaacctgatgtagcccctggccagataactgcctgatttctcagatattatttctctgggaaacattctacatagcacaggagcttaagagtggcattatcttctcgccttaatttccagagattatttctgtactgagaatcctggaactactatgctaggaaatttaaagctgcatggtctgtcttgttttcatttaattattgtgaatacctagaatctttcttggtcctgatttctcttgcttaatccagtctttatctctaactgccccttatttgatcaccatgtactaggagctctgatagccagctcagctcctaatccttgaggcaacattctttttctatttgaacttcagttctgtccttgaatcccgactagatatttcttgccctctggtctcagaattctcttggcttttattccttgatccacttgccagttttatcactttacccttgttcctcatggcttcccatcaagccatgggtattaggtgacagtgtaatttattagattctggttttgcccaaatactgggcatgctttaataataactgaaccatttcattatttggataggcatgggtaccttatcaagcagattaaaaggatatggtacccgtcctttagaaaagaacagctaaaaccttgttgtggattatggatttagcctaaagaaaaataatctggcataaattaagagtaagagagaagattaatagaaatttcacttcacataacttaaaacatggctatttcaataaaggactaaagtttctcctggatcccagaattcaacctgtatttataaatgtataatgtatttagctactttttggtttaaatgaacttgttgggttagcttggtaaatgttataatttttactgttttctacaaagaaaatattttctaatttaagttggagctatctgtgcagcagtttctctacagttgtgcataaatgtttttactataaaatgagctaatgtataaaatactgctgtataccataataaagatagtaatacttgaaaaaaa

SEQ ID NO: 4437 - protein, 809 aa, Homo sapien
WTQGGELPLPLHAVEKTGRPGQPALKMPGKLRSDAGLESDTAMKKGETLRKQTEEKEKKEKPKSDKTEEIAEEEETVFPKAKQVKKKAEPSEVDMNSPKSKKAKKKEEPSQNDISPKTKSLRKKKEPIEKKVVSSKTKKVTKNEEPSEEEIDAPKPKKMKKEKEMNGETREKSPKLKNGFPHPEPDCNPSEAASEESNSEIEQEIPVEQKEGAFSNFPISEETIKLLKGRGVTFLFPIQAKTFHHVYSGKDLIAQARTGTGKTFSFAIPLIEKLHGELQDRKRGRAPQVLVLAPTRELANQVSKDFSDITKKLSVACFYGGTPYGGQFERMRNGIDILVGTPGRIKDHIQNGKLDLTKLKHVVLDEVDQMLDMGFADQVEEILSVAYKKDSEDNPQTLLFSATCPHWVFNVAKKYMKSTYEQVDLIGKKTQKTAITVEHLAIKCHWTQRAAVIGDVIRVYSGHQGRTIIFCETKKEAQELSQNSAIKQDAQSLHGDIPQKQREITLKGFRNGSFGVLVATNVAARGLDIPEVDLVIQSSPPKDVESYIHRSGRTGRAGRTGVCICFYQHKEEYQLVQVEQKAGIKFKRIGVPSATEIIKASSKDAIRLLDSVPPTAISHFKQSAEKLIEEKGAVEALAAALAHISGATSVDQRSLINSNVGFVTMILQCSIEMPNISYAWKELKEQLGEEIDSKVKGMVFLKGKLGVCFDVPTASVTEIQEKWHDSRRWQLSVATEQPELEGPREGYGGFRGQREGSRGFRGQRDGNRRFRGQREGSRGPRGQRSGGGNKSNRSQNKGQKRSFSKAFGQ

SEQ ID NO: 4438 - DNA, 3026 bp, Homo sapien
cccgggtcagcggcgcgggtgctgcgcctagctgcgcaccatggccgggttgctggcgttgctgggtccggcaggcagggtgggcgcccgggtccggcctcgcgccacctggctcctgggcgccaccgccccctgcgccccgccgctcctggccctggccctgctcccgcccaggctagacgcccggctgctccgcacggcgcgcggggactgccgcggccaccaggaccccagccaggccacggggacaacaggcagcagcgtcagctgcacagaggagaaaaagcaaagcaagtcacagcaactgaaaaagatttttcaagagtatggcactgttggcgtgtcattgcacattggaatctcattaatttccttgggcatattttacatggttgtgtcaagtggtgtggacatgcctgcaatcctgctgaaactcggatttaaagagtccctggtacagtcaaaaatggcagcaggcacaagtaccttcgtggtggcctatgcaatccacaagctgtttgcgccagtgagaatcagcattacgctagtctctgtgcccttgattgtcagatattttcgaaaagtgggattttttaaacctccagctgcaaaaccttaatgaactcttcagtcgtacacactgaaaacctatttcttctaaattacatgatttggattggttttagggttttagggttgtagggtttcttttggagaggtagggggctaattgctatgttctcatggataaactttgccagcaaaaatcaggcttttgaacaattttaattttttgcctcataaattttgtgaatgctattcattatagggcttgtatatataatctaaaatgtcagcaaggcatcggagatgggttaacatctcaaaacaaaatagcctacaaatgttccttgtgggagactttggcgagggtctgtgggtaaaagcaccagggggttaatcttggctcagtttcctaaaaagcattgattaatttaactggmttttaaatatccccttccgctgatatttgttgtcagctgcctacagtttaatatgcagcgttcacaaaacagctgccagtgctacaattaatgaagcaaaacttaatatgtaatcacaatctaaattagcatcaatactttgacattcattacattggtttgggggaagaaaagtagttctggtatgtttcattgatccccagataccttccaatctggacatgatggggctgattccagatggtttttctgaaatttcattaaggtaggtcagcgtcatttgtctctgtttaggtaaaatataaaaaccctgcccagtagcagtggcatcgcttggttcctgatgcccatgttccagaggaattcggataccacaaacagctaagacaatctcagcttttcttagacaatcttctatctcaaacttcagacattccagaattgtcatgatgtttacactgtctgagttaaaaatcctgttcaagaaaaaaaaagattttgtatcacttcttaaaaaggaatattcatagcacttgtcacaaatagaaggcaaccatgagataatacaagccagggagaggcttgtattacatgacaggtgtaattagtctgctgagccagctttacccaatgaagggcatatgtgttagagagattagctaagagtagaaattcgagcatagaggccaggtgcggtggctcacgcctgtaatcccagcactttgggaggttgaggcaggcgtgtcacttgaggccaggagttcgagaccagcctggccaacatgatgaaaccccgtctctactacaaatacaaaaattagccgggtgtggtggcacacgcctgtagtcccagctactggggaggctgaggcagcattgcttgaacccaggaggtggaggttgcagtgagccaagatcacaccactgcactccagcctgggcgacagagggagacactgtctccaaaagaaagaaatcccagcgtagatccaaactgagacactgaggcttcgtccttatagtagtcaggagcaggcgattgaagtaattctgtcctgcggggttcagcatcatgcacgttccccctgggccattctctgatgcagggcacttgctccacactctgggaacccagattcaccagtctgccctgtcacgtagttgaaggagttgcatttatctttctggctcctaattcctttaaaattacatttgttgcagaacctccacaaggctaaataaaattacatttgtgaccatcagagaactgaataaaccattaactggccatcctggttttgcagagatcaggttgttgacagttcctggttgacccacagctacccatgtcagttatctccactaacatatccaagaatctttgtaggacaatttctccacctgcaaggtctttcaggtagaactcttcttttaaggcaattagcccattgccaaaaggttttactgtcttaaagctgtctttctgagatctaattccaaggacttctccacagctaagtgagatgcctcacaccattaggtgatgctttggacagaacagagtattttcatcttgtgtttaaagcaattccttggcttcggctcctcaccactttctatgccagtctcccatttatgtccctagtaatgcctatgcaaaaaaaaaaaaaaaaaaaaagaaaaactgatggtgaaacctacaggtttaagggcttaaatctcaaactttgttaggagtaacaggagcgtgctgagcgggcaagcaataaaacaaatcataccaaaaagccacattgctctctcctaagccccaaccccactccactcctgtggccaggggtccaaacagaaaataaccggagaagacaaggaggtcaaaggatcagggaactaagcattatgtgaattcaccagcaagatgtacagaacgcctgtgtttacattgtttttatggaactagcagaataaaacatctattttaaaaatgaaaaaaaaaaaaaaaaaaaaaaaaaaaaaaaaaaa

SEQ ID NO: 4439 - protein, 192 aa, Homo sapien
MAGLLALLGPAGRVGARVRPRATWLLGATAPCAPPLLALALLPPRLDARLLRTARGDCRGHQDPSQATGTTGSSVSCTEEKKQSKSQQLKKIFQEYGTVGVSLHIGISLISLGIFYMVVSSGVDMPAILLKLGFKESLVQSKMAAGTSTFVVAYAIHKLFAPVRISITLVSVPLIVRYFRKVGFFKPPAAKP

SEQ ID NO: 4440 - DNA, 5742 bp, Homo sapien
gcgcggggctgagccgcccgggatcagcgcgagcacccagcccgcctcggccgggagggcctgagaaccccgggggcgtgctgagcgtggagctgcccgggctgctggcgcagctggcgcggagcttcgcgctgctgctgcccgtgtacgcgctgggctacctggggctcagcttcagctgggttctcctcgcgctcgcgctgctcgcctggtgtcgccgcagccgcggcctcaaggccctgcgcctgtgccgcgcgctggcgctgctggaagacgaggagcgcgtcgtgcgcctgggggtgcgcgcctgcgacctgcccgcctgggttcattttccagacactgaaagagcagaatggctaaataagactgtaaaacacatgtggcctttcatttgccaatttatagagaagttgtttcgagaaactatagaaccagccgtgcggggagcaaacacccaccttagcacctttagtttcacgaaggtcgacgtgggccagcagcccctcaggatcaatggtgttaaggtatacactgaaaatgtagacaaaaggcaaattattttggaccttcagattagttttgtaggaaattgtgagattgatttggagatcaaacgatatttttgtagagctggtgtgaaaagtatccagattcatggtaccatgcgggtgatcctggaaccgttgattggagatatgcccttagttggagctttgtctatcttcttccttaggaaaccacttttagaaattaactggacaggactgacgaatcttctggatgtccctggattgaatggtttatcagatactatcattttggatataatatcaaactatctggtgcttcccaatcgaatcaccgttccacttgtcagtgaagttcaaatagctcagttgcggtttcctgtaccaaagggtgttctaaggatacattttattgaagctcaggatcttcaggggaaagacacttaccttaagggacttgtcaagggaaagtcagacccctatggaatcattagagttggcaaccaaatcttccaaagcagagtcatcaaggagaacctcagtccaaagtggaatgaagtctatgaggctttagtgtatgaacatcctggacaagaattagagattgagctctttgatgaagacccagacaaggatgactttttaggaagtcttatgattgacctcattgaagttgaaaaggagcgccttttagatgaatggttcactctggacgaggttcccaaggggaagctacacttgagactggagtggctcacgttaatgccaaatgcgtcaaacctcgacaaggtgctaacagacatcaaagctgacaaagaccaagccaacgatggtctttcctctgcattgctgatcttgtacttggattcagcaaggaaccttccgtcagggaagaaaataagcagcaacccaaatcctgttgtccagatgtcagttgggcacaaggcccaggagagcaagattcgatacaaaaccaatgaacctgtgtgggaggaaaacttcactttcttcattcacaatcccaagcgccaggaccttgaagttgaggtcagagacgagcagcaccagtgttccctggggaacctgaaggtccccctcagccagctgctcaccagtgaggacatgactgtgagccagcgcttccagctcagtaactcgggtccaaacagcaccatcaagatgaagattgccctgcgggtgctccatctcgaaaagcgagaaaggcctccagaccaccaacactcagctcaagtcaaacgtccctctgtgtccaaagaggggaggaaaacatccatcaaatctcatatgtctgggtctccaggccctggtggcagcaacacagctccatccacaccagtcattgggggcagtgataagcctggtatggaagaaaaggcccagccccctgaggccggccctcaggggctgcacgacctgggcagaagctcctccagcctcctggcctccccaggccacatctcagtcaaggagccgacccccagcatcgcctcggacatctcgctgcccatcgccacccaggagctgcggcaaaggctgaggcagctggaaaacgggacgaccctgggacagtctccactggggcagatccagctgaccatccggcacagctcgcagagaaacaagcttatcgtggtcgtgcatgcctgcagaaacctcattgccttctctgaagacggctctgacccctatgtccgcatgtatttattaccagacaagaggcggtcaggaaggaggaaaacacacgtgtcaaagaaaacattaaatccagtgtttgatcaaagctttgatttcagtgtttcgttaccagaagtccagaggagaacgcttgacgttgccgtgaagaacagtggcggcttcctgtccaaagacaaagggctccttggcaaagtattggttgctctggcatctgaagaacttgccaaaggctggacccagtggtatgacctcacggaagatgggacgaggcctcaggcgatgacatagccgcagcaggcaggaggcgtcctcttcagcgtagctctccacctctacccggaacacaccctctcacagacgtaccaatgttatttttataatttcatggatttagttatacataccttaatagttttataaaattgttgacatttcaggcaaatttggccaatattatcattgaattttctgtgttggatttcctctaggatttcgccagttcctacaacgtgcagtagggcggcggtagctcttgtgtctgtggactctgctcagctgtgtccgtaggagtcggatgtgtctgtgctttattatggccttgtttatatatcactgaggtatactatgccatgtaaatagactattttttataatctttacatgctggtttaaattcagaaggaaatagatcaaggaaatatatatattttcttctaaaacttattaaattcgtgtgacaaataatcattttcatcttggcagcaaaagttctcagtgacctattttgtggtgtttctttttgaaaagaaaagctgaaatattattaaatgctagtatgtttctgcccattatgaaagatgaaataaagtattcaaaatattaacattttcataaatataaggatgtattattgagaagtaagttgaagggcttataaggaaaaatgttttataactgagtaatatattaagagaattgtcatggttcataaatcacattatgctaatctgaaatttcttacataaaaatgaagtgtcttatgtttattttaattgctgttgtaacttactcatgaaacagtatacagacaccttgtacttttcctcaactgtaagagcagactttcaatgttagcaattaagctgttgtcaaacaatcagtcatgagctttgttaattttcaatgttttcccagcctataaaaaaaggaaggtacacgttgtccttttaaaggttgtgaggtagattggagtgagtagacaggatattgcattaaaaattgaaagctcgatctcattattgtcaggaacccccagtgtgacctcacacataggatgtgggacctttgagccgatgtgcactggccaccaccagggttgggggcgccacagctgcgagcccggcccctgctgttctcagcagccacttcccaggctgcctcactttatgccatgactgaccttaatattgggatattgttatgcaatttttatcctgtttagactgttaaaagcaggtttctgtacttaagagtcccccagacctcctgtgaggtgaggctctgttgcagtgtcgtaggctgtgtgtgtctgtaaagaaagaatgcacatatgtagacgattaagtgtatattataagctatatgctgaaaatggcttccatagccatgagaacatcttaaaactatgtgtaaatatattaaggaaagtatagctttgtaatttaaattggagcttttagcttgtttcatggaactatacaacttgtgggtaactcacatgaccaaacaaaccaaagtgcctgtgacggggcgggtggcgtctacccaccctcccttctagcagattcttattttgtttgaatttataaacaaggctggtggctgtctacccaccctcccttctagcagattttgattttgtttcaatttataacttacactttgaaccatgggtttacttataatggagtctgtagcttcacagcatatttcatgtaatcataaagaccagtatattccctcctgctgaatgacatgcgactgtaaagcctctttataaaccatttccaatgttagtatataggattatttgggaagcgtatcaatacctttatagacaaatacgaacatgtatgcacacaaaacatttaactatggtatttatggaagacaggtaacaacattaaatctagttgctttcccttagtattagatttgttgagggttttttaaaaatcaggtctgttgaaagtcttctgtcataatctataaagcagcagcactcatggaaattgtagcatgccagtaatttttaccaacatcccatacatctgagttctgcagtccagtgtgtaatccgctccatgtgtattttgcttaatggaatgctttatttaagcacttaggcagagtagacacaattaaaggtacaaagcccagaggaagtggtagagcagcaccgtgcctgccctgaggcagtggagtcagtagcgctgtccccagggccttgagtgcctggaggtgcttggcctccagtagctgcctccattctcttttaaaaaaagggggtgattctgaggcactgaagtgcctcccagatgtggaggagtgaagccaccatcgaggccacactcagcactccaggatcccagcgatgtcagacactcttgagttgtcaaaacgttaattttcagttttaaataatcagtttatctaagaaaagggaattttaacttttctaccttgagccaagccaatgaagggaaaattaattaacttagtaaatttgaagtgcagctctgttagctcgtacatgtgggttcttatcctgatcctgtgccttaaagtaggaaggtgtttccaagttcagattaaaatagaagcagctggccgggtgcggtggctcacgcctgtaatcccagcactttgggaggccgaggcgggcggatgacctgaggtcaggagttcaagaccagcctggccaacatggagaaaccccatctttactaaaaatacaaaaattagccgggcgtggtggtggagcgcacgcctgtagtcccagctactcgggaggctgaggcaggagaattgcttgaacccaggaggcggaggttgcagtgagccaagatcgcaccactgcactccagcctgggcaacagagtgagactccgtctcaaaaaataaataaaatagaagcagccttgtaactgtatttaccatgataatatattctgcacggtaagaattccttttacagacattctttatcaagaggtcggcccttctttttcaggcacataagccaaatgcaggcctgtgtgtagctgtgtgttttttctgtggttgccgcatttattccacctccagctggaccccccactgcaaatagagaacagcggtgggggatgggggttaaaaagtagagaacctcctttctgttcaactaatttcacgtgacagtgcatgtatttattcaataaaacctttatgttagctc

SEQ ID NO: 4441 - DNA, 3509 bp, Homo sapien
ttatgctaacatgaagaaaagagaagggactcagctttcttcccaacagtctgtgatgtctaaacttgcatcatttttgggcttttcaaagcaatctccccaaaaaaagaatcatttggttttggaaaagaaaacagaatcagcaacttttcgggtgtgtggtgaaaatgtcacgtgtgtggaatatgctatctcctggctacaagacctgattgaaaaagaacagtgtccttacaccagtgaagatgagtgcatcaaagactttgatgaaaaggagtatcaggagttgaatgagctgcagaagaagttaaatattaacatttccctggaccataagagacctttgattaaggttttgggaattagcagagatgtgatgcaggctagagatgaaattgaggcgatgatcaagagagttcgattggccaaagaacaggaatcccgggcagattgtatcagtgagtttatagaatggcagtataatgacaataacacttctcattgttttaacaaaatgaccaatctgaaattagaggatgcaaggagagaaaagaaaaaaacagttgatgtcaaaattaatcatcggcactacacagtgaacttgaacacatacactgccacagacacaaagggccacagtttatctgttcagcgcctcacgaaatccaaagttgacatccctgcacactggagtgatatgaagcagcagaatttctgtgtggtggagctgctgcctagtgatcctgagtacaacacggtggcaagcaagtttaatcagacctgctcacacttcagaatagagaagattgagaggatccagaatccagatctctggaatagctaccaggcaaagaaaaaaactatggatgccaagaatggccagacaatgaatgagaagcaactcttccatgggacagatgccggctccgtgccacacgtcaatcgaaatggctttaaccgcagctatgccggaaagaatgccgtggcatatggaaagggaacctattttgctgtcaatgccaattattctgccaatgatacgtactccagaccagatgcaaatgggagaaagcatgtgtattatgtgcgagtacttactggaatctatacacatggaaatcattcattaattgtgcctccttcaaagaaccctcaaaatcctactgacctgtatgacactgtcacagataatgtgcaccatccaagtttatttgtggcattttatgactaccaagcatacccagagtaccttattacgtttagaaaataacactttggtatccttcccacaaaattattctccatttgtacatatctagttgtaaaacaagttttagcttttttttttaattcctcttaacagatttttctaatatccaaggatcattctttgtcgctgaagtcagtctttcttcagcttctctttcataatggaaatgaacttattatcttgagagcaaataacttggaaaatttaaatgagataatgcagttgcaactgtgtgtccacaagtatggacatcaaatctgtgggaaaagaacaggtttgtattttcaggaaggagagaataacagtcttatagacagagggcacagctaagcacagctgccactgcaggagacaggccccatgtcaggatgccatagtgctgtggggagcacagtattacccagtgggtagggcttctgtcttccctgggagcagggatggtatcttagtcaatttttttcccttgagatgaggtctgtgcctgatgtacaacggatactccataaatgtttgacaaaccaacgaagaatgaaaaaaagcctagtcagactcccatccaaagtaggaactatctctttaacattcttgactcactatcactttacctcaaattgaacagattccatgacggaacttcattcttcacaaactagccagtgacatgtgggacagctctggccagggctctgggactgcagtgtacttgcgctctgcacggtccaggagctgtgatgtggctgtggtctaggggaatcctgcctgccccatggagttgcgcagcacaaccctggctccaattgccagaaggctctttttaatgctgaaccaaaatgcgccttttttttttttctgagatggagtttcactcttgttgcccaggctggagtgcaatggcgcgatctcagctcactgcagccactgcctcccaggttcaagtgattctcctgcctcagcctcccgagtagctgggattacaggcatgcgctaacacacccagctaattttgtatttttagtagagacgaggtttctccatgttcgacaggctggtctcgaactcccacctcagcctcccaaactgctgggattacaggtgtgagccactgtgaccagccaatgtgccttcttatagtgtctactcattggtctttgttctgcccagtgataacaatgggataacgcctgctacacatcttcattgtgaaacccttcccctgtgctgagattaaatgaactctgagattattaaatagtatattttccttgacagcctagcgtttgatgattttaaagccttatgtataaataaaccaaaggaagtaagcagtcatattgctaatttgctaactcctatctattgaatggtgaagttttaaaaatttccccaggtaagtttaagattcaaacaccatctattgagcacctacattgtgtgccaggtagtaaaataggtgctttcatacacattgtctcaattcctgtgaggtcagaattatctctgcatttgaaacttgaggaaacatgctcagagtgcaagaagcttccttgcctgagatcacctagaaaggaaccctcagagccggcaactgaatcttggtccctgtgatgtcaagcccattgctctcccactgcagaacatggcctctagattaatgccaccgattcaggaacacctccgacagtcttgaaatacccccatgttgccttgtttgttttttccttctggcttcttctattacagtctcttcattggaagctctgtaggccaaggccagagctgatactgacacggagccaatgcagatagcacatcagatgctaggggtcgctgggaggattaagggacttaatctgctaggaacacctgtacttgaagtggaggaggctagggggccacagttgctgcttcattaacatagaggttttggatttttttctcttgtggtttgttttttaagtggattggcagactccttgttgcttaagagtggctttctaggcaggccactggcatctgaattcatcattgacaataaatgtaagaaattggaataaaaaagagaggcctgctgttattcgcttttgttctccagtgatttgattaactcagggcaaggctgaatatcagagtgtatcgcactgaagaataataatccattcagtaatgttatagttatcctcaatctaaatatgtcaactgtcattttgctacttttcaaataaaatacttgaaaactgtc

SEQ ID NO: 4442 - protein, 419 aa, Homo sapien
MKKREGTQLSSQQSVMSKLASFLGFSKQSPQKKNHLVLEKKTESATFRVCGENVTCVEYAISWLQDLIEKEQCPYTSEDECIKDFDEKEYQELNELQKKLNINISLDHKRPLIKVLGISRDVMQARDEIEAMIKRVRLAKEQESRADCISEFIEWQYNDNNTSHCFNKMTNLKLEDARREKKKTVDVKINHRHYTVNLNTYTATDTKGHSLSVQRLTKSKVDIPAHWSDMKQQNFCVVELLPSDPEYNTVASKFNQTCSHFRIEKIERIQNPDLWNSYQAKKKTMDAKNGQTMNEKQLFHGTDAGSVPHVNRNGFNRSYAGKNAVAYGKGTYFAVNANYSANDTYSRPDANGRKHVYYVRVLTGIYTHGNHSLIVPPSKNPQNPTDLYDTVTDNVHHPSLFVAFYDYQAYPEYLITFRK

SEQ ID NO: 4443 - DNA, 847 bp, Homo sapien
ggcacgagggcttgatgggaagtatgggcagcatgtacttgacacgttatcacccagtccccttgtaaaatctggaatggagcgtttaagctgagcgttagcatcaggtcagcaggcaaagcaaacctcccacaaactgggtgccgtaaggtgggaggtgacacatggagagcttcgtcctggccgagcaggcacccagccccatgtcccccgccagcattctggatgtcagaggagggtgcgtgtgatggcgtcacattcatctgaagcacactgattgattttccacaaggtggcaagtttgatcaaattgaccgcttttcatgagacaaccagatgctgtaaaaaaaaaaaacagcactgggatgtgttgaggagggggcagtttgctgtgctctgttctgtctgctgctctctctgggggccgcacaatgtccgcacacatcacggaggggagaaaggcatcagtaccaaacggaacaacctcttttttctacattgtccatacccggacatgtgaggctctattatcaacaggtggtgagaaaaattctgtttttattcgctttctggtaacttctgtaggccctggctcaaggacttagcatttcgtctcatgtacatctttttcttaagtgttctttgccatttctggaattgtccttggtttttccttagctcataggtcatagatgcagaaatatagtatttaaggcatccgcatccagcatcagatggctttgcatccagaaaaacattgataactcagtttgaagcaccaagcatgtgtaatatggctctatacaatataataaatgcataatgttaagctttttaaaaaaaaaaa

SEQ ID NO: 4444 - protein, 30 aa, Homo sapien [sequence omitted]

SEQ ID NO: 4445 - DNA, 1613 bp, Homo sapien
agcgccgcgtggttagcgtcggcggcttttggcatggcgactttttctggcccggctgggccaatcctgtcgcttaatccgcaggaagatgtcgagtttcaaaaggaggtggcgcaggttcgcaagcgcataacccagcgaaaaaaacaagaacaacttactcctggagtagtctatgtgcgccacctacctaacctacttgacgaaacccagatcttttcatatttctcccagtttggcactgtgacacggttcaggctgtccagaagtaaaaggactggaaatagcaaaggctatgcatttgtggagtttgagtctgaggatgttgccaaaatagttgctgaaacaatgaacaactacctgtttggtgaaagactcttggagtgtcattttatgccacctgaaaaagtacataaagaactctttaaagactggaatattccatttaagcagccatcatatccatcagtgaaacggtataatcggaatcggacactaacacaaaagctacggatggaggagcgatttaaaaagaaagaaagattactcaggaagaaattagctaaaaaaggaattgactatgattttccttctttgattttacagaaaacggaaagtatttcaaaaactaatcgtcagacgtctacaaaaggccaggttttacgtaagaagaagaaaaaagtttcaggtactcttgacactcctgagaagactgtggatagccagggccccacaccagtttgtacaccaacatttttggagaggcgaaaatctcaagtggctgaactgaatgatgatgataaagatgatgaaatagttttcaaacagcccatatcctgtgtaaaagaagaaatacaagagactcaaacacctacacattcacggaaaaaaagacgaagaagcagcaatcagtgattttcaatgtattatatttcttttgaaaaatataatatttttatgagagtggactttgtatttcactaggtacaatggaatacaacctttgacaagattttcagaggaaaaatacactgtttggtcaagttaaggaaagcagtgtgtaattttggattgcctgcccttggctgaaatacaggggtgcataccatcttgcagtggcttggctgacattgcctctctgtcctggcctctagttttcttttgatatttcatagctctccttagtttactctgcctggatagaaagttgaccactaactgcaggtttaagtactaaactgcagccttttctgtcgccagcaattaaagaccaccaatcttgtttgtccatctacatggtttgtcggggacatttaactcatggaggtgctttagatttcaacatcagatggttgaagctggaagtttaattatatgtagagtgagaaggcagttccagttttagcacagatttgtttatgtgttcagattttaatagagattcaaaaatgactcatttttaccaataatgttaaattagttttggttgtgctagcatgaattaataaccaccattttataccagtatcatcagtgaagaattgtatttcaagattcaaacaataaccagcaattaaacttttttctacaatgtaaaaaaaaaaaaaaaaaaa

SEQ ID NO: 4446 - protein, 293 aa, Homo sapien
MATFSGPAGPILSLNPQEDVEFQKEVAQVRKRITQRKKQEQLTPGVVYVRHLPNLLDETQIFSYFSQFGTVTRFRLSRSKRTGNSKGYAFVEFESEDVAKIVAETMNNYLFGERLLECHFMPPEKVHKELFKDWNIPFKQPSYPSVKRYNRNRTLTQKLRMEERFKKKERLLRKKLAKKGIDYDFPSLILQKTESISKTNRQTSTKGQVLRKKKKKVSGTLDTPEKTVDSQGPTPVCTPTFLERRKSQVAELNDDDKDDEIVFKQPISCVKEEIQETQTPTHSRKKRRRSSNQ

SEQ ID NO: 4447 - DNA, 1691 bp, Homo sapien
agcgggtttgcgggagcgccgcgtggttagcgtcggcggcttttggcatggcgactttttctggcccggctgggccaatcctgtcgcttaatccgcaggaagatgtcgagtttcaaaaggaggtggcgcaggttcgcaagcgcataacccagcgaaaaaaacaagaacaacttactcctggagtagtctatgtgcgccacctacctaacctacttgacgaaacccagatcttttcatatttctcccagtttggcactgtgacacggttcaggctgtccagaagtaaaaggactggaaatagcaaaggctatgcatttgtggagtttgagtctgaggatgttgccaaaatagttgctgaaacaatgaacaactacctgtttggtgaaagactcttggagtgtcattttatgccacctgaaaaagtacataaagaactctttaaagactggaatattccatttaagcagccatcatatcaatcagtgaaacggtataatcggaatcggacactaacacaaaagctacggatggaggagcgatttaaaaagaaagaaagattactcaggaagaaattagctaaaaaaggaattgactatgattttccttctttgattttacagaaaacggaaagtatttcaaaaactaatcgtcagacgtctacaaaaggccaggttttacgtaagaagaagaaaaaagtttcaggtactcttgacactcctgagaagactgtggatagccagggccccacaccagtttgtacaccaacatttttggagaggcgaaaatctcaagtggctgaactgaatgatgatgataaagatgatgaaatagttttcaaacagcccatatcctgtgtaaaagaagaaatacaagagactcaaacacctacacattcacggaaaaaaagacgaagaagcagcaatcagtgattttcaatgtattatatttcttttgaaaaatataatatttttatgagagtggactttgtatttcactaggtacaatggaatacaacctttgacaagattttcagaggaaaaatacactgtttggtcaagttaaggaaagcagtgtgtaattttggattgcctgcccttggctgaaatacaggggtgcataccatcttgcagtggcttggctgacattgcctctttgtcctggcctctagttttcttttgatatttcatagctctccttagtttactctgcctggatagaaagttgaccactaactgcaggtttaagtactaaactgcagccttttctgtcgccagcaattaaagaccaccaatcttgtttgtccatctacatggtttgtcggggacatttaactcatggaggtgctttagatttcaacatcagatggttgaagctggaagtttaattatatgtagagtgagaaggcagttccagttttagcacagatttgtttatgtgttcagattttaatagagattcaaaaatgactcatttttaccaataatgttaaattagttttggttgtgctagcatgaattaataaccaccattttataccagtatcatcagtgaagaattgtatttcaagattcaaacaataaccagcaattaaacttttttctacaatgtatttgtttgcgagtaggacttgggagtcattggaaaaaaaaaataataaattttccccttcattaacaaaaaaaaaaaaaaaa

SEQ ID NO: 4448 - protein, 293 aa, Homo sapien
MATFSGPAGPILSLNPQEDVEFQKEVAQVRKRITQRKKQEQLTPGVVYVRHLPNLLDETQIFSYFSQFGTVTRFRLSRSKRTGNSKGYAFVEFESEDVAKIVAETMNNYLFGERLLECHFMPPEKVHKELFKDWNIPFKQPSYQSVKRYNRNRTLTQKLRMEERFKKKERLLRKKLAKKGIDYDFPSLILQKTESISKTNRQTSTKGQVLRKKKKKVSGTLDTPEKTVDSQGPTPVCTPTFLERRKSQVAELNDDDKDDEIVFKQPISCVKEEIQETQTPTHSRKKRRRSSNQ

SEQ ID NO: 4449 - DNA, 1782 bp, Homo sapien
ggcacgaggggcggcgtaggggcggaggtcgcgcctgagtgcgtccgcacgagagggcggaaccgtctccatggcaacccgcgcgcagccggggccactcagccaggcgggaagcgctggtgttgcggcgctggcgacagtcggggttgcgagcggcccggggccggggcggccagggccgctgcaggacgagaccctgggtgtggcgtccgtgccctcgcagtggagggccgtccagggcatccgcggggagacgaaaagttgccagacggccagcattgccactgccagtgcatccgcccaggccaggaatcatgtggacgcccaggtgcagacggaggcccccgtgcctgtcagcgtgcagcccccgtcccagtacgacatacccaggcttgcagcctttcttcggagagtggaggccatggtcatccgagagctgaacaagaattggcagagccacgcgtttgatggcttcgaggtgaactggaccgagcagcagcagatggtgtcttgtctgtataccctgggctacccgccagcccaagcgcagggtctgcatgtgaccagcatctcctggaactccactggctctgtggtggcctgtgcctacggccggctggaccatggggactggagcacgcttaagtccttcgtgtgtgcctggaacctggaccggcgagacctgcgtccccagcaaccgtcggccgtggtggaggtccccagcgctgtcctgtgtctggccttccaccccacgcagccctcccacgtcgcaggagggctgtacagtggtgaggtgttggtgtgggacctgagccgtcttgaggacccgctgctgtggcgcacaggcctgacggatgacacccacacagaccctgtgtcccaggtggtgtggctgcccgagcctgggcacagccaccgcttccaggtgctgagtgtggccactgacgggaaggtgctactctggcagggcatcggggtaggccagctgcagctcacagagggcttcgccctggtcatgcagcagctgccacggagcaccaagctcaagaagcatccccgcggggagaccgaggtgggcgccacggcagtggccttctccagctttgaccctaggctgttcattctgggcacggaaggcggcttcccgctcaagtgttccctggcagctggagaggcagccctcacgcggatgcccagctccgtgcccctgcgggccccagcacagtttaccttctccccccacggcggtcccatctactctgtgagctgttcccccttccacaggaatctcttcctgagcgctgggactgacgggcatgtccacctgtactccatgctgcaggcccctcccttgacttcgctgcagctctccctcaagtatctgtttgctgtgcgctggtccccagtgcggcccttggtttttgcagctgcctctgggaaaggtgacgtgcagctgtttgatctccagaaaagctcccagaaacccacagttttgatcaagcaaacccaggatgaaagccctgtctactgtctggagttcaacagccagcagactcagctcttggctgcgggcgatgcccagggcacagtgaaggtgtggcagctgagcacagagttcacggaacaagggccccgggaagctgaggacctggactgcctggcagcagaggtggcggcctgaggggtcccgggaggcgggtgcaagccttcgctgtgccgagccttgtgtttctgacgcaagccaaatgaagaaaagcaaagcttaaaaaaaaaaaaaaaaaa

SEQ ID NO: 4450 - protein, 419 aa, Homo sapien
MVIRELNKNWQSHAFDGFEVNWTEQQQMVSCLYTLGYPPAQAQGLHVTSISWNSTGSVVACAYGRLDHGDWSTLKSFVCAWNLDRRDLRPQQPSAVVEVPSAVLCLAFHPTQPSHVAGGLYSGEVLVWDLSRLEDPLLWRTGLTDDTHTDPVSQVVWLPEPGHSHRFQVLSVATDGKVLLWQGIGVGQLQLTEGFALVMQQLPRSTKLKKHPRGETEVGATAVAFSSFDPRLFILGTEGGFPLKCSLAAGEAALTRMPSSVPLRAPAQFTFSPHGGPIYSVSCSPFHRNLFLSAGTDGHVHLYSMLQAPPLTSLQLSLKYLFAVRWSPVRPLVFAAASGKGDVQLFDLQKSSQKPTVLIKQTQDESPVYCLEFNSQQTQLLAAGDAQGTVKVWQLSTEFTEQGPREAEDLDCLAAEVAA

SEQ ID NO: 4451 - DNA, 4801 bp, Homo sapien
cagagtgtggcggcggcggcgagatctgggctcgggttgaggagttggtattgtgtggaaggaggcggaggcgcaggaggaagggggaagcggagcgccggcccggagggcgggaggaggcgcgcagccgaggagccgaggccgccgcggccgtggcggcggagccctcagccatggcctcgggcgacaccctctacatcgccacggacggctcggagatgccggccgagatcgtggagctgcacgagatcgaggtggagaccatcccggtggagaccatcgagaccacagtggtgggcgaggaggaggaggaggacgacagacgacgagtgacggcggcggtggcgaccacggcggcggggggcggccacgggcacgccggcccaccacacaccactcacctatcaccaccgactctagtcacccgcccatgatcgctctgcagccgctggtcaccgacgacccgacccaggtgcaccaccaccaggaggtgatcctggtgcagacgcgcgaggaggtggtgggcggcgacgactcggacgggctgcgcgccgaggacggcttcgaggatcagattctcatcccggtgcccgcgccggccggcggcgacgacgactacattgaacaaacgctggtcaccgtggcggcggccggcaagagcggcggcggcggctcgtcgtcgtcgggaggcggccgcgtcaagaagggcggcggcaagaagagcggcaagaagagttacctcagcggcggggccggcgcggcgggcggcggcggcgccgacccgggcaacaagaagtgggagcagaagcaggtgcagatcaagaccctggagggcgagttctcggtcaccatgtggtcctcagatgaaaaaaaagatattgaccatgagacagtggttgaagaacagatcattggagagaactcacctcctgattattcagaatatatgacaggaaagaaacttcctcctggaggaatacctggcattgacctctcagatcccaaacaactggcagaatttgctagaatgaagccaagaaaaattaaagaagatgatgctccaagaacaatagcttgccctcataaaggctgcacaaagatgttcagggataactcggccatgagaaaacatctgcacacccacggtcccagagtccacgtctgtgcagaatgtggcaaagcttttgttgagagttcaaaactaaaacgacaccaactggttcatactggagagaagccctttcagtgcacgttcgaaggctgtgggaaacgcttttcactggacttcaatttgcgcacacatgtgcgaatccataccggagacaggccctatgtgtgccccttcgatggttgtaataagaagtttgctcagtcaactaacctgaaatctcacatcttaacacatgctaaggccaaaaacaaccagtgaaaagaagagagaagacccttctcgaccacgggaagcatcttccagaagtgtgattgggaataaatatgcctctcctttgtatattatttctaggaagaattttaaaaatgaatcctacacacctaagggacatgttttgataaagtagtaaaaattaaaaaaaaaaaactttactaagatgacattgctaagatgctctatcttgctctgtaatctcgtttcaaaaacacagtgtttttgtaaagtgtggtcccaacaggaggacaattcatgaacttcgcatcaaaagacaattctttatacaacagtgctaaaaatgggacttcttttcacattcttataaatatgaagctcacctgttgcttacaatttttttaattttgtattttccaagtgtgcatattgtacacttttttggggatatgcttagtaatgctacgtgtgatttttctggaggttgataactttgcttgcagtagattttctttaaaagaatgggcagttacatgcatacttcaaaagtattttcctgtaaaaaaaaaaagttatataggttttgtttgctatcttaattttggttgtattctttgatgttaacacattttgtataattgtatcgtatagctgtattgaatcatgtagtatcaaatattagatgtgatttaatagtgttaatcaatttaaacccattttagtcactttttttttccaaaaaaatactgccagatgctgatgttcagtgtaatttctttgcctgttcagttacagaaagtggtgctcagttgtagaatgtattgtaccttttaacacctgatgtgtacatcccatgtaacagaaagggcaacaataaaatagcaatcctaaagcaagaatatggcagaacaagatctgtaagcacagtcttattttcttttgttgtccagaatacttataattcttgagcctcccagaaattggaagctaaataaagcaactcaagtttcctttattttgcactcaattacagtgattattgatgaaagcgatgcatggatattttaatacttcctacatgtcctgacttctgaaagagagtaggtaacaggcatcccgagttcaggaactacctcagaacaccccaggccaggttggtcataggctgtgattttagcccccggcaagtgtgagtgaagcatctgtaccaccgcgcaggctgagcgcctgcgcagggtaaggtgccacctggcagtggggcacacagagggaagaccaggcctgtccatcagccggctgccttcagaggcagctccagcaggaccttggcttgtctgacaggaaatgcttgtggtcgttggttatttggtttgagagcccttgttcctccatctagtggagtccttattaaatgctagcaatgtggcaattgagtgccagtagcttaatttcatgtttctaaatggacactgggtgcaaatcggcaaggtgattagattattagaaaattctgctcaatgagtacctctcacattgtaacctcttaaatgtacgattataatgttggatcttaggtcaaataacagacttgagaatactttataaactgccatgatacagcaaaatctcatttattcaaagtgcaaacatactgtgtgtctttctgttttgtgtatgcttgactgcaagataaatgacaaactagctaatatccgagatttatttacaaatggccagggaccccatcaggtgaaacacatagcccattgtcttagagcttctccatcggtcctgtacaggaggattggtgacctactaacagtgaccctgtggctctgtggaattttgaagtgccttttgtgaatcatgaatgaaacatttaacttgagaccctttaaaaaattcatccagaatctgttaccccttgggtagtttgatggaactgagttaagcagaagaccccagctgttttctgggtaagccaggctttgctgtatctggcagtcaggagagaggtcagcccatggtggaggtcttcagtgccgagggctcggatgagaacgtgtagttctttgacttggacctgggcagcgtcttctatggatgcctgccttgtgagcacccacaccttccctccccactgtcgggttgagtagccccagcgtggctgtgttaggagtcctttgcccaacattgtgctgcactggagcctggccctggcactgtcctcaggaccctgcccaagggcccaccgcagagcacacctatgctatggggagccctgctggcagccccgagagccatgccatggcctgcaggagccaggctcctgtgtggatgaagtccctcttcctctgtgccttgatcccttgggggtgcctttggtcatctcttctgtcctttcctgtctctgaaatagtcatcactccccttgactctctctgttcacgtcttctcagtctgcagagttaacttctgtaaggagtttaatctggggttccaagaaaacaagttccttgttaacatagcactgactttgcaacaatagaaaactaacaaatgagcaacaatataaagagtagaggtagttctcattgggtgtaacttcaacccattctgcttgtggttagaatttataattttgctaacgatgtaatttactaaggtttgaaatggtattctaacagtgagtccattgtcttgaggattaatctgatttataagtaatactgatagacatattttcgtacatctgagcagaaataaatgcatgtttctagcatatgtaatataaaaactccagaggataagtttacacttaacaagatgttgttttctatttttgaatttcttattatttccccctttttggtagtggagttgagagggggagcatactatttgtataaagaactgtcaccccagagtgacatttattttccaagatgaccctgaactcatgctgttggtttcatatggtgtttgtgtgctttgcctagattcaaggcctgaggatttgaggaaaatcgggattttttttttcctatttggttttcatgtaaaagttctaaatgtcacttattttgctaaataagaccctttcacaggatagtgtgcgcaatacctgtccgtgtttccaagcagagttcaagttcatgtcttcacaagtagatgagagtcacttccagtcgggggaagcccgcctgagcagtgttttgagagtgcgtacattggaggactgccccacgtccgtttgcactctgccttgcaaaacttactgtggagacgtgccccagactggtctcagaccagagtttgtggcacaggaaaacctggccccctaaaaagaagttttggaattggaagcctgataatttcgggaggctgaggcaggagaac

SEQ ID NO: 4452 - protein, 332 aa, Homo sapien [sequence omitted]

SEQ ID NO: 4453 - DNA, 583 bp, Homo sapien
ggcacgaggcgttgggaacggttgtaggacgtggctctttattcgtgagttttccatttacctccgctgaacctagagcttcagacgccctatggcgtccgcctcgacccaaccggcggccttgagcgctgagcaagcaaaggtggtcctcgcggaggtgatccaggcgttctccgccccggagaatgcagtgcgcatggacgaggctcgggataacgcctgcaacgacatgggtaagatgctgcaattcgtgctgcccgtggccacgcagatccagcaggaggttatcaaagcctatggcttcagctgcgacggggaaggtgtccttaagtttgctcgcttggtcaagtcctacgaagcccaggatcctgagatcgccagcctgtcaggcaagctgaaggcgctgtttctgccgcccatgaccctgccaccccatgggcctgctgctggtggcagcgtggccgcctcctgagagttggccctcccttgtgccactgccaggggaggaaaggccttgatgttccagacaataataaatgcgcctgtgacttaaaaaaaaaaaaaaaaaaaaaaaaaaaaaaaa

SEQ ID NO: 4454 - protein, 126 aa, Homo sapien
MASASTQPAALSAEQAKVVLAEVIQAFSAPENAVRMDEARDNACNDMGKMLQFVLPVATQIQQEVIKAYGFSCDGEGVLKFARLVKSYEAQDPEIASLSGKLKALFLPPMTLPPHGPAAGGSVAAS

SEQ ID NO: 4455 - DNA, 880 bp, Homo sapien
  Unsure 7: Unknown base
  Unsure 19: Unknown base
  Unsure 22: Unknown base
  Unsure 27: Unknown base
  Unsure 33: Unknown base
  Unsure 38: Unknown base
  Unsure 47: Unknown base
attgaanttaggtgacccnatngaagngctatnacgtngcatgcacngcgtacgtaagctcggaattcggctcgagaaaaaaaaaagtgccagcgtatgaggtaattagattggttctctccagaggtaacctgccaagaagagatgctatagatgttactcctatactgtaaaacattgtgaaatcagattactttaaaatgatgtattacaaagttatgcaaaaaagcagttgtgactatggaagcccaaggcttatatcccagctctgtcttacactaaatatgggtacagtgtttccactctgtccataaaatgggagctaatattctccaacctgtgtgcctgacatgatggttaaagggattaaacaaaacaatagtttgtaatttattctgtcagagcaaactgctggtaaataaaagggactaagttgacgaaaaataaattttaaaaaacctaataaaacaagtttgtaatttataattgtatacaaataaaagatgttacaaaaattgcgcacttatatgtatgtaccatgacataactaattcgttgaacaagttgtgagacaatcctttctgagaaaaggtagacctgttacatcgtctgtgggttagggtcatgtcagcacgtaccaggtacattctagcttttgtagagaaagtaaaatctagtgttgagtatgtaggcactgagccaggtggcctgcttaacataaaaggactgatttcagggtggctgtgggagcctttctaatgctctaattctctagccccttgcctgatccagctgattccaagagccaagattttagtctttcttggttggcttttttaaatgctttgggctttcctttaatgtatcttcaaaatcattc

SEQ ID NO: 4456 - protein, 32 aa, Homo sapien
  unsure 2: unknown amino acid
  unsure 7: unknown amino acid
  unsure 9: unknown amino acid
  unsure 11: unknown amino acid
  unsure 13: unknown amino acid
  unsure 16: unknown amino acid
LXLGDPXEXLXRXMHXVRKLGIRLEKKKSASV

SEQ ID NO: 4457 - DNA, 2126 bp, Homo sapien
ggcgctccgcctgctgcgcgtctacgcggtccccgcgggccttccgggcccactgcgccgcgcggaccgcctcgggctcggacggccggtgtccccggcgcgccgctcgcccggatcggccgcggcttcggcgcctggggctcggggctccggggaggccgtcgcccgcgatgctgctctccaagttcggctccctggcgcacctctgcgggcccggcggcgtggaccacctcccggtgaagatcctgcagccagccaaggcggacaaggagagcttcgagaaggcgtaccaggtgggcgccgtgctgggtagcggcggcttcggcacggtctacgcgggtagccgcatcgccgacgggctcccggtggctgtgaagcacgtggtgaaggagcgggtgaccgagtggggcagcctgggcggcgcgaccgtgcccctggaggtggtgctgctgcgcaaggtgggcgcggcgggcggcgcgcgcggcgtcatccgcctgctggactggttcgagcggcccgacggcttcctgctggtgctggagcggcccgagccggcgcaggacctcttcgactttatcacggagcgcggcgccctggacgagccgctggcgcgccgcttcttcgcgcaggtgctggccgccgtgcgccactgccacagctgcggggtcgtgcaccgcgacattaaggacgaaaatctgcttgtggacctgcgctccggagagctcaagctcatcgacttcggttcgggtgcgctgctcaaggacacggtctacaccgacttcgacggcacccgagtgtacagccccccggagtggatccgctaccaccgctaccacgggcgctcggccaccgtgtggtcgctgggcgtgcttctctacgatatggtgtgtggggacatccccttcgagcaggacgaggagatcctccgaggccgcctgctcttccggaggagggtctctccagagtgccagcagctgatccggtggtgcctgtccctgcggccctcagagcggccgtcgctggatcagattgcggcccatccctggatgctgggggctgacgggggcgccccggagagctgtgacctgcggctgtgcaccctcgaccctgatgacgtggccagcaccacgtccagcagcgagagcttgtgaggagctgcacctgactgggagctaggggaccacctgccttggccagacctgggacgcccccagaccctgactttttcctgcgtgggccgtctcctcctgcggaagcagtgacctctgacccctggtgaccttcgctttgagtgccttttgaacgctggtcccgcgggacttggttttctcaagctctgtctgtccaaagacgctccggtcgaggtcccgcctgccctgggtggatacttgaaccccagacgcccctctgtgctgctgtgtccggaggcggccttcccatctgcctgcccacccggagctctttccgccggcgcagggtcccaagcccacctcccgccctcagtcctgcggtgtgcgtctgggcacgtcctgcacacacaatgcaagtcctggcytccgcgcccgcccgcccacgcgagccgtacccgccgccaactctgttatttatggtgtgaccccctggaggtgccctcggcccaccggggctatttattgtttaatttatttgttgaggttatttcctctgagcagtctgcctctcccaagccccaggggacagtggggaggcaggggagggggtggctgtggtccagggaccccaggccctgattcctgtgcctggcgtctgtcctggccccgcctgtcagaagatgaacatgtatagtggctaacttaaggggagtgggtgaccctgacacttccaggcactgtgcccagggtttgggttttaaattattgactttgtacagtctgcttgtgggctctgaaagctggggtggggccagagcctgagcgtttaatttattcagtacctgtgtttgtgtgaatgcggtgtgtgcaggcatcgcagatgggggttctttcagttcaaaagtgagatgtctggagatcatatttttttatacaggtatttcaattaaaatgtttttgtacatagaaaaaaaaaaaaaaaaaaaaaaagggcgg

SEQ ID NO: 4458 - protein, 382 aa, Homo sapien
RSACCASTRSPRAFRAHCAARTASGSDGRCPRRAARPDRPRLRRLGLGAPGRPSPAMLLSKFGSLAHLCGPGGVDHLPVKILQPAKADKESFEKAYQVGAVLGSGGFGTVYAGSRIADGLPVAVKHVVKERVTEWGSLGGATVPLEVVLLRKVGAAGGARGVIRLLDWFERPDGFLLVLERPEPAQDLFDFITERGALDEPLARRFFAQVLAAVRHCHSCGVVHRDIKDENLLVDLRSGELKLIDFGSGALLKDTVYTDFDGTRVYSPPEWIRYHRYHGRSATVWSLGVLLYDMVCGDIPFEQDEEILRGRLLFRRRVSPECQQLIRWCLSLRPSERPSLDQIAAHPWMLGADGGAPESCDLRLCTLDPDDVASTTSSSESL

SEQ ID NO: 4459 - DNA, 1498 bp, Homo sapien
ggcacgaggggccaacccaggatctcccaggaccctccgctctgcgcgacaaggggcccgcgcttgccaaggccgacgggcaggagtgaacgtggcctccgtgggtctgcagccccgataggccaattgtacagaatttaaaccgtctctcagatgtgtacagtagaactcaagaagacagactaccaagggtcatctgaagtcgtgattgggtcactaataacaccaggacaaagttaagggatcactactcaagcataagccccagttttcataagactgctgtgaagatgtttgatataaaggcttgggctgagtatgttgtggaatgggctgcaaaggacccctatggcttccttacaaccgttattttggcccttactccactgttcctagcaagtgctgtactgtcttggaaattggccaagatgattgaggccagggagaaggagcaaaagaagaagcaaaaacgccaagaaaacattgcaaaagctaaacgactaaaaaaggattgaaggactgaacaggctttgcaaccagaggaaaatcatttggaaaattacacagctttggaagaatccactaaagtttcttctttggatttcttgacagtatgatttagtaaatgaaatttgaccaaatggaagaatcatgttagttctgacctcaatactatagtaacttttaggcgtgggtgtagaagtttataggtttctattgacagttattgtaaattagcatttactgtggtacaaattctttataactgacttagtcatttgccgcttagcagtttatatactgaaatgaaaacatcttgtggggaaaagtgactttagattatgaactcaattcaaatgaactctatttaaaatggggtcctattttggacaaaggaaattaagaatgtaaaagtcagaacagtcttgaggtaaaaagtgtgctttggcttaaaagggatacagtatattaattacatcttttattattgtttatttcttagaatcatttctggctttctcaaaacaaaataatattaatgagtacttctatttgctgcatttttcttattacagcctttgagacagctggtaattataagtcattttccattttttaaaacataattttataaagaattctcttatctcgactatgtagaataccacctactggacagaacaatttttgtactcacaaacactgccattttcttagagatggcttgagaggagtaacactatggtttaaagcttgcagtaaaaatgccaaacactgtagtaccttggaacccagtttattcttgtgctaagcagaactgtaaaatagttaaaatgtcttatcaagtaattcgccgattacaaagacaccatttgttttttatttcattctttgttttaactcatgtggtagtgatatttaatactttctgatcaaacaggttcaaagtaaaacgttaaatttcacatttcttttaaagaaaaaaaaaaaaaaaaaa

SEQ ID NO: 4460 - protein, 46 aa, Homo sapien
GTRGQPRISQDPPLCATRGPRLPRPTGRSERGLRGSAAPIGQLYRI

SEQ ID NO: 4461 - DNA, 2516 bp, Homo sapien
ggcacgagggcagcgagtggccttcccggttggcgcgcgcccggggcggcggcgctggaggagctcgagacggagcctagttatgtctgggaggcgaacgcggtccggaggagccgctcagcgctccgggccaagggccccatctcctactaagcctctgcggaggtcccagcggaaatcaggctctgaactcccgagcatcctccctgaaatctggccgaagacacccagtgcggctgcagtcagaaagcccatcgtcttaaagaggatcgtggcccatgctgtagaggtcccagctgtccaatcacctcgcaggagccctaggatttcctttttcttggagaaagaaaacgagccccctggcagggagcttactaaggaggaccttttcaagacacacagcgtccctgccacccccaccagcactcctgtgccgaaccctgaggccgagtccagctccaaggaaggagagctggacgccagagacttggaaatgtctaagaaagtcaggcgttcctacagccggctggagaccctgggctctgcctctacctccaccccaggccgccggtcctgctttggcttcgaggggctgctgggggcagaagacttgtccggagtctcgccagtggtgtgctccaaactcaccgaggtccccagggtttgtgcaaagccctgggccccagacatgactctccctggaatctccccaccacccgagaaacagaaacgtaagaagaagaaaatgccagagatcttgaaaacggagctggatgagtgggctgcggccatgaatgccgagtttgaagctgctgagcagtttgatctcctggttgaatgagatgcagtggggggtgcacctggccagactctccctcctgtcctgtacatagccacctccctgtggagaggacacttagggtcccctcccctggtcttgttacctgtgtgtgtgctggtgctgcgcatgaggactgtctgcctttgagggcttgggcagcagcggcagccatcttggttttaggaaatggggccgcctggcccagccactcactggtgtcctgtctcttgtcgtcctgtccttcctatctccccaaagtaccatagccagtttccagatgggccacagactggggaggagaatcagtggcccagccagaagttaaagggctgagggttgaggtgagaggcacctctgctcttgttgggaggggtggctgcttggaaataggcccaggggctctgccagcctcggcctctccctcctgagttgccttctgttggtggctttcttcttgaacccacctgtgtaaagaggttttcagttccgtgggtttcccctttgattctgtaaatagtcccagagagaattcgtgggctgagggcaattctgtcttggaggaagaagctggacattcagcctgtggagtctgagttttgaaggatgtagggagccttagttgggtctcagaccataagtgtgtactacacagaagctgtgttttctagttctggtctgctgttgagatgtttggtaaatgccaggttgatagggcgctggctgcttggagcaaagggtgcatttcagggtgtggccaccaggtgctgtgagtttctgtggctcatggcctctgggctggtcccttgcacagggcccacgctggagtcttaccactctgctgcaggggtggaaggtggcccctcttgtcacccatacccatttcttacaaaataagttacaccgagtctacttggccctagaagagaaagttgaagagtcccagacctactagcattttgcaactatgcttgtaaagtcctcggaaagtttcctcgcgtaccagacagcggcgggggctgatagcaattttagtttttggcctccctatcctctcacatgagaacactgcctggatgcatctcatgatctctggagaatttccccatctttctcttctttccatcgtgtggattcaatagtttggatttgaaggctgccctgcccccgactctcctgccgcacccctggccattgtaccttttgatgtttagaagttcgtggaagtagacgctgaggtgtgcagaggagctggtggataacagagaatgccagggaagatgagtgctgggtcagggtacttggatgaaacggtgcaggccaggcgggccctaataaaaccctctgccaggtctgggagtcccaggccatctgctcaacgctctgtggtttgtcagacctgcaagcaagccccctgctggggaagcctaggtgtccttgagctgaaccgcactgaagaactcttgtcctcactggctgatgcagcagaactcttgggaaatgtcttagtcctgcagaatcaggagtcaccagatgatgcagagttgagatcatcattgcaaagttctctgttcctgaggaactaaatttaaggaaaaaatgggattttgttttagagttggaaaaaaagcctgattaaagagtttctgcctgttaaaaaaaaaaaaaaaaaaaaaaa

SEQ ID NO: 4462 - protein, 252 aa, Homo sapien
MSGRRTRSGGAAQRSGPRAPSPTKPLRRSQRKSGSELPSILPEIWPKTPSAAAVRKPIVLKRIVAHAVEVPAVQSPRRSPRISFFLEKENEPPGRELTKEDLFKTHSVPATPTSTPVPNPEAESSSKEGELDARDLEMSKKVRRSYSRLETLGSASTSTPGRRSCFGFEGLLGAEDLSGVSPVVCSKLTEVPRVCAKPWAPDMTLPGISPPPEKQKRKKKKMPEILKTELDEWAAAMNAEFEAAEQFDLLVE

SEQ ID NO: 4463 - DNA, 3270 bp, Homo sapien
  Unsure 1554-1580: Unknown base
gggggggggtgggtaataaatgtatataacattaaataatgtaacgtaggtgtagattcccaaatgcatttggatgtacagatcgactacagagtacttttttcttatgatgattggtgtagaaatgtgtgatttgggtgggcttttacatcttgcctaccattgcatgaaacattggggtttcttcaaaatgtgtgtgtcatacttcttttgggaggggggttgttttcttctgtttattttctgagactcctacaggagccaaatttgtaatttagagacacttaattttgttaatcctgtctgggacacttaagtaacatctaaagcattattgctttagaatgttcaaataaaatttcctgaccaaattgttttgtggaaatagatgtgtttgcaatttgaagatatctttctgtccagaaggcaaaattaccgaatgccatttttaaaagtatgctataaactatgctactctcatacaggggacccatattttaaaatctccagagttgcttacatctagattatccagcacaatcataaagtgaatgacaaaccctttgaatgaaattgtggcacaaaatctgttcaggttggtgtaccgtgtaaagtggggatggggtaaaagtggttaacgtactgttggatcaacaaataaaggttacagttttgtaagagaagtgatttgaatacatttttctggaactattcataatatgaagttttcctagaaccactgagtttctagtttaatagtttgctatgcaaatgaccacctaaaacaatactttatattgttatttttagaaagactcaaaacacctgtatttaaaccttaatatgaaaatcatgcaattaatagttacacaagatgttttcattacaaaatatgtacctatatattgatggactctacatcctatattgtgacatgtaagtcctttaaaaggtgaaaagtatgatttcttaccacttaagtatgattgatatgatccaacaaatttgatcagaagctgtaggtaaatcctcttctgaagccaaaatggtatattaaatataatttattggtacttccattttctcttccttcttacttgcctttaagatcttataaaaaagaaactaaaagttaatatttagttgcctatattatgtaaccttttaactatatataaagtacttttttggtttctttctcaccacttttattcaaaagtacttttaacataccaatacatagtctgtctgatgggagtataaattggacagtaaggttttgtcttaataaaatgaaatttgtttctcatgatatgaatcttgcaggtaagatgtagggtttattgaaaatgtgtgggttaaatgctttcaggtacaccaattctttctactaaattgagctctatttgaagttctttggaatctgtggtgaaaaataattttctgatttccaaatacattaagagcattaaatgaatattaatcacctttaaagtcttttagaaaaggacttgtattggtttttggctgcatagaggggttgaataagtgtannnnnnnnnnnnnnnnnnnnnnnnnnntcttaaagaagatgtaattcacaaatagtttagctccctagcgctcagttgtagaatagaaaatagaacattattcaagttaattgaaaggtgaggtttttatacccccactaatgctgtgtatctgtctttcgtttgttaacattatttgcttaatttctttcaactcacactttggataatactatcaaaaactaaggctaaacattccttgtgtatctttaagcatgcttctcctgaaatttaactacattagtagttgacatttgtatacatatatcctaatacaagagtaggataaggtggaaatgtaatggcctgagggatggtgaagcattcttttagtatttttcatcatgttgggctcctagattgtactggggttgcccataaatcaaaccccatactctaagaattcattatattatggtgatatccgaacctagtgaatggtatgcttgggtgttttccattgagagtggatggacctctttataaagttggttgctgcaaaatccagttcttccaaaagccactttatttagggtttattcacaagtcatatccattttggtacagtgtttgtttcctaatatttattaaccaccttataccaaatgtcttgcaaagaaatgttattaaaaccttgaatttttacaaatgtaaaaaacaaaaagtgtattaatgtatttgttcaggaaaagctacataccgaagggcttttgtatatgaattctgtggtggggagacccatttgtaatctatatggcagttccatctgggttttaagtttagatttcaccgtgtcttagtgcttcattctattggtttattggaacatgtaataaataggagtagtgatgtattaaaacacaagtattcattaatgttttatatcttcactaaaattctatagttatgaaactattttatcaatcaaggtgttatatttcagtcagaagtgaaaatttatgaagagtatttggaagtgtgtacagaaataaactagacttacaggtaggctagatcagaacgttaacatatgaacctgcagaaatctggtaagacttaaattcagtgtgaggaataactctagttctctcctatgagcatttcctaaaagccatctgatttggcattcttactggagctgcagacagaaatctacaaagacaaaagtaaacaaaattaagttattattccactgttaggaatggaaataaacttgtgaagtctgtttattttgaagtattggtgaactaggcttgctaattgataactgcagcagtttgtgtttactccagttcatcagcttaggtcatttgaaagatataagagcttaaggcaagaaagaaataacatggaattctatttgaaggacaacagaacattcttggaaaagcagctccagttggtttttcaactgtcaaacttgaatgtgtaagtccccacagagcatggacagtcggtgcagagttccaaggaaacaattattgcctgatgaccacttccattttgtatacactctttggttcgtataggccatattccaactggctttttagtaatagaaatccagtatataatgtatcaaatacaattgaggttctaacctagtgtgttaatttatctgaatttggatttttaaaaagtaataaaaagttaaatgtaaaactagttctagatcgcg

SEQ ID NO: 4464 - protein, 12 aa, Homo sapien
GGGWVINVYNIK

SEQ ID NO: 4465 - DNA, 3167 bp, Homo sapien
cctgagaggacgcctctggagccgcgactgcccggggttgtgccggccgccgctgccgcccaggccgcctcagctctcctctgcgccggcccgctcactccgcccggccccagccctagcgctggccgcgaccccggcgcctttgaaacttctgctggtgtgagtgccctcaggggttccccaggaatatcgatacaacaccaacaggagatcatgaatcagacagataaaaatcaacaagaaatcccatcataccttaatgatgaaccaccagaaggttcaatgaaagatcacccacagcagcagccaggcatgttgtcccgtgtgactgggggtatcttcagtgttacaaagggagctgttggtgccaccattggtggtgtggcttggattggtggaaagagtctggaagtgaccaaaacagctgttacaactgtgccttccatgggaatagggctggtgaaagggggtgtctctgctgtggctggaggtgttacagctgttgggtctgctgttgtaaacaaagtgcccttaacaggaaagaagaaagacaaatctgactgaaatatagagatacacttgcgctccacagcactgtaatgccagtggcattgaattgctaaattatggactacaaccaagtcaactgttttggacgtttatcttctaaactgctgtgttgaaagtattgatgactggctttcatctaaaaagaagagaccaatacgagcacagtatatgaaggtttctcatacttaagttccaggtttttatctggtaaaatgttacacttactcggttgtaactgaagatatggtatgtttgaatatttactataagtctttcagtttgactaaaaatgtgaaagttgaatttagtagatgatcttcacagttccatatgtataatgtgccaggtaactcacctgccccttaagaagggaaccttgaattacataagccgtacctttgatgtgcctaatagtttcagatgtcttagttttttataaccatagttgattaggccaagaggcattcatttcttatttaagctggcaaaattagcaggaattagagaagtttaaaaagataaatggttttatgataatgttaaccatcttttgttagtaaatatgcgttctattattttaatcattgatgccttacaaaagaaaacatcttttctaataccctgaatatgtgctgttcttagaatcatctatggattcttttaaaggttgtttgtgaaattagttttccctttttagaatctcaggagtagtggggtaaagacatttcctgctgtcagtggataagacagagcttgttaactgttttggcagtagttaaaatcaaattgtacacttctcagcctgggttcatgcttcatcattaatacacctcacagtgcctaaggaacatttacttactggtcagaaggtattttggaagagtttcatattaaggaggaacaaataataattttaagttcttaaaaattacctaaaacaccccaaatataaaaagaagccttcacacctattctgtctttaggatgtcttaaattattagcagtactccttttttaaaaacactgtaaaagtaaccacaaatatgtgaggacttactattttaaatggaatggaatgagctccatagattagttttgaatataaagtatataaaagtgcatcagtggtttatataggctttaaaaacatgttatcttacagtcctttaaagcagccatagagtttgtatcatttttcaagccaatttcagtcagggatttgaattgtttgattatggatgataaatgtgtcatatcttattaatatgtctcatgtctcgttccttcttaatatgatttagctggaattcattttcttttcgtttcatgtttaatttcataaaacgtttaacaattggcatatatacttggcattcctgtccaccaaggattgtaatccaagcctgggaaaatcttaaatttctttttacttaaatctggaaatttgtctccattctgccacctttttttttttttttttatagtggaggggaggaaaggggggtgataccttgcagtaagtaagtcgaaatagcatgcctgaaaatttgaaacagaccattctaacacccaaggcttgtttataaaatacttgagaattacattaatgtggaatcaacagatgcagaagaatataacataacttttaaaagctttcataaataccagcagcaattgtaagcaaatctacaaaggttcttgaacctttctattatatacaaaactgaaaagtcattaaggagttcaactaatcaggaattaaatggtcatttatttcatgcagtatgatttaaggtatttcttgagattctggtcaaatgtcataatcagcaaacgggattaaaaaaaaaactccaaaatcactaaataattatctaaataatggtattggagaacttgtttcctgctatttggaagagattgttgcttcattgctagtttgtatttctaacttctacagttatagactccactgtgctttgtgtctgaatttctcagtatagacattttgtttactgtatgcttgcatatttattttcaactttgtttgtctttaaaattgcttgaggaaaaatggttgtaattaatttctgctacagaaaagccacctggtacgttttgtctcatcaggattgttttaaattctaaactataagtttgttcagaggggcttttgcaatgatagcagaaaactgtacaaatgtacagttagttatagaggttcttgttgaaatgaacttaccatctgatgatatgtatgtacagctgtgtacttgagtcttttttagtttacttagaaagactagcagtttgacctgttaaacaggactagttcaagtcaagaaactaaggttgttgtatacacctggaggcatctgttattcagcttatcctttgagtgggtatttggcacaatgaggataaacttatgtgacccacttgaatggctgatctaataatgttgacattatgcattctgtacttagtgaaatgtcagatgaaaataactgatgaataatttttttgtattaaagggatgggaaaagaacacatgaatttgttaataaagcactatgatctgcaaaaaaaaaaaaaaa

SEQ ID NO: 4466 - protein, 116 aa, Homo sapien
MNQTDKNQQEIPSYLNDEPPEGSMKDHPQQQPGMLSRVTGGIFSVTKGAVGATIGGVAWIGGKSLEVTKTAVTTVPSMGIGLVKGGVSAVAGGVTAVGSAVVNKVPLTGKKKDKSD

SEQ ID NO: 4467 - DNA, 4415 bp, Homo sapien
gaccgcggctgcaggaacggaggcggaaggggccctgcggcgacgacgtcgtcgacgggggtggccgtgggagctgagcacggagaagactccctctctcggaagccggatcccgagccgggcaggatggatcaccaccagccggggactgggcgctaccaggtgcttcttaatgaagaggataactcagaatcatcggctatagagcagccacctacttcaaacccagcaccgcagattgtgcaggctgtgtcttcagcaccagcacttgaaactgactcttcccctccaccatatagtagtattactgtggaagtacctacaacttcagatacagaagtttacggtgagttttatcccgtgccacctccctatagcgttgctacctctcttcctacatacgatgaagctgagaaggctaaagctgctgcaatggcagctgcagcagcagaaacatctcaaagaattcaggaggaagagtgtccaccaagagatgacttcagtgatgcagaccagctcagagtggggaatgatggcattttcatgctggcatttttcatggcatttattttcaactggcttggattttgtttatccttctgtatcaccaataccatagctggaaggtatggtgctatctgcggatttggcctttccttgatcaaatggatccttattgtcaggttttctgattattttactggatatttcaatggacagtattggctttggtggatatttcttgtacttggcctgctccttttcttcagaggatttgttaattatctaaaagtcagaaacatgtctgaaagtatggcagctgctcatagaacaaggtatttcttcttattgtagagactgcatcaacccgacattcctttcttataccaatgtgaaatttccagatcatctgtaaacctacaactttaatagaagactactaataacagaagacaaattagtgaagaaaagacggagtttcgaaattgaatggcagggtggtttttgcttacaagccatttctgttcattctttaagtatctatatttcatttgttttgcacatatgcatatgtgcccatttaagatatttgcatatacttgatagaaaccataaagttgtagcagttaagtccagtcacatttggttaatcagtgtttgatataattgaaagagttgagtggataaacagtcttccagcttgtaaatgccattgacttctgacctgacatttagtataataaaaatgaaattcttaaccatgtcaaatgatttagtttctggctcttagactcatctggcagttctacacatgaaacatcttttgttatataaggtgtattgaaacctgcagtgctgattattagaaaggatttgtcggatttttgaacatgatatttacattattatttaggaaaactcttcctgtaaataaccatgcataacttactttctgcaatgttttcttagaaattgtgtccagatagctttcactaattttaaattaagtgaactaaatatatatgtgtatatgtatacacatatatatacacacacacatatatatatttagaaacgtgagtgttaaagatagaatttgttttaggacaaattttaagaaaatgtgggaataccaaatgtcctttataagaaaaataaattttgttttaagggacataccagttttagggattttcagatgggaagctgcatttttaggattgcccatcttaagagatcttgcaggaagagattgtattagatattatatttatttcatttaagataattttcaaagttaattttctaaataagataattctcatttgtgtttgtcttttaaaaggccaataaaatatctttcagtatcattgtaataattttttagagtttaatttgtaaagcttagcaaataaaatcttgtactatgaatagcttcttgctttatgactttaggattaacttgtaaaaaacatatcctgaactgagatatgcaaaatactcattttcaagttatggaaatgtgtttgtggcatataggactgtggggtctgtgtgtgtagtgagagtgtgtagccactattataactggaatttaatttacattcataaactactatatttcccatcttgcaaatcattttatgtctcatctgtttttcctttcggttatatctttggttttgaataccaacatttaaaatgatggtattttatcttttaaacttaaaaattatttaatacagctatatggaccttataaaattgatttcttatttattattagacattactactaaaaggtacatctaactattcagggacatttttccatttccaaaaaataaaatttattatgctttataacctcttctgtattttctaattttttcattgtctttgataaataaaacagttttgttttgctaatatagcctattttttgttttgtctcattcagtttactttcctgcgtagaatttttattgttatattaaaatttttattgttgtattaaagtacctgtgttacaccccttgaagtaagacagtagcatggggtaaagaaaaaatatttagtttagttgcctaatttggaagttaattaaaattaaactgtactaataacatattcaaactcatgctggatctctttcatattaatttcttatagacctgtactttattctttcaataatttttaaatgaaattaagctttgctacatggtaattaaataattactaggaagcttagctatcaaacatcgacttactaaaatttcattttagcttttatggtatatgtgcttgttttctgaatatggatacatgttacttttgatccagcatcaaaacttcactttttgttttgacttttccccccaaatctgtaaggttcaagtatacatattactgaatcctctataattggcataattcaatggtagccttaaatctcatcatgtaagcaggggaatcagaatgttattttcaagaacttaatgttcccttcagatatataaaatcctgcatacttcatttcctgtgagcttgaacagctgctgttgtgttttggggatgcttgatcatctttgcactctgccttaaagattgaaaaatcaaaactcttgttagggtatctaaacatttttgagtgtgaactggggattggaagttaatacaaaaaaatttcaaattatttctattgtaaatgaataagctagtcatggctaggataatccattttcatgtatttatgcaataaactgaattttaaggcaaaaacaacacttttctatatagtgtatgcaggacagattttagaaacttagattaaaatacaaatcccattacatttggttaaaatgaatctctgcttaatggaaaaaatactaatctttagcctattttgagtctataagatatatttcattttagacatgccttctaagttgttcacagatttttacctgctaaaacaatattatttccagtaaaacctctcctaacaggaaaagtggagttcaaaatatccaattggagaaaaattcagagttccttcattaaatataatttttttcatctagtatgtactatttcaagaagtgcaaaaagtaatgatagtgaatgtgataccatacttaactaaggtaatatatatccttagtttgctcaaaagagtcctggttattcctgttttctcagcttaatagtgcctcatcgtactctcaaaagtgttctaatttggaggataagttatatgatcatcctgtgtataattgtagactgtaccaagaagcaactaccttagctccactgccctttgagggatggaactggggtaagggcaggagccagttattattgccacagtgttttctaatgaaccatttggcctgtagaagaggaatagtattttttttaatagttgtatttgaatgattccagcttatcgtaaatactaaactgaatggcttttatatttttaactgctgttaaatgttattttagcatttattagttgtttattatttaattcttcaaatagtcatatgaaaacatatatttgataaaggtcaattgttagatgataatgtgccattcattatcataggaatgtccttgcccatatataaaacatgctggcatgtattttacttgttaataaagttgtatagatgtggaagtgtgaacctgtgatgcatccttttcaaaatcagtttaagattcgcatattatcatgactgtgacctcactaaactgtttatgtgacaaacctttcaagattggagatgaaaacaacacttgtgaaattaggttggggttgcaacatcttttaacttctcagttatttgtatgtcaggaaacagattgtggtttaattttaataaacaaaatatcatctttttgaaaat

SEQ ID NO: 4468 - protein, 284 aa, Homo sapien
DRGCRNGGGRGPAATTSSTGVAVGAEHGEDSLSRKPDPEPGRMDHHQPGTGRYQVLLNEEDNSESSAIEQPPTSNPAPQIVQAVSSAPALETDSSPPPYSSITVEVPTTSDTEVYGEFYPVPPPYSVATSLPTYDEAEKAKAAAMAAAAAETSQRIQEEECPPRDDFSDADQLRVGNDGIFMLAFFMAFIFNWLGFCLSFCITNTIAGRYGAICGFGLSLIKWILIVRFSDYFTGYFNGQYWLWWIFLVLGLLLFFRGFVNYLKVRNMSESMAAAHRTRYFFLL

SEQ ID NO: 4469 - DNA, 4585 bp, Homo sapien
gaggaggccgcagcagtcgccgcgcgaacatggcggccgaaatccactccaggccgcagagcagccgcccggtgctgctgagcaagatcgaggggcaccaggacgccgtcacggccgcgctgctcatccccaaggaggacggcgtgatcacggccagcgaggacagaaccatccgggtatggctgaaaagagacagtggtcaatactggcccagcatttaccacacaatggcctctccttgctctgctatggcttaccatcatgacagcagacggatatttgtgggccaggataatggagctgtaatggaatttcacgtttctgaagattttaataaaatgaactttatcaagacctacccagctcatcagaaccgggtgtctgcgattatcttcagcttggccacagagtgggtgatcagtaccggccacgacaagtgtgtgagctggatgtgcacgcggagcgggaacatgctcgggaggcacttcttcacgtcctgggcttcgtgtctgcaatatgactttgacactcagtatgctttcgttggtgattattctgggcagatcaccctgctgaagcttgaacagaacacgtgttcagtcatcacaaccctcaaaggacatgaaggtagtgtcgcctgcctctggtgggaccctattcagcggttactcttctcaggagcatctgacaacagcatcatcatgtgggacatcggaggaaggaaaggccggacgctgttacttcagggccatcatgacaaggtgcagtcgctgtgctaccttcagctcaccaggcagctcgtctcctgttcctcggacggcggaattgcagtgtggaacatggatgttagcagagaagaggctcctcagtggttggaaagtgattcttgtcagaaatgtgagcagccatttttctggaacataaagcagatgtgggacaccaagacgctggggctaagacaacatcactgcaggaaatgcgggcaggctgtctgcgggaagtgcagcagcaagcgctcaagttacccagtcatgggcttcgagttccaagtccgggtttgtgattcttgttacgactccatcaaagatgaagatcggacttctctagcgacctttcatgaaggaaaacataacatttcccacatgtccatggacattgccaggggactgatggtgacctgtgggaccgaccgcattgtaaagatctgggacatgacacctgtggtgggctgcagtctggcgactgggttttctccgcactgatctgagagctgggcggcgtccacacctaagaacagcagctccaccaaatgaagtccctctcacgcagctccacagcgctgtctcgtgaatggacagtagccacttacaaacaaatcaacattcttaaaaagaaaatgtaaaggtgtgttttggggcatttgtggaacttacccatggggactaatatggaaaaggtctgtccatagtggttccctgaagactggaattacttcagcaaaacttccccatgaacagctaatgtgtagtgaaagaatgagctagcaaatgagttttagcggggacaaaaaatcaaacaaaaaagtgaatgcttagaaccttctcaaagcagtcacaagtacagacacttcacttagcctagggggccttccagggttcttgtggctgttgtcagagcaggagctgggggagggaagacttgttctctctttcttgaggggtggcattaggaacttacgaaaccagagacctttccctatgacttggcagtatgtgaatatcctctacacttagttattgataaacttcttaaagagatctgttattttcaggtagtgccataatctgcacttagcattggcttgcttcagttgtttctcttcccagccagtatgccacaggtgaactttcgaggttgtcattaagtaagttgtgaaatttctgtaataacaaaggcagtccgcattcttccctttcccccaaattcctagggcaaaacttttttatggtgctgttaacatgggagtcacacaagccgcctgactttttctcattgccattagtaatgactgatggaaaacccagccaccactgtgatgcgaaatgatcagtctgttgcctgaaacagcccagtcctcttaactgaaacagcattctacttcttgttccaagatgagcctctgcaatattctggcaatttaatataccccctacaaaagcactccacagcttttacactattttgactttgagttataactagtattattcatgttttcataaaaagaagttagtgacccagagctataatcatccatcaagtcttccacaataattcccaactcataaattgctttcctaacaactagcaaaagctattgttcataatggcatttaaagcttttgggcactgtgtaccaggatgaggaagagaagaaatgaggagcctgtcttttaatattccagtatttgtgtgtttgattttttttgacaacagtacatatatctatttctctagggatatggaagtaagtggagaagggcctacctttttaaaggacaaatataaaaatagcaacagtatctttgctaatcttactaatggatattgattaaaaaaaaaaaacctcagtactgcatcactgtgttgggatcgtaccaggacaatagggtcattccatatgataaaactaaaggactaaatttgttttataatgatgtcttagagggactgaaaagtttaaggaggcgatcgaactaaaatgtcttaatggctgtgtgacacacgtaaggaaaggaaagggggtcacgcacatcatgtactggaatgatctgcattaaacattgacttgtcttcagaaataagactgaagggttttgttgttccttagagttttcgtgttacatcacctaaagagatttcttttaaaaactttctagactctttgcaaaatgtatattactaacatagtttggaagaaaaattgagtagtggtaagttttgttcaagcacaatgttgaatgttaagcttcctgtattaattttagttcagttaatggttcagcccatacaaaggtgctatcctagggattttatgaattcctgaaaggaaaatagaatatgatcaattccttgccctgtggaagagtgcagaactgtggttttgttttcctttgacttctgtaaaatgtgaccgtttgacatctgtggtagattgaacggaatatcacagctgctgagtttactccatagctttcaaaccttttttattttaagaaattcttgaaaaaccctatgttccatgggaacataaagttattatagtgcctcctaaggggttaatataaatcaaggaggaagtttatatttaaggaagaattggagtgacgtatcttagaaaaggaaaggctgatgtttccatatagcttgctctccaccaggcctatcatttttctttttagagacaaacgtgacaggctagtcttgtctctctcatatgctaggtagcaaatggggtgatatttttatagaagtgggcaaaaattattttctcaattttactgagtaggcacagaagaaaagtacagataggctgatggttattgccttattttgactgcatttctcttaaatggatcatttaaattagttcttcaagtaacagtttactggttgttccattcctgaatatgcaggctaatttgtacagatagggattaaggaatacagactattagagaagatccttatatttacatctagtatatatgtggtaaggaaatgccgattcttcattataaacaagttttaaaattgttctttcttagttcaaatgatagcaatacccctatagcattaggtagaaacaaattattcattacatcgtaaatctctttactatgtcctagctctgtcctgctacctaaaggatataaagaaatattattgctctagaatgtattactttgttctcccatgaaagaattcagtttgttagtacctatatttttaaactggtgaaactgacccaaatatgtaataaataccatagtagctcagacccaaggagatatttttctaaaatcagttttcgttaaagtacttctacttccgttattggatatggtatctcctaaagtgtaaaaaaaatctgttactatatagtgataaaccatctgctcatcgtaagtgtaaggcttaacaaataagtaatacatgctatatttattcaagtgtctattgcttaattgttaattgtgagcagatttattgaatgcctattctattttctgcagtttacaatacaataactctttgagtaagttgaagtttaattgtgcaacaaatttgtattagagtacaatttaaagtgtttttctctatagccttttttgactggggaagcaaggggtaatgttaattagtacactttgttcttgtactagctatgtttctataagatatggtgccctgtgtatcccagagatgctagaaaactgttctttgctcctatttgtgggttctgtttttgtgggttttttttttttttgagaaaatgtacacaataaaacattccttgcttgtt

SEQ ID NO: 4470 - protein, 410 aa, Homo sapien
MAAEIHSRPQSSRPVLLSKIEGHQDAVTAALLIPKEDGVITASEDRTIRVWLKRDSGQYWPSIYHTMASPCSAMAYHHDSRRIFVGQDNGAVMEFHVSEDFNKMNFIKTYPAHQNRVSAIIFSLATEWVISTGHDKCVSWMCTRSGNMLGRHFFTSWASCLQYDFDTQYAFVGDYSGQITLLKLEQNTCSVITTLKGHEGSVACLWWDPIQRLLFSGASDNSIIMWDIGGRKGRTLLLQGHHDKVQSLCYLQLTRQLVSCSSDGGIAVWNMDVSREEAPQWLESDSCQKCEQPFFWNIKQMWDTKTLGLRQHHCRKCGQAVCGKCSSKRSSYPVMGFEFQVRVCDSCYDSIKDEDRTSLATFHEGKHNISHMSMDIARGLMVTCGTDRIVKIWDMTPVVGCSLATGFSPH

SEQ ID NO: 4471 - DNA, 2457 bp, Homo sapien
acaggaagtgaagagcttccgccgggagaccgcggctgcaggaacggaggcggaaggggccctgcggcgacgacgtcgtcgacgggggtggccgtgggagctgagcacggagaagactccctctctcggaagccggatcccgagccgggcaggatggatcaccaccagccggggactgggcgctaccaggtgcttcttaatgaagaggataactcagaatcatcggctatagagcagccacctacttcaaacccagcaccgcagattgtgcaggctgcgtcttcagcaccagcacttgaaactgactcttcccctccaccatatagtagtattactgtggaagtacctacaacttcagatacagaagtttacggtgagttttatcccgtgccacctccctatagcgttgctacctctcttcctacatacgatgaagctgagaaggctaaagctgctgcaatggcagctgcagcagcagaaacatctcaaagaattcaggaggaagagtgtccaccaagagatgacttcagtgatgcagaccagctcagagtggggaatgatggcattttcatgctggcatttttcatggcatttattttcaactggcttggattttgtttatccttctgtatcaccaataccatagctggaaggtatggtgctatctgcggatttggcctttccttgatcaaatggatccttattgtcaggttttctgattattttactggatatttcaatggacagtattggctttggtggatatttcttgtacttggcctgctccttttcttcagaggatttgttaattatctaaaagtcagaaacatgtctgaaagtatggcagctgctcatagaacaaggtatttcttcttattgtagagactgcatcaacccgacattcctttcttataccaatgtgaaatttccagatcatctgtaaacctacaactttaatagaagactactaataacagaagacaaattagtgaagaaaagacggagtttcgaaattgaatggcagggtggtttttgcttacaagccatttctgttcattctttaagtatctatatttcatttgttttgcacatatgcatatgtgcccatttaagatatttgcatatacttgatagaaaccataaagttgtagcagttaagtccagtcacatttggttaatcagtgtttgatataattgaaagagttgagtggataaacagtcttccagcttgtaaatgccattgacttctgacctgacatttagtataataaaaatgaaattcttaaccatgtcaaatgatttagtttctggctcttagactcatctggcagttctacacatgaaacatcttttgttatataaggtgtattgaaacctgcagtgctgattattagaaaggatttgtcagatttttgaacatgatatttacattattatttaggaaaactcttcctgtaaataaccatgcataacttactttctgcaatgttttcttagaaattgtgtccagatagctttcactaattttaaattaagtgaactaaatatatatgtgtatatgtatactcatatatatacacacacacacatatatatatctagaaacgtgagtgttaaagatagaatttgttttaggacaaattttaagaaaatgtgggaataccaaatgtcctttataagaaaaataaattttattttaagggacatactagttttagggattttcagatgggaagctgcatttttaggattgcccatcttaagagatcttgcaggaagagattgtattagatattatatttatttcatttaagataattttcaaagttaattttctaaataagataattctcatttgtgtttgtcttttaaaaggccaataaaatatctttcagtatcattgtaataattttttagagtttaatttgtaaagcttagcaaataaaatcttgtactatgaatagcttcttgctttatgactttaggattaacttgtaaaaaacatatcctgaactgagatatgcaaaatactcattttcaagttatggaaatgtgtttgtggcatataggactgtggggtctgtgtgtgtagtgagagtgtgtagccactattataactggaatttaatttacattcataaactactatatttcccatcttgcaaatcattttatgtctcatctgtttttcctttcggttatatctttggttttgaataccaacatttaaaatgatggtattttatcttttaaacttaaaaattatttaatacagctatatggaccttataaaattgatttcttatttattattagacattactactaaaaggtacatctaactattcagggacatttttccatttccaaaaaataaaatttattatgctttataacctcttctgtattttctaattttttcattgtctttgataaataaaacagttttgttttgct

SEQ ID NO: 4472 - protein, 242 aa, Homo sapien
MDHHQPGTGRYQVLLNEEDNSESSAIEQPPTSNPAPQIVQAASSAPALETDSSPPPYSSITVEVPTTSDTEVYGEFYPVPPPYSVATSLPTYDEAEKAKAAAMAAAAAETSQRIQEEECPPRDDFSDADQLRVGNDGIFMLAFFMAFIFNWLGFCLSFCITNTIAGRYGAICGFGLSLIKWILIVRFSDYFTGYFNGQYWLWWIFLVLGLLLFFRGFVNYLKVRNMSESMAAAHRTRYFFLL

SEQ ID NO: 4473 - DNA, 616 bp, Homo sapien
gtatgacgaacaaatagcattttgtacccgcactacaatgcaggagaacgccaaacaccgctttattgcattcaaaccttctaaggcacgtcagccagccctggccttgtctacagccatgattatctccttaaagagttaactctaaaaaaatattaagctcaagaaataacagctcaaatactcctaactaattaaaatcaatagtgagaggcagaatacggtaaaagataacatattagtattattgatcacagatcaatttcagagtacttaaaacaggaataatcagctaccacatcttgagcttaatatttttttagagttaactctttaaggagataatcatggctgtagacaaggccagggctggctgacgtgccttagaaggtttgaatgcaataaagcggtgtttggcgttctcctgcattgtagtgcgggtacaaaatgctatttgttcgtcatactgttgtcagcagatgagccgcccactacagacggctactgcccagggacctgcccaggccccacccaagggctcccaagggttgagatttctgcagacctatagccagcacacttagtcctgccctatatagagttcctcttcgggtaa

SEQ ID NO: 4474 - protein, 46 aa, Homo sapien
YDEQIAFCTRTTMQENAKHRFIAFKPSKARQPALALSTAMIISLKS

SEQ ID NO: 4475 - DNA, 1296 bp, Homo sapien
ggcacgagggccactttccggccggtgacagagtccagcggagttgtgggggccggaggcgccatgggagccactggcgacgccgagcagccgcggggacccagcggggccgagaggggcggcttggagctgggggatgcgggcgcagcggggcagctggttcttacgaacccttggaacataatgataaagcaccggcaggtgcagcggaggggccgccgctcacagatgacaacaagtttcacagatcctgccatctccatggatctcctccgagctgtcctgcagcccagcatcaacgaggagatccagactgtcttcaacaagtacatgaagttcttccagaaggcagcactgaacgtgcgagacaatgttggggaggaggtggacgcagagcagctgatccaggaagcctgtcggagctgcctggagcaggctaaactgctcttttcagatggagaaaaagtaatacccagattgacccatgagcttccaggaataaagcgtggccgtcaggcagaagaagaatgtgcccatcgaggaagcccccttcctaaaaagaggaaaggacggcctcctggacacatcctgtcaagcgaccgggcagccgccggcatggtatggaaaccaaaatcctgtgaaccaattcgccgggaaggccccaagtgggacccagctcgcctgaatgaatctaccacctttgtgttgggatctcgagccaacaaagccctggggatggggggcaccagaggaagaatctacatcaagcacccacacctctttaagtatgcagctgacccccaggataagcactggctggctgagcagcatcacatgcgggcaacagggggcaagatggcctacctcctcatcgaggaggacatccgggaccttgcggccagtgatgattacagaggatgcctggatctgaagctagaggaattgaaatcctttgtcctaccctcctggatggtggagaagatgagaaagtatatggagacactacggacagagaatgagcatcgtgctgttgaagcacctccacagacctgaggccgggtcccctggccacacttggcagccctcctccaaagccctcttcctcacgtggctgaggccaccgctgggactgctcctagatggatctcagcggcattaagctgtgcctgagcgagtttgtagtgactcactgcacagcacccccagactagcatgtggttctatatttgtaaagttattgggataagaaacaattaaacagtttgtagtaaacacagaaaaaaaaaaaaaaaaaaa

SEQ ID NO: 4476 - protein, 329 aa, Homo sapien
MGATGDAEQPRGPSGAERGGLELGDAGAAGQLVLTNPWNIMIKHRQVQRRGRRSQMTTSFTDPAISMDLLRAVLQPSINEEIQTVFNKYMKFFQKAALNVRDNVGEEVDAEQLIQEACRSCLEQAKLLFSDGEKVIPRLTHELPGIKRGRQAEEECAHRGSPLPKKRKGRPPGHILSSDRAAAGMVWKPKSCEPIRREGPKWDPARLNESTTFVLGSRANKALGMGGTRGRIYIKHPHLFKYAADPQDKHWLAEQHHMRATGGKMAYLLIEEDIRDLAASDDYRGCLDLKLEELKSFVLPSWMVEKMRKYMETLRTENEHRAVEAPPQT

SEQ ID NO: 4477 - DNA, 4790 bp, Homo sapien; identical to SEQ ID NO: 4388

SEQ ID NO: 4478 - DNA, 5925 bp, Homo sapien
  Unsure 89-112: Unknown base
  Unsure 517-541: Unknown base
  Unsure 2887-2915: Unknown base
  Unsure 4943-4971: Unknown base
gcttccagttgggatggggaaggcctttgtgtgtgtattggggggaggggttaaaaaataattatcccaaactttttaatgtactgccnnnnnnnnnnnnnnnnnnnnnnnnccactataccattttaagttctgacctcaggcctccatttgggccgatggcctcttggaggcttaaagttttctgtaccttgtgatgaatgttaataggtgtttttattatacaaagctgaatgtcatttctcgtttgtagctttctgtcactcattccatcttccttcagacatcaccacgtttctctaaagtcagaaaacattccgttttggtctttttcaaaaaggtcccaaatgctgcactctacacatgaaggccctctcacacagacgtgacgtcctgccagaaagagaatgaatgacagaaaaaaaaaagagagacaaactctaggaacaatgccgattcattccacgcagcagtattgggggtggttcgggggaggggtgtttcggattttcttttnnnnnnnnnnnnnnnnnnnnnnnnnggcagcaaccattaataaatgccaccacattctaccagcacaaggaaacataggcagcactgaaaaaaaaaaaaaagctcatattaattagactgacaatatggccttggaaggctctcccttgtggaaccaagttgccatgggccttgggtgctctgcgataacgggtgtgggttggttttgtttgcaaaatggccaaaaaaaaaaaccggcttccccgagcagctgccctgaaagtaggggtggcggcggcggcgctgagtttatacattagttcagacctacttggtggcattaaactgtttgaatgcaaattcgatttcagattgaacttgttaagggagttaacgagggctgagttcagcaaatgctaaagtgttaatttcaaatatgcaaatttggtactgcagtttgttatgcaatattatatcaccaacccagtatcacaaaaactcatagaagatatcatgtaggccctgggctttgggggggtcccaaacatggtatgcagaaatgtgatggttacaggtcagtacaacctcagtccttagaacccctccacacttcagctctgcacccactttcctgtcatttatttatataggactgtagttttttttagttcgagagcctttcgaagcttaatttatattctttctttgtaccttttttctaaaattaccaaagatattacacaaaggtaaattatgttctctgttttatgctttatctgatgaagccaaatatcctcttattgttgatcaaaggaggcaaaagaatttagaggcaaatgacaagcgataggctattgcaacctgagaaagagaactgctccttcatcgtaaatttagaagaccaagtagataatggaaccaaagttgttacttttttctagtagttatttttcctttttctttttgtgtacctctacagagaccaaaactcattctcttaaagagattttatggggctactgcagataaaaataggacacaatattaaaggagctacagaaggaagggagtcccatctcaaaaaaaaaatgaatgtatgccactgcaattagagtatccaataaaggagacagtttagagtcaggacagaaaagcttccataattgaactagattacataatagtatttctagaaaaagagatatttttagattgtatgccacttttgtttaagaactgtgctgtgatcactgtattaattttggtttatcttggcatatatccttcagtttgtttttatttttaatttttcctttttttccgattaggctttggtcagcatttttcatttaaagaaaagtaacactcccatccactcataagcttggtacaaaaacttctctggcagttacttttgaagcttcactctgctttctgtataaagggcagtctgtggtcacgcaagactttaaaaaaaaaaaaacaaagagcccataaaaacagacaaaaaacttttccaggcagcttcatgatgtgcaggcagtagccagacagggtcatgggaagggggccctgtgcttctaaactgagtggttgctggttagtttggtattcaaaagaggataaaaatctggtagattagttcattctcagcatgtgtagctagacatgagtaaagataacagcatgagaaactgttagtacgcatacctcagttcaaacctttagggaatgattaaaatttaaaaaaaaaacatttcactcagttgcacttagtcgtatgtcttgcatgcttagtctaaagactgtagcaaaaaaaaaaaaaaaagaaaaattagattttacatatctttgcaggtatcacagccttgcagaagaaccaactgaaaaaaaaattctcaggctttacagcaagcaaacttcactatgatttttacaattctgattctgtatcccctgggggttatcccagttgcttctttaggatggggtttattacgttgtacatatatcccgatgtgtctgtgtgaatctttgtcttttttgggggagggcagagggcggttctttttttagatattgttcctaaaaaggaataaatgcatacacctgtttgtcaaaacacctttgctttttgtgcaactgctttatattaacgatactaaaaaaaaatagctttggaaaaaaaactactgtatgtaacggaattgcagaatatgctgcacatgtattttatttagttatccttgctttaagaatattggatgacatttcctgacatgtgggagggagaaactccctaactttttttttctgcttttaaactgtaacatagttgaagatttcttttttctgttctcattgattggagcattttgtacaagttttgtannnnnnnnnnnnnnnnnnnnnnnnnnnnncgtgtgtgttaatctgttttttgatacattcctatcccttgtgtttatcctaccactgccttcctggctatcttaaacaagttcatacatttgaaaagaaaaaaaaatgttgtttaaaaaatgttttctcctgctgcagtaaatattttgcatgatgaaattccagggtcacacttttccaagtttatcagtgaagtagtgattaacaatggggagtgtcaaaactattgaacttttgtataacacaaaaaaaactttacaaggtgccaagatgtaaagaaaatctgttactttttttttctcaaagaaaagcatacattagggaggtagtcccgtgtgtcagacaaatgcactgtcaggaatgaggatccaacctacctgtccctagagtccgtcttgtaagatgagttaggctgccccttggaccagccacaaaatggaatatcaaggcttatgtacatacgtgaagagttaccaccagtcctgccacctttggacagctctaacaccatccccagcatccagtcagacctagtaaagaaaaccttggattcttaacccaagataggctgtaaatcactagcttttttttcctcatgaaaaaaaatagagttaaaaaatatttcctctcttttccatattccagctgaactccgtttccaaaggcacaaagaagagtgtgcttattcagattttgaatctttttggtaccttttggttaatgacatagcctcctgaaattctggatgtcttcaaagtcagttttgcttctttatcctgaaaatcagatttacaatgctgaaggcatttcttgggcccagtgtagctcacgcaatctctgctacccataagccttgatgaagatgatacagtccggactgtgagcatggtgcttcatgtatatgtgctgccagtaacaagaatttttttgttttgttttgttttgttttgataaggcataaaagaaactcattccttgacatcaactgtaattccatcattccatgtctgcggatacagacaataaaaaaaatgttgtgtagtcagtactaattactgacattataagcattctcaaatgcaataaaaatgctggttgttcacgctggtagtaaaagttgccacagcctaagtttgtttccctttctgacctgctgatattgtatgttaggcatatgccttaggtttatcaccagctgcttccaatgcagaattaaaatcaatcttaaagctttcatgatcagggaaggctgaagctcttatcctcaggatttccaagtgaaagtatccacttagagaattgggaagtaaaaaaaaaagagcaagagatgttatcttttctcttgaggaagcacactcttatttttttcatcaaattttataaagaaaaacaaaatgtttaataactagcattaagagcaaactaaaatttcagaggaaagcaactttcatgaataattcattgaaagatttcacagtctggcaagattaggtcatccaaataaaagtgctaatggtcaaaaacatgcaccgtctataatattctcatcaagaaatctttttgcatataatgataaatgcttagattagaacaaatgattttataaaaatattctatcaaaagtatgctagataattgcattcattgaagaaaacagaacttcagtacctaaatattccagaaaaaccatcttaattttgagattttaaaaaaataattagatgcatttaggaaatgtgctgtttctttttaatattactctatagtatatattctagggattaatgaatttgagcatcacctttcaataaaaaattaaattgccaatatgaaagcagtattttaagtggccaaaccgtggtaacataaaaccattacatatataattcagagcacataattcagggcaaaggatgacttgaaaattaacctcccagtctttattctgcaaaacacccaccgatgctgaggatacaagtgaacattctttcccagcattgttttgaaaagcccatattagcaaagtnnnnnnnnnnnnnnnnnnnnnnnnnnnnnaacaagtagattttgctattaagttgcaaactagtgtcctctttgaattaacaattatgccctatctagaaaccccttagtctcaataattagcaaaacatttgaacctttaattctcacctggctactgagactataatcttagggttaattcaaattcctgtaattaccaggcttaaacctaaatactgcttacagcctatccattagtaaccatttaaaaatgtacagatacttcttttaatcaactggaggacctaaaccaagtatgacgatatgttagtgaagattttgctggttgaggcatagtacattttaacttatatttcaggaattgttctcaagcaggaacactcttttacatatttatttcaggcttgtcactctcataaacgaggcagcaaacccaaaatattggctcttcttataaataggcgcctttatataaagaacataaaactcttaagactaatttcacaccaacacaggcagcttcataatagtaaccacctctccctccccactaaaaaagataaaaacaaagtataattagtctttcttattagatttttgtctttgatgatattacgtatttatgtgtagggtagtaatcacaatttatccttcatcttcattgtagttgaatcaaataaaagtattctttattcaaataatgtgaagttgggtgtctcaaaccttcatttaatgaattgatgaaaggtttaagacaaaattcacgttggagggaaattaagttacatacaaaaacactggttttaactgtgggacaatatttggattagaaaaccatctctagatataacctacttatatttatttttaaatggtattttattttttaaaataacaaaacccaatgttgtcttatttccactttgattgtaaaatgacattcaatgcttaataccaaaatatatatctatattcacattt

SEQ ID NO: 4479 - protein, 64 aa, Homo sapien
  unsure 30: unknown amino acid
  unsure 31: unknown amino acid
  unsure 32: unknown amino acid
  unsure 33: unknown amino acid
  unsure 34: unknown amino acid
  unsure 35: unknown amino acid
  unsure 36: unknown amino acid
  unsure 37: unknown amino acid
FQLGWGRPLCVYWGEGLKNNYPKLFNVLPXXXXXXXXHYTILSSDLRPPFGPMASWRLKVFCTL

SEQ ID NO: 4480 - DNA, 4274 bp, Homo sapien
gcggccgccgaggcctcggcggtgctcaaggtgcggcccgagcgcagccggcgcgagcgcatcctcacgctggagtccatgaacccgcaggtgaaggcggtggagtacgccgtgcggggacccatcgtgctcaaggccggcgagatcgagctcgagctgcagcgggtgagcgcgcgctgggccccggggaggctggggccgccgagcaagggaaaaaccgcagcagccccagctggggtccttcccacgacgtccacccccatggccagctcctcagtcagccaagcctggctaaaacgagagaatgccccctcccgcccgttcacttactggtgcccagcaccgggcactcagtgaggccttgcaatacggttcacttgttgaattgaattcgtcaattgttgagcgggccgtgctgccaggcaccgcacgttgtgtgtctgccctactctcgtggaaccaaggtccagtggagagaggaacataagcgaatgaagaaagaagcaatagagtctcagtgataagttcttggaaaaaaggtctttgccaatcctgattcccggaagagagtcggcagaattccttcctttaggcccctctggagccttggccgaccagccacttctgtggtctggggacagtcaccgagggtatcaaaaagccattcacagaggtcatccgagccaacatcggggacgcccaggctatggggcagcagccaatcaccttcctccggcaggtgatggcactatgcacctacccaaacctgctggacagccccagcttcccagaagatgctaagaaacgtgcccggcggatcctgcaggcttgtggcgggaacagcctggggtcctacagtgctagccagggtgtcaactgcatccgtgaagatgtggctgcctacatcaccaggagggatggcggtgtgcctgcggaccccgacaacatctacctgaccacgggagctagtgacggcatttctacgatcctgaagatcctcgtctccgggggcggcaagtcacggacaggtgtgatgatccccatcccacaatatcccctctattcagctgtcatctctgagctcgacgccatccaggtgaattactacctggacgaggagaactgctgggcgctgaatgtgaatgagctccggcgggcggtgcaggaggccaaagaccactgtgatcctaaggtgctctgcataatcaaccctgggaaccccacaggccaggtacaaagcagaaagtgcatagaagatgtgatccactttgcctgggaagagaagctctttctcctggctgatgaggtgtaccaggacaacgtgtactctccagattgcagattccactccttcaagaaggtgctgtacgagatggggcccgagtactccagcaacgtggagctcgcctccttccactccacctccaagggctacatgggcgagtgtggttacagaggaggctacatggaggtgatcaacctgcaccctgagatcaagggccagctggtgaagctgctgtcggtgcgcctgtgccccccagtgtctgggcaggccgccatggacattgtcgtgaaccccccggtggcaggagaggagtcctttgagcaattcagccgagagaaggagtcggtcctgggtaatctggccaaaaaagcaaagctgacggaagacctgtttaaccaagtcccaggaattcactgcaaccccttgcagggggccatgtacgccttccctcggatcttcattcctgccaaagctgtggaggctgctcaggcccatcaaatggctccagacatgttctactgcatgaagctcctggaggagactggcatctgtgtcgtgcccggcagtggctttgggcagagggaaggcacttaccacttcaggatgactatcctccctccagtggagaagctgaaaacggtgctgcagaaggtgaaagacttccacatcaacttcctggagaagtacgcgtgaggacgcctgagccccagcgggagacctgtccttggctcttcctcccaatgcccgtcaggctgaactcgcctcccccgtgactctgcctcgggcctcgcagaggccgctggtcacttcgtcatcattttgcccctggagacgtctttctttgtgccttgatgttgagagcgcctctcttttgagcaaacaagcattctatatgcaaccagagtagaggggacctgctcagcaggtgtgaccagggttctctgaatctgttattgtttttgcttctggaaagttcatttggggtttacaacaactaggatgtgttgggtgagatgtttcagatctggagaaatgagcaggtgtcgggaaatgtgtgacttaaccgtggtgagggctggaaatccaaactcaccaccatgatctgtgaaataaagcccttagcggtgtgaagcatccggtcctttgaacagaagggcctggaaggcccctggggctgagaaagggtccgcccggtggcctggaggcaggcgccgggagcgcagtagcacgtggactgggcaggatgttgcactagcttggggtagatgctgggggctgcggccacggtcagagggccccactgtgaggcgtgggtgtgagccaggctgcaggaggaactgggcctccgcttcccagcaacgcagccaggcctgagaattctgtgcgcccggcgggctttgggaatgaggggttcccttgaacatgcgtaggctggaaccccgtctgagaggtctccctgaatttcagtgacacatagtgcagcccggcagtgtcccacttccgtggagagagccgctggaatggtgtggacccatcccgcgggtgaccggtgcctgttctcccctgaccgagcctgtgagcacatcgccccctgctggcgacagcggggaaatgagggctgaaaatatcctccccacaagggcaatccccgggacctgccgagcagccaaggccctgtcctttcttgaatggtggcgagctgaatctggtcggtttcctagcttttaggtggtaaaagtgcctggcagcttggctgccgtggaggagtcagtcgtggttggaggttcattgccgtgctttcatgcagagtgttttgccttcatgttagcttccggctcccctcccaggctgcagactctgacctgtggcatcaggcttctcccagtacaggagggtgccatcccccagcatgcggcttctctgccattagcagccctgggcgggccgaccacactcgaggctgcggtgctacgggcttagccctcgcctccctcactgggagcttccccatcctccctgccttccccagtgggaagttagggaagctcaggagcctgggaccccgcatgtcccaaaatgggattggagaagctggagagaaagcagaagaggccgaggagtgaggcagcagcctctatgctgtgatttccacaccgggtccgtgcagaggaaacagaaactcccaactgtccttacccaccgacatcacagcccctatgaagaaagtagccacaatctcaaataacaaaagggaatgttctaaaactttttcttccttaaaaaatggagaaaattgcacttgtgcttgctgtgtggtatataaaccaggattagtcccagggtcgtgaggtttctggtgaaaaggttaaatcgtagaagctagtatattttttatatttttgtaacaattgcttttttcatgggggaggcggggttagtatttatagtcctaacaagtccagtaattttttataaatcttcagattataaacagcccctaaaaactttacaacgtttacacagttttttaaaaagagactgtatacacttgatttgctttcaaaataaataaggtcagctagtctaggaggttaacgtcgggtaggaatgctgatcatgataggtttggttttctacagattctgttccggtgcctttcctatccaggcaccacctgagaaagttgtcatttgaggtcgcacttggaagttacatctgtgaagtttctgtcattcgtccagatctgtgtgtgtagcatgtgctgaggaagcacgtgctgggctgtgcctcagacagtgcatcaccgggcacccagaggcttgcctggctattcctgttctggtgtgtgtggagtgttggggaggaacagatgcagatcaacctgtggctgttttcccgtctaggttctcacaggtatctcctgacagaggtacttaacaatggctctgctggaaatttctataaataaaatgtccaaaatggtgaaaaa

SEQ ID NO: 4481 - protein, 423 aa, Homo sapien
MGQQPITFLRQVMALCTYPNLLDSPSFPEDAKKRARRILQACGGNSLGSYSASQGVNCIREDVAAYITRRDGGVPADPDNIYLTTGASDGISTILKILVSGGGKSRTGVMIPIPQYPLYSAVISELDAIQVNYYLDEENCWALNVNELRRAVQEAKDHCDPKVLCIINPGNPTGQVQSRKCIEDVIHFAWEEKLFLLADEVYQDNVYSPDCRFHSFKKVLYEMGPEYSSNVELASFHSTSKGYMGECGYRGGYMEVINLHPEIKGQLVKLLSVRLCPPVSGQAAMDIVVNPPVAGEESFEQFSREKESVLGNLAKKAKLTEDLFNQVPGIHCNPLQGAMYAFPRIFIPAKAVEAAQAHQMAPDMFYCMKLLEETGICVVPGSGFGQREGTYHFRMTILPPVEKLKTVLQKVKDFHINFLEKYA

SEQ ID NO: 4482 - DNA, 1676 bp, Homo sapien
gctcgccggtcctcggcacgccgcccgttcgcccctgcgctgtccgcccttcccctagcgttacttccggtccctcgctgagggggttcgtgcggctcccaggaggcgtgaaccgcggaccatgagcgtgggcttcatcggggccggccagctggcctatgctctggcgcggggcttcacggccgcaggcatcctgtcggctcacaagataatagccagctccccagaaatgaacctgcccacggtgtccgcgctcaggaagatgggtgtgaacctgacacgcagcaacaaggagacggtgaagcacagcgacgtcctgtttctggctgtgaagccacatatcatccccttcatcctggatgagattggggccgacgtgcaagccagacacatcgtggtctcctgtgcggctggtgtcaccatcagctctgtggagaagaagctgatggcattccagccagcccccaaagtgattcgctgcatgaccaacacacctgtggtagtgcaggaaggcgctacagtgtacgccacgggcacccatgccctggtggaggatgggcagctcctggagcagctcatgagcagcgtgggcttctgcactgaggtggaagaggacctcatcgatgccgtcacggggctcagtggcagcgggcctgcctatgcattcatggctctggacgcattggctgatggtggggtgaagatgggtttgccacggcgcctggcaatccaactcggggcccaggctttgctgggagctgccaagatgctgctggactcggagcagcatccatgccagcttaaggacaatgtctgctcccctgggggagccaccatccacgccctgcactttctagagagtgggggcttccgctctctgctcatcaatgcagttgaggcctcctgtatccgaacacgagagctacagtccatggccgaccaagaaaagatctccccagctgcccttaagaagaccctcttagacagagtgaagctggaatcccccacagtctccacactgaccccctccagcccagggaagctcctcacaagaagcctggccctgggaggcaagaaggactaaggcagcatctgtcccctctgtgattcagagcccttagttgagagcccctgccgcccctgccacccccctgccccgctcccaccattgcccctcctcagctgtgcaaggagaaagcatgcttaggaagttttcaggtccttgtgataaaacctccttaaatctgttcagaccaagcaatgcgagcttcctctcctgtcccatgttggaagttgctctgaaggggtggtagatgctggaagccagacacaaccctgcgtacgctgctcagttggtggagactggggctgggactggagtcagcccagctgggaggaggggctggggaggatctgcagctgaagcccgaggcagggttggtgtgatgccaaggcaaagtggtgaggagaaaacaggaaacgggctttctctgaattggtaaatgggaaagaagtgagcaacttaagattgtcacaattaatcacaagtgtacaggattagactgggtttatatttaactcttgcttcataggtgtaccatttaaagagtgttatttaatgctaagtttaactgctttaataaagtttatttttaaatatcaaaaaaaaaaaaaaa

SEQ ID NO: 4483 - protein, 320 aa, Homo sapien
MSVGFIGAGQLAYALARGFTAAGILSAHKIIASSPEMNLPTVSALRKMGVNLTRSNKETVKHSDVLFLAVKPHIIPFILDEIGADVQARHIVVSCAAGVTISSVEKKLMAFQPAPKVIRCMTNTPVVVQEGATVYATGTHALVEDGQLLEQLMSSVGFCTEVEEDLIDAVTGLSGSGPAYAFMALDALADGGVKMGLPRRLAIQLGAQALLGAAKMLLDSEQHPCQLKDNVCSPGGATIHALHFLESGGFRSLLINAVEASCIRTRELQSMADQEKISPAALKKTLLDRVKLESPTVSTLTPSSPGKLLTRSLALGGKKD

SEQ ID NO: 4484 - DNA, 2206 bp, Homo sapien
ggcacgaggcggggtcggtaaggggtgcggcaatgctgcaactgcgggactcggtggactcggccggtacgagccccacggcggtgctggcggccggcgaggaggtgggggcaggcggcggcccgggcggggggcggccgggggcggggacgccgctgcgccagacactctggcctctcagcatccacgaccccacgcgccgcgcccgcgtcaaggagtacttcgtgttccggcccggcagcatcgagcaggcagtggaggagatccgcgtggtggtgcggcccgtggaggacggcgagatccagggagtgtggctgcttaccgagcgagaaggttttgggattcgaattcagtgggacaagcaaagtcgtccttccttcataaacagatggaatccctggtctaccaacgtgccctatgccactttcacagaacacccgatggctggcgcagatgagaagacagcatctctgtgtcagttggaaagcttcaaggctctgttaatccaagctgtcaaaaaagcccaaaaagaaagccctttgccaggacaggcgaatggcgtgctgatcctggagcgccccctgctcatcgagacctacgtgggactcatgtccttcattaacaacgaggcgaaactgggctactccatgaccaggggcaaaataggcttttagccgctgcgttctgggagctcctccccctccccagaaggccaagggatgtgggggctgggggactgggaggcctggcagtcttcatgctgccctgctgctgctggaaggatggggatctttcacctttagggatctcagcacaattagaatcgtaaagtgaattctatctatttaattggatattggactctgctcatataagctacagacaaaagccaaaagactctcgctgtccctgtgctgctggtatttcattctctgtaacttcagttctggtgttttccttgagtatctacttggcttctcgtggtttttcccaccccagctgccccagcacgcgggacccatagcacaccccttagcgcttgcctaggttgctgaaaacagggaggcacctggtatctcgagtgcctgcagttgcaagtgtgtttacacctggtgtccaattttgtattttaaaatgtaatccatttttacttcagctcatccaaaagcagccagcagaccggttgactgagaccggtctgtggctgtgggccccttggtgacccgctgctcttttggaaatgggtgacctgaagtgacactttttccacaattaacccaagttgtgttaatacttcaggtctgtttcccagacccagaaagctttacagaaaatcattgtaagacaatttattaatttgagaaagtcaccttgacagttctttgcacacaagttttacacctctctggattcgaagtttgtattgtattcatagttaaagggaatcgggtactttgcttgttgaataatgcactttaaaacaaggaaccgtatcaggccagcatggtggctcatgcctgtaatcccagcattttgggaggctcaggcagacaaatcgctctagctcagaagttgcagagcagcctgggcaacatggtgaaacccgtctctaccagacaaaaagcagccaggcgtggtggcacatctgtggtcccagctacttgagaggctgagccaggaggatcgcttgagcccaggaggcggaggttgcagtgagctgagatggcaccacttattgcactccagcccgggcgacagagcgagactccatctaccagatccttatgacgcagctgatgcctgccttggttcctaccactctggtgtagacagaggactttgtccaagtctcacactaaacatgcccgggcttcgatgtgcctggaggatttccccacagggacccacgcacctccctgtatctgcgcagcttgctcgtgtggctggaagcgctgtcgataagcttcacgcactggcttgccagttcttcagctctaggacttgtagctttaagcaaacggtgtggcatgggttgagtgtggccacctgcaggatgtgcagggctgcctcagaagctggctggggactctagcctctgtgttcataaagacattaagaagtggatggatgttgttccttttttgaagttgtcattaaagtaggtgcaacaaccaaaaaaaaaaaaaaaaaaaaaaaaaaaaaaaaa

SEQ ID NO: 4485 - protein, 213 aa, Homo sapien
MLQLRDSVDSAGTSPTAVLAAGEEVGAGGGPGGGRPGAGTPLRQTLWPLSIHDPTRRARVKEYFVFRPGSIEQAVEEIRVVVRPVEDGEIQGVWLLTEREGFGIRIQWDKQSRPSFINRWNPWSTNVPYATFTEHPMAGADEKTASLCQLESFKALLIQAVKKAQKESPLPGQANGVLILERPLLIETYVGLMSFINNEAKLGYSMTRGKIGF

SEQ ID NO: 4486 - DNA, 480 bp, Homo sapien
tttttttcattttaaaaaggaagtttattggtctttaaatggctcaaattgcaaataaacaaatcgggtagtggcatcagcctaagacacgtgatgcatctttgtcagttggcttcatagcacctcagtacccaggagaggaaaggtctcaaagcaaagtcacaatgttagtggttaggacccctggttaaataagactgtaataagtacacatggagattgctgggcccgctggccagtgttacattggtaacttgaattccgcacatggcatagcctatgagaaatacgaaatgaaagatgtacatctcaaaccctttaaggacaaatatttaacatgagaagctggatgtaaatatctaaagagtgagttcctaaaaagcctatttttaactttacatacacacctgttacctggaatgcctgaacacatctttgacctgttcaaattaggactgagaaaaaagaaaaaaatacttt

SEQ ID NO: 4487 - DNA, 6950 bp, Homo sapien
  Unsure 134-168: Unknown base
  Unsure 280-338: Unknown base
  Unsure 392-415: Unknown base
gcttcctcctcctccgactcggacaccggcggagcctccccgcccccgcggaagaaaccccgagcctcggcggcggagggagtaggagagcccggggcttcggcaggcagagcaggcctctcccctccgtcctnnnnnnnnnnnnnnnnnnnnnnnnnnnnnnnnnnngtggtggtagtggtgggacttcccccggctgctgcccctcccgccgccgctgctgtcccccaccgaagtagcggccacagcctggtcagcggcagcatcatgcaggccaatnnnnnnnnnnnnnnnnnnnnnnnnnnnnnnnnnnnnnnnnnnnnnnnnnnnnnnnnnnnggtgccagggtacagaccccggagctcgcctgcttgtcggcccagaacggggannnnnnnnnnnnnnnnnnnnnnnncgcgggggacctggcccacgccaatgggctcctgccttccgccccctccgccgccagcaacaatagcaacagcctgaatgtcaataacggggttcccggcggggcggccgccgcatcctcagccaccgtcgcagctgcctccgccaccaccgccgcctcctcttccttggccaccccagaactgggcagcagcctcaagaagaagaagcggctctcccagtcagatgaggatgtcattaggctaataggacagcacttgaatggcttagggctcaaccagactgttgatctcctcatgcaagagtcaggatgtcgtttagaacatccttctgctaccaaattccgaaatcatgtcatggaaggagactgggataaggcagaaaatgacctgaatgaactaaagcctttagtgcattctcctcatgctattgtggtaagaggcgcacttgaaatctctcaaacgttgttgggaataattgtgaggatgaagtttttgctgctgcagcagaagtacctagaatacctggaggatggcaaggtcctggaggcacttcaagttctacgctgtgaattgacgccgctgaaatacaatacagagcgcattcatgttcttagtgggtatctgatgtgtagccatgcagaagacctacgtgcaaaagcagaatgggaaggcaaagggacagcttcccgatctaaactattggataaacttcagacctatttaccaccatcagtgatgcttcccccacggcgtttacagactctcctgcggcaggcggtggaactacaaagggatcggtgcctatatcacaataccaaacttgataataatctagattctgtgtctctgcttatagaccatgtttgtagtaggaggcagttcccatgttatacgcagcagatacttacggagcattgtaatgaagtgtggttctgtaaattctctaatgatggcactaaactagcaacaggatcaaaagatacaacagttatcatatggcaagttgatccggatacacacctgctaaaactgcttaaaacattagaaggacatgcttatggcgtttcttatattgcatggagtccagatgacaactatcttgttgcttgtggcccagatgactgctctgagctttggctttggaatgtacaaacaggagaactaaggacaaaaatgagccagtctcatgaagacagtttgacaagtgtggcttggaatccagatgggaagcgctttgtgactggaggtcagcgtgggcagttctatcagtgtgacttagatggtaatctccttgactcctgggaaggggtaagagtgcaatgcctttggtgcttgagtgatggaaagactgttctggcatcagatacacaccagcgaattcggggctataacttcgaggaccttacagataggaacatagtacaagaagatcatcctattatgtcttttactatttcaaaaaatggccgattagctttgttaaatgtagcaactcagggagttcatttatgggacttgcaagacagagttttagtaagaaagtatcaaggtgttacacaagggttttatacaattcattcatgttttggaggccataatgaagacttcatcgctagtggcagtgaagatcacaaggtttacatctggcacaaacgtagtgaactgccaattgcggagctgacagggcacacacgtacagtaaactgtgtgagctggaacccacagattccatccatgatggccagcgcctcagatgatggcactgttagaatatggggaccagcaccttttatagaccaccagaatattgaagaggaatgcagtagcatggatagttgatggtgaatttggagcagacgacttctgtttaacttaaaattagtcgtattttaatggcttgggatttggtgcaaacaaacatgattgatagctggacagacatgctcgtcatgaaaaaagaaccatttctgaagcccgattggggccaaacatttacaccttgcttcatagtaaccagttgagatgaagcacgtcgttagaacgttgttggacaccatgttgaattattcccccatcggttgtgaagaactgtgctacattcaggcttacccattgaactcagtatatatatttttttccttcctgtcttttgtctggcaggataccattcttgttgctcttctgtgtaatgaagtttaaatgcttgtttggaaaactttatttaacagtttagaaggcttgatagaaagagtgcattagtctgaagagtatacattggataggaaagaatttccttcttttgtttctccaaatctttccgccttatttagcttgagatctttgcagcttggttcatggattctagccttgcccgttgcgcagtatatactgatccagatgataaaccagtgaactatgtcaaaagcactctcaatattacatttgacaaaaagttttgtacttttcacatagcttgttgccccgtaaaagggttaacagcacaattttttaaaaataaattaagaagtatttataggattaaagtgacttcatttgtatacatttggaatctaaaccagcttaaaaacagtttcctcaatgacttagatacacagtataactgatgctcttctggaataccacatgagacatggtcagaaacagtgcttggaaggacattacacaagaaattcagagtaatgctttgaagatttccccccttttgttttattcctgaaggaacatcagtacccgatcttgaagaaattcaagattcaaaaagaattttaaatacaccaacatgagacatcagtagtcagttggttttcagtaaagcttgttccaagttgttctcaacttaggaagtaattttggtgtgatctagcaaaagagtaggaatcagcgatacaaccactttggaagtttatagtataattgaaattattagaagaattcagcaggttacagacatacttaaactgggattaaaacctcatagtcatttttcttaattgcccttaatattttgacatatagggatacataaatttaaagaatattttttctcagttttttcagatattgccatactgaacctcattctaaactggtgctgtggatagtctttccctctcccctcctgttttagtttaaggaaaggtttccttcatggaaaagcacttttaattttgagaatttcacatttaaaataagccaaaagcctgatgttcacattgtgcttttaaactccgtaacagctgaatacaacataacatagtctcccttgaaattccctccctttttcagtagaggataaatagggtgactccagctgttggaatgagaatggggatacccccaaaataagattctggtgaagaaaaagtcttgtactaagttcccctttaggtgtagccaagtctataatataattatgatcatgaatagactccagaatccacaaagagaagagggcttggatgtcaaaaattcttccattgtggggtaggtggtcggggatgggagaaagggaaaagtcagggaaaggggagaagaaagaaaaacacatttggccttaaaatagcatgcattctcccagaagcccatagtaaagaaaatgacagatcgtggtcagcagactcttatcaaattggtatgtaaaagatttcttcaagctccattttgcagagaccaccacttagagaatcaaaaaattcctgttttgatacttctaagttaaaatatatgttacagtttatctggtacttcatttttcttaactaaaattactttttactttaagcttgaataaaaatcttcattggtaactgtatgtaattaagtggcaacttctctttacctcagtatagttaaaaaccattcatattttaagtgattcatgtataccctgaagccgttaatacaccccagtctctatggtaacatcactaaatgtgggcatagaaactccacagctgtttacaaatttggttacagtgtgctatggtgcatttgtaacactcagatttgtgcccattcaggggcaatttggcactcagattctactctacttcacctaaccacccctagatctgagttttcagagtgcttctgaagtacagtttaaaaacactttttaaaaagtggagtaaaagtgaggcacattttacaagaacataactcctattaaaacggagtaacaactatgcaaaggtttctatagcagctaggtgagtttgttttccgggtctgtcttaactggcagcttcctgtacatactggtacttatttgctgtaaacgtctgtttcatacatttgccatgcagtgactgtgctcgaaaggtgaaatcaatggtaaagaagcctaggattttatggtatgagaaactgatcgcaggattttctgatccatagctattaattgaaaacttctgatagtgctgtaggctctatagtaggcttaagagtgagtcttatactatgaagccagccacaagatactaacaaatgtataaattgaaaagtaccaatactttttgcacatagatcaaaatagagtggagaatttgggctccaaaaatcaggttagtaggctcatttccatgtgcttaaaaatgtttttgttgttatgcattgattaagggctagagcaaatataaaattaaatgtctttttcctccaaataattggttattaatggtaaaatgttggacttggggattactgagattagtatgtgggtagtaaagaattggagtgggagttagtggggagggatgacaaagcttcagctttggtttttgtatttttttagtcttcataacagctacatttctgttgctcttattggccagataaatgtgttatattaaaccaggtaagtattttaaacagagaacattttatttgcatatatccctacaaattggcccattttattgggtggggggataaaaaagggattccctaactttaaataatcagaatatcctgcaattgaaaggagaaaaaaatccaattttgtcagtattttcttagtctgaaaaaaacagcagtagtaatctggtgaatgttattattaggagtgttctgcctctacagtggcatattccatgacattaatagaaaacccttctttcccacccctccccatcttgacattttcttttttaggatgttggttcctgcaaacaagaactgaccctatcacctctgcctcacagtgggtaaatatatcatacatctcttgaaagggaaaatatccatgtcagtttctttcacagtagaagaatggctgcttttgaatggggaggaaagaagacatttttcttaatatcctttttgtcccatctctaaaatgtataaatattttgatttggttttactttaatttctcattcataatttcgcaactgtccttttgggttgccctccaacacattacttccatttcagaaaccatatctgatttaatataaactgctaacttaagaagaggtgaatttgcatttacacttagacactttctaaaaacagggtgaacttaattgaaatttttcagtgttgttaagctattgttatagtagctgccctatagttacaaaaataaaaactataaaaacccatcccctatctacttaatccagatagcctggatttaacaaaaccaatagtataaaaatgtgtgtgtgtgttctgtgtgtgtgtgagagagagagtacttgattcattaaaaagtcctggaaacagctgttctaggatcttgtcatttttactgaaagtctcgtgcacatgtgaagtgccctctgagtttaaggtttggttaatactggtatatttttataagattgaaattgtgtccccatctttaacttaaacattttcattatcagggtcaatgtgctagaactgaattgtaacatttttaggcacagatggaaaaaaatgttattggctccttgaaaatgtgtgtgtgtggcgaggggaatagatccacaaaagcatgtatgtacttacaaaccaagctgtagagatcaagaaaagaacttaagtgttgatctcaagatttctaaattgtcaagatttacatggcattgtggtggaactagttaacacttagagcttttggtatgtaataactatttgctatggactgattaaatgtttcaaaagattgtgttcttcaattttggtgggttttgatttttgtttttttaactgcctctcagattatatttacttagtttaaatttctttgctttattcattaaagtataaaaacttcaggtctctgatatttattttcacttgtttactaattatttacaaaacaccctttgttgacttttattttataaatgtgtaatgtattaaacgtctttaaatttttgttcaactgaaactacattaactttgatttgctttactgggatttttttttaaagacactttttccatgtcagtgcgcagcacttaaccagtcgtttgtattccctttctttcaatccaataaacagaatgaatacctaaataaaa

SEQ ID NO: 4488 - protein, 750 aa, Homo sapien
  unsure 45: unknown amino acid
  unsure 46: unknown amino acid
  unsure 47: unknown amino acid
  unsure 48: unknown amino acid
  unsure 49: unknown amino acid
  unsure 50: unknown amino acid
  unsure 51: unknown amino acid
  unsure 52: unknown amino acid
  unsure 53: unknown amino acid
  unsure 54: unknown amino acid
  unsure 55: unknown amino acid
  unsure 56: unknown amino acid
  unsure 94: unknown amino acid
  unsure 95: unknown amino acid
  unsure 96: unknown amino acid
  unsure 97: unknown amino acid
  unsure 98: unknown amino acid
  unsure 99: unknown amino acid
  unsure 100: unknown amino acid
  unsure 101: unknown amino acid
  unsure 102: unknown amino acid
  unsure 103: unknown amino acid
  unsure 104: unknown amino acid
  unsure 105: unknown amino acid
  unsure 106: unknown amino acid
  unsure 107: unknown amino acid
  unsure 108: unknown amino acid
  unsure 109: unknown amino acid
  unsure 110: unknown amino acid
  unsure 111: unknown amino acid
  unsure 112: unknown amino acid
  unsure 113: unknown amino acid
  unsure 131: unknown amino acid
  unsure 132: unknown amino acid
  unsure 133: unknown amino acid
  unsure 134: unknown amino acid
  unsure 135: unknown amino acid
  unsure 136: unknown amino acid
  unsure 137: unknown amino acid
  unsure 138: unknown amino acid
  unsure 139: unknown amino acid
ASSSSDSDTGGASPPPRKKPRASAAEGVGEPGASAGRAGLSPPSXXXXXXXXXXXXVVVVVGLPPAAAPPAAAAVPHRSSGHSLVSGSIMQANXXXXXXXXXXXXXXXXXXXXVPGYRPRSSPACRPRTGXXXXXXXXXRGTWPTPMGSCLPPPPPPATSNSLNVNNGVPGGAAAASSATVAAASATTAASSSLATPELGSSLKKKKRLSQSDEDVIRLIGQHLNGLGLNQTVDLLMQESGCRLEHPSATKFRNHVMEGDWDKAENDLNELKPLVHSPHAIVVRGALEISQTLLGIIVRMKFLLLQQKYLEYLEDGKVLEALQVLRCELTPLKYNTERIHVLSGYLMCSHAEDLRAKAEWEGKGTASRSKLLDKLQTYLPPSVMLPPRRLQTLLRQAVELQRDRCLYHNTKLDNNLDSVSLLIDHVCSRRQFPCYTQQILTEHCNEVWFCKFSNDGTKLATGSKDTTVIIWQVDPDTHLLKLLKTLEGHAYGVSYIAWSPDDNYLVACGPDDCSELWLWNVQTGELRTKMSQSHEDSLTSVAWNPDGKRFVTGGQRGQFYQCDLDGNLLDSWEGVRVQCLWCLSDGKTVLASDTHQRIRGYNFEDLTDRNIVQEDHPIMSFTISKNGRLALLNVATQGVHLWDLQDRVLVRKYQGVTQGFYTIHSCFGGHNEDFIASGSEDHKVYIWHKRSELPIAELTGHTRTVNCVSWNPQIPSMMASASDDGTVRIWGPAPFIDHQNIEEECSSMDS

SEQ ID NO: 4489 - DNA, 1154 bp, Homo sapien
gcgcttgcgaagcgggctccggctcggctcgcggggactgtgcacgaggttggcgacgccgccccgccgggccccagatcaggccgcagagatcgggagccgcgggagcactaaggcgcaagggccacagcagcagccgggctcagagggtcccagctatgccaaaaaagttgcgctctggcttgctgggctgcttggagctggtgggactgtgagcgtcgtctatatctttggaaacaacccggtggacgaaaatggtgccaagattcctgatgagttcgacaatgatccaattctggtacagcagttgcgccggacatacaaatatttcaaagattatagacagatgatcatcgagcccaccagcccttgccttctcccagaccctctgcaggaaccgtactaccagccaccctacacgctcgttttggagctcaccggcgtcctcttgcatcctgagtggtcgctggccactggctggaggtttaagaagcgcccaggcatcgagaccttgttccagcagcttgcccctttatatgaaattgtcatctttacgtcagagactggcatgactgcgtttccactcattgatagtgtggacccccatggcttcatctcctaccgcctattccgggacgccacaagatacatggatggacaccatgtaaaggatatttcatgtctgaatcgggacccagctcgagtagtagttgtggactgcaagaaggaagccttccgcctgcagccctataacggcgttgccctgcggccctgggacggcaactctgatgaccgggtcttgttggatctgtctgccttcctcaagaccattgcactgaatggtgtggaggacgtgcgaaccgtgctggagcactatgccctggaggatgacccgctggcggctttcaaacagcggcaaagccggctagagcaggaggagcagcagcgcctggccgagctctccaagtccaacaagcagaacctcttccttggctccctcaccagccgcttgtggcctcgctccaaacagccctgaactctgggcctcctcaaactcagtgcctgggtccagggccccagtgcttccagaccaagacttgggccaccacttgtccaataaagtacatcccagacgccacaaaaaaaaaaaaaaa

SEQ ID NO: 4490 - DNA, 2343 bp, Homo sapien
gtggctgattgaactgctggtattggtgggagagtacgtagaaacttgtggccatctcatctatgcctgcaggcaactgaaaagcagtgatttggacctttttcgagtttggatgggagtgtggacagggcggttagggggctgggcccaggtcatgtttcagtttctaagccaggggttttactgtggagtaggactgtttactcgttttcttaagctgctgggtgctttgctgctcctggctctggccctctttttgggctttctacagttgggatggcggtttctggtgggactaggtgaccggttaggctggagggataaggctacctggctcttctcttggctggattctccagccttgcagcgttgcttgactctgctgagagatagcaggccatggcagcggctggtaagaatagttcagtggggctggctggagttgccttgggtcaagcagaatattaataggcaggggaatgcacctgtagctagtgggcgctactgccagcctgaagaggaagtggctcgactcttgaccatggctggggttcctgaggatgagctaaaccctttccatgtactgggggttgaggccacagcatcagatgttgaactgaagaaggcctatagacagctggcagtgatggttcatcctgacaaaaatcatcatccccgggctgaggaggccttcaaggttttgcgagcagcttgggacattgtcagcaatgctgaaaagcgaaaggagtatgagatgaaacgaatggcagagaatgagctgagccggtcagtaaatgagtttctgtccaagctgcaagatgacctcaaggaggcaatgaatactatgatgtgtagccgatgccaaggaaagcataggaggtttgaaatggaccgggaacctaagagtgccagatactgtgctgagtgtaataggctgcatcctgctgaggaaggagacttttgggcagagtcaagcatgttgggcctcaagatcacctactttgcactgatggatggaaaggtgtatgacatcacagagtgggctggatgccagcgtgtaggtatctccccagatacccacagagtcccctatcacatctcatttggttctcggattccaggcaccagagggcggcagagagccaccccagatgcccctcctgctgatcttcaggatttcttgagtcggatctttcaagtacccccagggcagatgcccaatgggaacttctttgcagctcctcagcctgcccctggagccgctgcagcctctaagcccaacagcacagtacccaagggagaagccaaacctaagcggcggaagaaagtgaggaggcccttccaacgttgatgccccttctctttcctcaaatcaatgtcagggagtcaaaagggctgtagcacaggatggagtttgatttatccctcctcccccaacacctaggaactgaatctttttctttttattttttgagatggagtcttgctctgttgcccagctggagtgcagtggtgtgatctcagcttactgcaacctctgtctcccgggttcaagcaattctcccatctcagcctcctgagtagctgggattacaggcacacaccaccacacctggcccagctaattcttttttgtatttttagtagagacggggtttcaccatgttgcccaggctggtctcgaactcctgagctcaggtgatccacccgtcttggcctcccaaagtgctggattacaggcataggccactgtgcccggcctgaatcttgtcttttgacaataccaaagaaatagggggtagctagagtaaagaacctagggcctggacctgggctggacagtgtatccctttaggtgtgggaactgggtatttccctggggtctgtatgcctttgtcttgtcatttgcttttagggcagatgacactttttcccacccttttaaagctacaagtctatcttctttcttgacccatttcaggagggagccctctcctttatcctgatataatatttaaaagacagaacaagaaagcatgtagccctaatgataggagattatcgcatagagttcagagactggaaactgaattttccctcgactttcactttgtgggtaaatcacccaattttaggctcttttctgcaaggatggccaaaattaatcatttttaaaaagtagattcatgcccactgcccttgggtgagggggaagaatacgggggttcccagaagcccccatgtgatccaagggtttgtattttttttttaagtttgttcatatttgtatgtacatgactatttaaagccaggggattatctttctataaatgtataactggc

SEQ ID NO: 4491 - protein, 412 aa, Homo sapien
MGVWTGRLGGWAQVMFQFLSQGFYCGVGLFTRFLKLLGALLLLALALFLGFLQLGWRFLVGLGDRLGWRDKATWLFSWLDSPALQRCLTLLRDSRPWQRLVRIVQWGWLELPWVKQNINRQGNAPVASGRYCQPEEEVARLLTMAGVPEDELNPFHVLGVEATASDVELKKAYRQLAVMVHPDKNHHPRAEEAFKVLRAAWDIVSNAEKRKEYEMKRMAENELSRSVNEFLSKLQDDLKEAMNTMMCSRCQGKHRRFEMDREPKSARYCAECNRLHPAEEGDFWAESSMLGLKITYFALMDGKVYDITEWAGCQRVGISPDTHRVPYHISFGSRIPGTRGRQRATPDAPPADLQDFLSRIFQVPPGQMPNGNFFAAPQPAPGAAAASKPNSTVPKGEAKPKRRKKVRRPFQR

SEQ ID NO: 4492 - DNA, 4788 bp, Homo sapien
aaccatagaacatgggaataggttttattttcatctcaagaacatttaagttgggtgaagaaattcagcttttgttgttagaatctgacaggcttcaaacacttgtgatggaggggttgttgtcatatcaaagtccacctagtaaagttttaggtgaccagtgactttgtcaattaggtctgctggtcctggcccaatccctaggacagtttgagagcctggtgcaatctgagtacgtccagcatcttgaattaaacttacagtcagtcccagcatttttgcatgggccaataatgcaatcagggtttcttcatcaggagctttgaccaccaccttgggctggccacagtattcccattgtttgagcatttcaggatttcttctttgaatctgcttgtaggctgaaacagcagcatgagagcactgggcagccactttcccttttcccatctttaagtcatttcgaaccacaagaatcatcttgtactccccgctgtctcccaagatgcttgcttcactttcagtatctgtgtgtgtcttgctcgtcttgcttttggggagcatcccaaagcatactcgaaggctccagccccaggcacatgccacaagcaactccaacagccaagccgagtgtactgggatgagccaaatattccataaccaaggatttggagggcatctacagtacctcctttcctcactcgcgccttcccttcttctgggcagcgaacacgtttctatcgcgtgagctacctcttccggggttcctgggtgacaagttccggatcaagaatcacaaagcgagcagtcattcttcctcttgccacacccacagggcccgcactaagagcctaactgaaatcccgcgaggatcaaccgagctcgccgaaaggagggaggaacgtatcccttctggaggctgtctcagggggcagagggaccggaccggaagtgacgtgagcgggttccggttgtctggagcccagcggcgggtgtgagagtccgtaaggagcagcttccaggatcctgagatccggagcagccgggggtcggagcggctcctcaagagttactgatctatgaaatggcagagaatggaaaaaattgtgaccagagacgtgtagcaatgaacaaggaacatcataatggaaatttcacagacccctcttcagtgaatgaaaagaagaggagggagcgggaagaaaggcagaatattgtcctgtggagacagccgctcattaccttgcagtatttttctctggaaatccttgtaatcttgaaggaatggacctcaaaattatggcatcgtcaaagcattgtggtgtcttttttactgctgcttgctgtgcttatagctacgtattatgttgaaggagtgcatcaacagtatgtgcaacgtatagagaaacagtttcttttgtatgcctactggataggcttaggaattttgtcttctgttgggcttggaacagggctgcacacctttctgctttatctgggtccacatatagcctcagttacattagctgcttatgaatgcaattcagttaattttcccgaaccaccctatcctgatcagattatttgtccagatgaagagggcactgaaggaaccatttctttgtggagtatcatctcaaaagttaggattgaagcctgcatgtggggtatcggtacagcaatcggagagctgcctccatatttcatggccagagcagctcgcctctcaggtgctgaaccagatgatgaagagtatcaggaatttgaagagatgctggaacatgcagagtctgcacaagactttgcctcccgggccaaactggcagttcaaaaactagtacagaaagttggattttttggaattttggcctgtgcttcaattccaaatcctttatttgatctggctggaataacgtgtggacactttctggtacctttttggaccttctttggtgcaaccctaattggaaaagcaataataaaaatgcatatccagaaaatttttgttataataacattcagcaagcacatagtggagcaaatggtggctttcattggtgctgtccccggcataggtccatctctgcagaagccatttcaggagtacctggaggctcaacggcagaagcttcaccacaaaagcgaaatgggcacaccacagggagaaaactggttgtcctggatgtttgaaaagttggtcgttgtcatggtgtgttacttcatcctatctatcattaactccatggcacaaagttatgccaaacgaatccagcagcggttgaactcagaggagaaaactaaataagtagagaaagttttaaactgcagaaattggagtggatgggttctgccttaaattgggaggactccaagccgggaaggaaaattcccttttccaacctgtatcaatttttacaacttttttcctgaaagcagtttagtccatactttgcactgacatactttttccttctgtgctaaggtaaggtatccaccctcgatgcaatccaccttgtgttttcttagggtggaatgtgatgttcagcagcaaacttgcaacagactggccttctgtttgttactttcaaaaggcccacatgatacaattagagaattcccaccgcacaaaaaaagttcctaagtatgttaaatatgtcaagctttttaggcttgtcacaaatgattgctttgttttcctaagtcatcaaaatgtatataaattatctagattggataacagtcttgcatgtttatcatgttacaatttaatattccatcctgcccaacccttcctctcccatcctcaaaaaagggccattttatgatgcattgcacaccctctggggaaattgatctttaaattttgagacagtataaggaaaatctggttggtgtcttacaagtgagctgacaccattttttattctgtgtatttagaatgaagtcttgaaaaaaactttataaagacatctttaatcattccaaaattgtgtccgttttcttgagcgttttgattttttacttttagcttataccagctgaatggcagccttgcctaatccacctacaacaagaatttcttaagctttcttttatttgcatgagagagccactaccaaggcatgttttgttatgctgaaactgggctgctgcatactgctaaatggcacctctgggattggcctacctggggatttcttggtttgtgaaaacaggagaggagaaatatctcatacaagtgaaaggatactggagagagaaattacccatttctaaaaaaaaaccacactctgtcgtatctgtgttaatgttttctagcatgtactctggtttcaacagacacaaatttatatgttaacccagttttcttgccgttctgtaagtgttttattcttagtgtgatttttttccattgggatgtttttgattgaacttgttcattttgttttgcttgggaggaaaataaacaattttacttttttcctttaggagcattatgagcattatgtcagaatagaatagaattggggttcgatcttaacaggccagaaatgcctgggtttttttggtttgtttttgtttttgtttttttatcaaatcctgcctgactgtctgcttgttttgcctaccatcgtgacatctccatggctgtaccaccttgtcgggtagcttatcagactgatgttgactgttgaatctcatggcaacaccagtcgatgggctgtctgacattttggtatctttcatctgaccatccatatccaatgttctcatttaaacattacccagcatcattgtttataatcagaaactctggtccttctgtctggtggcacttagagtcttttgtgccataatgcagcagtatggagggaggattttatggagaaatggggatagtcttcatgaccacaaataaataaaggaaaactaagctgcattgtgggttttgaaaaggttattatacttcttaacaattctttttttcagggacttttctagctgtatgactgttacttgaccttctttgaaaagcattcccaaaatgctctattttagatagattaacattaaccaacataattttttttagatcgagtcagcataaatttctaagtcagcctctagtcgtggttcatctctttcacctgcattttatttggtgtttgtctgaagaaaggaaagaggaaagcaaatacgaattgtactatttgtaccaaatctttgggattcattggcaaataatttcagtgtggtgtattattaaatagaaaaaaaaaattttgtttcctaggttgaaggtctaattgatacgtttgacttatgatgaccatttatgcactttcaaatgaatttgctttcaaaataaatgaagagcagctgtccttctttcctcttttaagtgttcagctgtggcatgctcagaggttcctgctggattccagctggagcggtgtgatacccttctttttcagctgttcgtgccttcctttcttgtatccaccaaagtggagacaaatacatgatctcaaagatacacagtacctacttaattccagctgatgggagaccaaagaatttgcaagtggatggtttggtatcactgtaaataaaaagagggcctgggaattcttgcgattccatctctactttgtataagtctcattttgtgccttacacatctgcagtatttatcatgttccaacttggtgactgtcaggcagtgcaatacatcagcagtttatcaccgaagagctgaggaatacctcccttaaaacagacaatgtc

SEQ ID NO: 4493 - protein, 406 aa, Homo sapien; identical to SEQ ID NO: 3855

SEQ ID NO: 4494 - DNA, 959 bp, Homo sapien
gctttcgccgcctgggagccgtccggcgcagcagtttctaggtccccactgtccccgccgtcccgccccttcgcgtcccgggaaccggctggcttccgagccgcactcgccgatcctccaggcatgccccgctacgagctggctttaatcctgaaagccatgcagcggccagagactgctgctactttgaaacgtacgatagaggccctgatggacagaggagcaatagtgagggacttggaaaacctgggtgaacgagcgcttccttataggatctctgcccacagtcagcagcacaacagaggcgggtatttcttggtggatttttatgcacccaccgcagctgttgaaagcatggtggagcacttgtctcgagatatagatgtgattagagggaatattgtcaaacaccctctgacccaggaactaaaagaatgtgaagggattgtcccagtcccactcgcagaaaaattatattccacaaagaagaggaagaagtgagaagattcgccagattttagccttatatgtaattccttcacatttgggcagcatggacgagaaggaagaatttgcaagtttggcctttatataagcatgtgttgcaggtgctgtttgatttttctaaggtatttttagcccttgatcccctttgcttgcgagaggtggggaactgctcactgacagcttctctgtaacctgcagtaccagtggatcattcttgattttgttttcattagtgtcatttctttgtcattgaggacttttccccttacaacagtaacaccattttttgaagagcaaaacttataatacctcctgggattgtgagctagtcattcagcctgtgtaaccatgtggaaataaaaattgacgaccaatgtattatatggacaacttttgctttgagtaataaacttgattgtagggaaaaaaaaaaaaaaaaaaaaaaaaaaaaa

SEQ ID NO: 4495 - protein, 125 aa, Homo sapien
MPRYELALILKAMQRPETAATLKRTIEALMDRGAIVRDLENLGERALPYRISAHSQQHNRGGYFLVDFYAPTAAVESMVEHLSRDIDVIRGNIVKHPLTQELKECEGIVPVPLAEKLYSTKKRKK

SEQ ID NO: 4496 - DNA, 2469 bp, Homo sapien
ggcaagtgtccttggatattgtcttctgcccatgatcctactttccagctttgcagtgatattttctttgcaaggaatggtaggaatcattctcactgctgggattattggatggtgtagtttttctgcttccaaaatatttatttctgcattagccatggaaggacagcaacttttagtagcatatccttgcgctttgttatatggagtctttgccctgatttccgtcttttgaaaatttatctgggatgtggacatcagtgggccagatgtacaaaaaggaccttgaactcttaaattggaccagcaaactgctgcagcgcaactctcatgcagatttacatttgactgttggagcaatgaaagtaaacgtgtatctcttgttcatttttatagaacttttgcatactatattggatttacctgcggtgtgactagctttaaatgtttgtgtttatacagataagaaatgctatttctttctggttcctgcagccattgaaaaacctttttccttgcaaattataatgtttttgatagatttttatcaactgtgggaaaccaaacacaaagctgataacctttcttaaaaacgacccagtcacagtaaagaagacacaagacggccgggcgtggtagctcacgcctgtaatcccagcactttgggaggccgaggcgggcggatcacaagggcaggagatcgagaccatcctggttaacacggtgaaaccccgactctactaaaactacaaaaaaattagctgggcgtggtggcgggcgcctgtagtcccagctactcaggaggctgaggcaggagaaaagtgtgaacccaggaggcggagcttgcagtgagccgagatcacaccactgcactccatccagcctgggtgacagggtgagactctgtctcaaaaaaaaaaaaaaaaaggagacacaagacttactgcaaaaatatttttccaaggatttaggaaagaaaaattgccttgtattctcaagtcaggtaactcaaagcaaaaaagtgatccaaatgtagagtatgagtttgcactccagaaatttgacattactgtaaattatctcatggaatttttgctaaaattcagagatacgggaagttcacaatctaccttattgtagacatgaaatgcgaacacttacttacatattaatgttaactcaaccttagggacctggaatggttgcattaatgctataatcgttggatcgccacatttcccaaaaataataaaaaaatcactaaccttttttaaggaaaatatttaaagttttacaaaattcaatattgcaattatcaatgtaaagtacatttgaatgcttattaaaactttcccaattaattttaactgtgttattgagtttacttttactaaactactgttctctttgtctcttttttaactaggctctgattttgacccctaatttaagctttaagaatagaaatcagctaatatagaatcagacaaaaaggggattaaatgagcagtttgagttacattattttattgtattaaatttatttgatttatattgtcatgttctcttgccagagagaatctgtaggaaaatactgtatcttgtatagtgatcattggctttttctagaaaaactgtctctgattctggacaaagctcagttatagttacgagaaagatatggtacagggagggaaatactgccttttttttttttttttaaagagattttcagactaaatagaaatgtcaaaatgatgtatcaatggttcttttttagaacaagttttcaaagcataaaaagaggttgagagaaataacatatttattgattcacataagtatgtttttcttcattaatcgtctggagaaacccacttgtcattaatttgttttgggctaggttttcaaacttaccaaattgctttaaaaaagcaatttggaaggtaatttgataggctttccaacttaaccaaattttttattgtaattcttggatagtatttttgtctttttcaattcatttgtctttttcagtatagtttttgttaaggcaaatgtcttcccttaatatccaaatattgctaataaacggtagaagatgctttggaaattaaaattatctcgctgttggttagacttaacactgttaatcttcagccaaatatcacatatggatcaaattattttcttttttgttgtttaccctatcctcaacaacatttttagtttaaattattgtagagattttttttgtggtggttattttttattttgctccaaaataataaggtgcaaagctattttatgcttaactgttgctctgtcaaaacagctatgcagtggagttgcatttgatgttctagagtttgattacatgcagagttgtatatagccaaaacttctcttatcaaactctgttatgtaggcatatttatatatacattaaagactgttgtactgtgtctc

SEQ ID NO: 4497 - DNA, 602 bp, Homo sapien
gacgcggggccggaacgcgaagagggtggtggagtcgggctacccactgattttccttcccttacttcccctgagcccttgggcccacttcccagcctaccgcttccgtccccgcccgactcttgggccagcgcctgggcccacactttcctatcccccgcagatgccggtggccgtgggtccctacggacagtcccagccaagctgcttcgaccgtgtcaaaatgggcttcgtgatgggttgcgccgtgggcatggcggccggggcgctcttcggcaccttttcctgtctcaggatcggaatgcggggtcgagagctgatgggcggcattgggaaaaccatgatgcagagtggcggcacctttggcacattcatggccattgggatgggcatccgatgctaaccatggttgccaactacatctgtcccttcccatcaatcccagcccatgtactaataaaagaaagtctttgagtaaaaaaaaaaaaaaaaaaaaaaaaaaaaaaaaaaaaaaaaaaaaaaaaaaaaaaaaaaaaaaaaaaaaaaaaaaaaaaaaaaaaaaaaaaaaaaaaaaaaaaaaaaaaaaaaaaaaaaaaaaaaaa

SEQ ID NO: 4498 - protein, 79 aa, Homo sapien
MPVAVGPYGQSQPSCFDRVKMGFVMGCAVGMAAGALFGTFSCLRIGMRGRELMGGIGKTMMQSGGTFGTFMAIGMGIRC

SEQ ID NO: 4499 - DNA, 2688 bp, Homo sapien
gaattcggcacgagaatgagccccacagaataaaggtttttcctcttgctgtggcctactggaagccttcctaactctatagctggtaaagtagagcagaaagggccagaatggcttaagatggagctaaatccctatagcattccattttctgctcttgcctcttgaacttagaaggcttgcccatatatcctaacaatctgttctctgagctgttaggccaatccctggtctcaaactcctgacctcaggtgatccacccactatggcctcccaaggtgctgggattgcagatgtgagccaccgtgcctggccagaaaatctggattcttattcctagttcttcatttctgtcacatgcacttagttgacattacatctacatatattagctttttcctacatgagccatctatttacttagtaaccagtgttcttaatgaagtatttagtcttgggtttcttgtaaaatttctctgcattccttagacagtgtactatacatgaaatattcttgttgacctagtaatttatattattccatttaattcttaaacctatggcctttttattgagcacactcttaaatcattatttggcttgtaaacattcatctgaattgtggctacaatcctctttaaataatctaggaaaaaagaaagataaagcttacattttcacagttttggctcttaaacacattccacaaatgccattaagaatttattttgttttaggccagtcatggtggctcatgcctgtaatcccagcaatttgggaggctgaggcaagaactgcttgagcccaggagtttgagactagcctgggcaacatagcaagaccctgtctctaccaaaaaaaaaaaagtttattttgttttagagtcatttaatgtgtttttatgcacaataatagtgggaggttgttttgttgcatttgtttgtttgttttgttttgttttgttttgctttccatgtgggaaaagttaacattggaactgtttctagtaaaagatttttttcaggctgggcacggtggctcatgcctgtgatcccaacactttgggagaccgagggagctggatcacctgaggtcaggagttcgagaccagcctggccaacatggaaaaactccatctccactagaaatacaaaagtagcctggtgtggtggcacatgcctgtaatcccagctacttgggaagctgaggcaggagaatcacttgaacctgggaggtggaggttgcagtgagccaagatcacgccattgcactccagcctgggcaacaagagtgaaactccgtctcaaaaaaaaaaaaaaaaaagatgtttttcatttttttcatgttatctatccaagcactgttccatggtcagcaagtcatatttcataatgtggattttccaaaataattattgaatacagctattctatggctacttttagtgtttttgtggtatgtggtgtgggagtgtttatggaattaccagtatcttaaattttcaaaggaaccttggaagtctatcactctaaatgaaagtctgtcactctacatgaattatgtgctcaaatttgaccaactcagtttaagacacaaaacagtaatttgaagaaggaaaaatgaagagagtttctagtttaatgggttaaatttttgttgttgcaatagtaagtttagtcttcttataatatttctaaatgaaaaatcataggtatttgttaccatgtgtgaagattactttgttaaaagcaaaagtggtcgtgtgatatgctaaatgttaattactgattttatatgtttaaatcacgccaaacaaattatgtctgtgccatccagggtctgttgttaatctttttctgagtacttggattgggataaagggcttgtactatgcactttttattaatgaataaatagaaaacgttagtaacactttgtgttttctgtttggcttttgtgggaagagaagcaagcatcttttgcctagtagatgttaacattgtgtattaaacagtttctttgtaagacctaactaaagacattcctaagagagaacttaagttttaagaaaagttgtgagaaaaatattcataaaatatgcagtatggggccagtattcagaagtagagtttctctcttggaaattagattgcagtcacatttctttggttattttctttctctctctcttcctagaataccaggtaaaatagacatttactttgagggactaatatccaatagtgttaattatttaagcagatatatctagctcaaaaggaaccagacatgtcactgtaccaaaaacacacaaaagtgaaaatttgcttctgttctgtgacctagaatgtgtccagacattaaagatcatgaatactcatatacatgtaaaaatagtaacactgctctggcatgattttgacgtcagtgtttatgtaataacttcagtgttatatttaaaatagataaatttgtgaaataacaatttcttggagacagtcaactttttatgatttaatctaaagattgtcatgtacatgtcaacggatatctgaatcctcagtgaaactgttaagttttcattaaatgactctgctgcaatactagttttcttctcagaaaatggaattcaaataaaataagttttttggtcttggaaaaaaaaaaaaaaaaaaaaaaaaaaaaaaa

SEQ ID NO: 4500 - protein, 43 aa, Homo sapien
MHLVDITSTYISFFLHEPSIYLVTSVLNEVFSLGFLVKFLCIP

SEQ ID NO: 4501 - DNA, 3158 bp, Homo sapien
gaactccctttaaggagcagccccagccctgctaacagcactgctggtaccattgacagcgacggctgggacgcgggtttctcagacatcgcgtcctcagtgcccttgccagtctctgaccgctgctttagccacctgcagcctactctcttgcagcgagccaagcccagtaacttcctgctggacagaaagaaaacggacaagctgaagaagaagaagaagaggaagcgcagggacagtgatgcgcctgggaaagaggggtacagggggggcttgctgaagctggaagccgctgacccctacgtggagacccccacgagtcccaccttgcaggatatcccccaggctcccagcgacccctgctcgggctgggactccgatactccctcgagtggatcttgtgccactgtgtcacctgatcaggtcaaagaaataaaaactgaaggcaaacggactatcgtccggcagggaaagcaggtggtgttccgagatgaggacagcactggcaatgatgaggacatcatggtggactcagatgacgattcctgggacctcgtgacctgcttctgcatgaagccatttgccggccgccccatgatcgagtgtaatgagtgccacacctggattcacctgtcctgtgcgaaaatccggaaatccaatgttccagaagtgtttgtctgccaaaagtgccgggactccaagtttgacatccgccgttccaaccgctcgcggacgggctcccggaagctgttcctggactgactgctggctggcgaggaggctgcgagcgtggaatcggaagcgaccgcgggcttttttgcccttctcttagttgagcacagaaccctcagctctggtgcgggcagatccctgccatttaggtgcctaagcaaaaggacaggctgtccaaggtagaaactgtacatagccggtgaccgaatgcgacctttgccagccagagctgctgccagagctgcgttccctgcagtggaggtggactggacacccacgtgcagcgggtttggctcatttgaaaatgagggtccgtggtagctgtgcgttttgctatcattgctaagagattcccgctgattgggctcagtgccagctgttattctgcttccactgtgttggggagaggtgttcggtttccccagcctgttaatgaacagccatacgtgtaagctttttcttgagtgttaagtcttttaccaaaagtgtctgtacagcagccatccaagttgcccctacttagtggcttgccctctgcctgcctcagctgctgcctgaccggctgggggaggcactggcgggaggcctcgggctcccctggaagggcgctgggctggcgggtcagctggtggttcttaggtttccttctgtttgttaaaagggacaatgtggccacttctctgtggaaagggagttggttggggggttgagatggcccgtgttcataactcagtttcctgttttgcacgatgtaaaaaccctgtctttttgcacgatacagccaaaagtattggctgatttcttgctgagtgccctcttagttggtgtgtgaggtcttggtgggctcaggccagctgtttgcgagtgtgggaactcataggttctgtctttgtctcttcctttcacctcattctggtagcagcataaaggttaggcaatcactgggacccgcatggtgttcctccaaagaatagggtaaaggagagctgggagggagccctctccgttgggtgactcttgtgtgccctttagacaggctggcctgccggttccacagggtacagttaggacttgagtctttctttttctgttttgagttggtgagtgagtgatagggtaacatgggccttcaggatgaccccttggaactgtgccgagttccttaaatctcagctgggatcctggacctgggaggcccctgtgagggccagctctggaaaaacctgggagttgatgccggaggctgtggaagaactctgctcgagggcagggtgccctggaacactggtagttctggggctgggagggagaggggctccggctttctctgaaatgaacactgctcttcagcagttcaagtacttgttctcaaaacattttctaattgattggtaggttttcataagcattgtttctttaaggcatggaaagggaagaatgctcaagcaagtcatgtttgttttcagtgggatgggcccgcgttctcactgctgggggcttccccttcatgtggcacctttgtgccaggccaccaggcagactcttcccaccttctcccactgaagcaccaaggggcttgaaccgtaatttggctaatcagaggcattttttttgtcctagtatctttcacacttgtccaaccgtcttatttttttaaaagttctgttgcttgtattaacacgaaactagagagaaatagtttctgaagccagtttattgtgaagatccccaagggggaggttcggtagagaaaaatagtaagctggtttagaaactgacgagggcaaacagccaggacgcattggagaggaatttgccaaagatctaccctgagataacgcctgtccagtgtcttcaccacgtgaataaccagcgctccaaagtgtttttctgctttgaaaaaaaaaaattccacaagcttttaaaggtgcatttaagaatccatgtgactttagaatggaactgccggccctggcaactgtcacgtgtgctagaaggttcgatgcctctggaatgcatgtgatactcatctccattttgtttccttgattgcatttttgttcttttagcagatctgtccctgtgggtggtgtctaagaagtcggacaccttggtttttgtgttagattgagctgggcagctgcaatcagcttctttatatgcaaattaggcacgacccatctgtggttcctggttggtggctaatgaagtgaggggagggagggatgtcaccccaaaagtaggccctcccattggctttggccaggccagacacttcacatcgtttacatggttctgtgtaattttaaagtttatgtgtataaagcgaagctgtttctgtgaaactgtatattttgtaaataaatatattgctactttgaggttcatgattcaaggttcaggcgattgcgttctgtgctgaagga

SEQ ID NO: 4502 - DNA, 5647 bp, Homo sapien
  Unsure 159-181: Unknown base
cagcccggccttcgtcgccgccgcctccctgctgctcctcctcctttccccagcccgccgcggccatggcggacagcgccagcgagagcgacacggacggggcggggggcaacagcagcagctcggccgccatgcagtcgtcctgctcgtcgacctcgnnnnnnnnnnnnnnnnnnnnnnnaggcggcggcggtgggaagtcggggggcattgtcatctcgccgttccgcctggaggagctcaccaaccgcctggcctcgctgcagcaagagaacaaggtgctgaagatagagctggagacctacaaactgaagtgcaaggcactgcaggaggagaaccgcgacctgcgcaaagccagcgtgaccatccaagccagggctgagcaggaagaagaattcattagtaacactttattcaagaaaattcaggctttgcagaaggagaaagaaacccttgctgtaaattatgagaaagaagaagaattcctcactaatgagctctccagaaaattgatgcagttgcagcatgagaaagccgaactagaacagcatcttgaacaagagcaggaatttcaggtcaacaaactgatgaagaaaattaaaaaactggagaatgacaccatttctaagcaacttacattagaacagttgagacgggagaagattgaccttgaaaatacattggaacaagaacaagaagcactagttaatcgcctctggaaaaggatggataagcttgaagctgaaaagcgaatcctgcaggaaaaattagaccagcccgtctctgctccaccatcgcctagagatatctccatggagattgattctccagaaaatatgatgcgtcacatcaggtttttaaagaatgaagtggaacggctgaagaagcaactgagagctgctcagttacagcattcagagaaaatggcacagtatctggaggaggaacgtcacatgagagaagagaacttgaggctccagaggaagctgcagagggagatggagagaagagaagccctctgtcgacagctctccgagagtgagtccagcttagaaatggacgacgaaaggtattttaatgagatgtctgcacaaggattaagacctcgcactgtgtccagcccgatcccttacacaccttctccgagttcaagcaggcctatatcacctggtctatcatatgcaagtcacacggttggtttcacgccaccaacttcactgactagagctggaatgtcttattacaattccccgggtcttcacgtgcagcacatgggaacatcccatggtatcacaaggccttcaccacggagaagcaacagtcctgacaaattcaaacggcccacgccgcctccatctcccaacacacagaccccagtccagccacctccacctccacctccgccacccatgcagcccacggtcccctcagcagccacctcgcagcctactccttcgcaacattcggcgcacacctcctcccagccttaatgcatgagcttagtctgaatttcaagttgggactcatccaatggagccgtctactcaacgccaaaggcttccttctctggcatatttggatatgacttatttgcactgaggttatctaggcttcactatccattgtgttgtaaatgtttgtcagaaatgcagccagtgttgtgggtctacaacactaaccagacgactttttccatcagtgttttacttgaatcttcatgtacgtccattccctggctggaaccttcgctgtttggtatttggtatttcagcagcagtgtgcaatttttgcttggcccagagcttcattctcctggcttttaggtttgtaaaagaaaaagggatatcttttttatatttttttccatgaatctgcagaaaattactgagctgttgttaccctcctctcattataatagtgtttaccaaacataccaataattcagcactacaattcagacctttgaaaatctggctttcagtgtagaacagaaagttagatgaatcagtgcccaagacatattttctgtttaacagaactttctacagatacattttttacaggttattttcattgtgttattgacatccatgtctctcgtaaaacagatggcccaaagtaatgaatcatgtggctgtaccttctccacataaatgggatggataattatcgtatattaagatgtgattctcttttttatccttaatgttaatctacttaacctggccccctctaacatgagtcgataaatgttgtcctactcaccggtggtttcaatggctaattagaatgtgttatttgatttctgctgcagaaggcagtgtgattgtaacaaaaacaatgcggcttccccctttcgtacttcatttgtgttctcttaaaatagagtttgaacaaatattttaaaggtgcaaaataccattagaaaatactatttgaaatggacattatcgcattatcttggcataatggccagaaaatattgtattgcttggcagaaaagaaaataaggtctaaaggaaagtagcacattagcattgatggctgttcatttcacccagtataagcaagtgcagtgtacaaagaagtatattctgaatacattatttccattcatttagcacaaataaatcatttggtttcactttgcagtggaacactgagtcactcttttcttaacacgtgcaacatcttaatttttgtttttcagcagttgctgttttgtactttggtagtgaagtgatttttaccacctgtgtttgcatatttatatatgctgtggatgaaaataacttactagagaatgtatattttatgacaagaatgtgtatctgttggatataatcagagaactgaaaagtaatttatcagtaatttttaagagtccatgttttgtgacaaccatctctaatagccaactctttattaaacacactcctaaaaataaggaaccatgacattgtagatatttaatattgtacagtatagaaacctccatttttgccttcgaatgcatatttaagagttaacagaatgaaaaaaaaaagtcttgttggataatagtgtttgactagcgttttaagaacttgagagtaaaagcaacaataagattttttcacctcttcctgcttccacccccaaactgagaacatcactcaattgtttggaagaaactgtaggtctatataaattttatttataatgtatgtgtaatatacataatcataatacagttctcagatgcagggaagaagtttggcatttaatcattgaggctttaggtttttgatgtgatcagactgggccatgtcaaacccggaattttcaccaacagttcactcaccctcctggtacattgccattccaaggaattctgagagtaggcaaacaaattttgccttcatggtacagttctcagtttttcttataggagaaatatggtatatgtttataagaatcttttatgagattatagatttcaatgctgtggatagtgtcttgcacccaaacaagaaagtccataatggaatgatcttccctcagcttcctatcgatttagttacctcttgaaagcacaaaaattaaaacattgccatatgttgaatttttaaaaagcacttggagtgagcgaacatttcctgataaatgccttttagagataggttcttgatattcagacatctgcagaaatgttctggttcccaaagtcatttcacttcgaaataaaacacagctccttcaaacagcactttttccacataaatctagttgcctctccctgtggacattcagaactgatagaacaaacactactcttttgaatttgatggttcgtgtcctttaaagtgtttgaggacctatgcagagcctgtaacacttgggtagtacctgctaggacaatttcttggcaattgtcttactactagggatcagtaagatttagattctgagcccataatggcaacagccccctcacctatgggaagctgacttccctcagtcgggcacttctcatgggggctgaacatggttcctgccattctgttacccactctcccaggtgagccctggattggctcccagaaggcctttgtaaaatcagtagccatcctgcaggcaggtgggagcaacaggggcttcagtagcttcattttcctgtcttgcagacagagacccttggctaccactgtgctgctaataggataagtactctgttgccagattaccatgccttttatacaaaaccaaattaacttacctaatacctgacacctctttgggctctgaactgctttctctcatcaagcatgctagcactctagacagaattctagaaatttggcagacagtggaagcctttaattgaacttactccttcgttgactgaaaggagttttaaattctgagctcctgagatactgactagcaaccatggaatgaatgtgtgaccagaaagtggctttgacaccaagtgctactgtccctttgtaattggcttctaacagattcaaccagaaataattgataatgtgaatttttgttaattgttcacttgtaggaaaatagaacatgtatcaccctttgttaggtagacatgaacttttcctgcacaaagccttgcttttagagaatgcccaataaggcaagaaaaagcatagtaacttgtgctttgagagctcaatatttgtatcttatcagtacagaagaaatatttctgtgtaacttgatcttctgtctagtacttgtcttataggtaaccaacactgaaaactttgtagtgatgactaccaaagaaatacatagtaaaacaaccttttatttccaaattgttaaagagccagccattgatgctgctacatgagttccatgctcaagagccattgtaagagattaaggggtttctaggtttttggtgattttttgtttgttctttttctttgttttttagggtttttttttcttctttaattttttgattaaaacatacacacagctgttagcataaagtcgtggggggcattttctggaatgctcagcagttctgattaactgccaagcccaggttgcctctcatgaggcaactgaaaaaatcctgtgtcttgatagcatgggtgctgtgtgtgtgcatgtgtgtgtctgcattcatgccttaactcgggttactgcacaactttagttcttgacttagtctgcaccgtcatctagattgtattgtacatctcggtctgaacttcatcctggcaaaaacaaagttgcaggcacaacagtttaagaatgcattcctccagaagagtatctggtcaggttgaccctgagccttctttggacttgatttggaacttagcctggaaagcgaaagtggactgtccaacagaaagatgtcaacaaggaaaagaggagagccaagcgctagcatgccttttgcctctgcatatctgtgcacactgtatgttgttcatgatagcttgtctacaacttgactaggttggagttctggtaatagtggcaatcttgacattcttggtcagagtttagagagatgtaagactttcaattaatgtcttatttactcctttatgttgattagtctttgatacatgtgctgaatcagaaacctaaataaagataattttttaaaatgtaaaaa

SEQ ID NO: 4503 - protein, 495 aa, Homo sapien
  unsure 53: unknown amino acid
  unsure 54: unknown amino acid
  unsure 55: unknown amino acid
  unsure 56: unknown amino acid
  unsure 57: unknown amino acid
  unsure 58: unknown amino acid
  unsure 59: unknown amino acid
  unsure 60: unknown amino acid
ARPSSPPPPCCSSSFPQPAAAMADSASESDTDGAGGNSSSSAAMQSSCSSTSXXXXXXXXGGGGGKSGGIVISPFRLEELTNRLASLQQENKVLKIELETYKLKCKALQEENRDLRKASVTIQARAEQEEEFISNTLFKKIQALQKEKETLAVNYEKEEEFLTNELSRKLMQLQHEKAELEQHLEQEQEFQVNKLMKKIKKLENDTISKQLTLEQLRREKIDLENTLEQEQEALVNRLWKRMDKLEAEKRILQEKLDQPVSAPPSPRDISMEIDSPENMMRHIRFLKNEVERLKKQLRAAQLQHSEKMAQYLEEERHMREENLRLQRKLQREMERREALCRQLSESESSLEMDDERYFNEMSAQGLRPRTVSSPIPYTPSPSSSRPISPGLSYASHTVGFTPPTSLTRAGMSYYNSPGLHVQHMGTSHGITRPSPRRSNSPDKFKRPTPPPSPNTQTPVQPPPPPPPPPMQPTVPSAATSQPTPSQHSAHTSSQP

SEQ ID NO: 4504 - DNA, 394 bp, Homo sapien
ataaaattctgcttgttaagaacaagtttggctctggtaactgaccttcaaagctaaaatataaaactatttgggaagtatgaaacgatgtctcgtgatctggtgtacccttatccctgtgacgtttggcctctgacaatactggtataattgtaaataatgtcaaactccgttttctagcaagtattaagggagctgtgtctgaaatggcactgtcttgtcagtcatttctgtttacctttttcttctgcccagagtgtatttgtgaagagtctcttatattatgttttgtggaaatcagcacacaaccacaatgacatttaagcacaggatcattattagtctatgtttttaataaacatatcaattaagaaaaaaaaaaaaaaaaaaaaaa

SEQ ID NO: 4505 - DNA, 2501 bp, Homo sapien
ggcacgagggcggtatggcgtcgggctgcaagattggcccgtccatcctcaacagcgacctggccaatttaggggccgagtgcctccggatgctagactctggggccgattatctgcacctggacgtaatggacgggcattttgttcccaacatcacctttggtcaccctgtggtagaaagccttcgaaagcagctaggccaggaccctttctttgacatgcacatgatggtgtccaagccagaacagtgggtaaagccaatggctgtagcaggagccaatcagtacacctttcatctcgaggctactgagaacccaggggctttgattaaagacattcgggagaatgggatgaaggttggccttgccatcaaaccaggaacctcagttgagtatttggcaccatgggctaatcagatagatatggccttggttatgacagtggaaccggggtttggagggcagaaattcatggaagatatgatgccaaaggttcactggttgaggacccagttcccatctttggatatagaggtcgatggtggagtaggtcctgacactgtccataaatgtgcagaggcaggagctaacatgattgtgtctggcagtgctattatgaggagtgaagaccccagatctgtgatcaatctattaagaaatgtttgctcagaagctgctcagaaacgttctcttgatcggtgaaaccataaggagcccagtgttcctgttcatgaaatctcccttttactggaaaacaggaatattgactaccaaatcacaatgcaattgaagccgtactgcttttttgagcagttattcattccagtgattaaaactgattgtgcagaatattctaagaggtcagaaattggtgtgtataactacatttttagtgatgcaatttattgattagtgagtaagatactgtttttattgagagatttgatttttataaagtaaaaatacggctgcattagggttacaaacagaaaagtgtcttaatgtctaaggagggcatattagctacactacaaaaacaaattttgtctgtacttctgaaaagaattttgttgtttctcagctgttttccaaaagcaaaggaagtctttatggtttttttctatttcatgttattgtgatttgtttataagtttgggtggggtgcataccatattcttggttcttaaaatctatcacttttcaccttacacttgatgtgtgaaaactataaaaacaatgtgtgaaacccaggggttctaaaatacaagcatagattttatcagggtgttttgtcaaagcaggttattcagtgattcctccccaccattcttaagaacgttaaataatgctgttgtgttagctctgagtagaaaggaaaaagtaaaacctctgtttggaggtaatattgggttgaattctgactgcccctttctagctggacctttaacaaatcacccaatcttttttgtgtttctctaaagtcatttatacattaaatgtaattatagcaactgtggggttctgttgagaattaagagctaacactatatatgtaaagtttccagtactagtcccagaatttagaatatgctcaacacaaagtaaacagcattatataagtttatatttttgtgagttataaagtactttgatatattctcattaaatctgtaaatcacctctataagtaagtggtaataataaagcagatatttttgtccccatttaaaaaatgaagaaattaatgcttaatagggtggtaccctggaaaggatctgggaagtggtagaatttctggtctgtacttttacaaatggagcccttgggaggtgggttaggtaaaagaagctttttacttaacgttgtcttatttccagtctaattttacgctgtagcagaaccagatggctgagaaaattctggaactatggatcttgaccccaaggatatattattttattccaagaaagatcaggtaggcgaaaagatgacaggatacagagtcaatccataaactaaatatttataactgttctgaattatacagagtctaaaaatatgtgtcagctacttcattcctgtaaatactcttgctgtgttataaatatggcaagaaataaacatgaccaatatcaatagacttcttgaggctactataagttttgagaaataaggttcaaaaaataagaatgctaacacttaagcacagactagagcttgcttgggtttcttcctgcattacaaggtaaaaatttgttaatgtttgtttttattcagcttgggaaagctttgtgccatgaatacgtcgcatttaataacaagcaacacacggcatatagaaataactttaattaaaaaacttacatagaagattataatatcagacgtgacaaagatttgagtttatttgcctggacaacttgggtttgtctggcttttgttttctttttctttaaaaataaatgtacagtaaaactaaaaaaaaaaaaaaaaaaaaaaaaa

SEQ ID NO: 4506 - DNA, 1513 bp, Homo sapien
ctccgtctcaaaaaagatgaaaataaaataaaatatatatttacaggcctacaacttttgcctcagactgttccccttttctaagggtattcaagttttcaccttttaagcttcatatcctcagtgcttgtagaatgatgagcttagaggtaccaggtcattgcagttgtttgcttaaagacttattgaaatggttactggcgtaaatacttggccaactcaactttattgcccctgatcttttccatttttgtttccaccttaacctatagcagctcctccaaatgaggaatgctgtaagtaagactcatcaaacagattttaaccattttattatcctgtgtgtccttacattgcttctgtgagatgtttttttcttatctgagatgaactttcaggagcctatttgaactccagactggtgttctggggcaaagagctattagccaaactgattctatgcaggtgaaggatgcactaaagttctcactttagtgagaacttttctagctattccaatacagagttctttcttatagggctattgatattgacaccaaatggagtggcttctcagcctcttaatgtcttaagtaagtgcttaatttggaatagagaaaccagtatattttaaaaaaagaaaaatattctttgtagcaactgtaaattctcccattataacagtgaacagagctccaggtaataacgcataggcatgtcaggttgcatctgtatatttgactacattagtattagtgacatcaggtggatataaaagaaaacccttggaaagagaactgccttagccatgatttcgttagtagacctatttatgattcaattgcaattttcagataggatgtgaacatggaatttcattgaaaatagtttaattttttatataaaaggttttgtatataatgtgtgtcagtgactattttcaaaatcattttcatcaagacaccttttttctaaaataggcattgcatacacatatgcacacgtatgtgcatgtgccacacattttttgtataatgttgggtttgattataaaagtgttgtcaaatgttttatttatctgcatatagcagtggttggcttttttgaattgaaatttttgcgcattgatgcattgaaataaggaaaattatttatctctgagcactaaacttatttttgcatatttctgtaatattgcagtccccagatccagaacatgggaagttagggaaaatgtgtgattttgtgttttgaattactgtcagaattacatacacaattacaacaaactttttttaaaagacatttcattgtactgcaaaaatctgaatatttatatttcttgtttttttctttatatgttttgcattttaatatgttgagccactggaaatttgtaacagattaatttgttataggagtttaaatgtgttgtcattgtctccattgtctttgtccagagcctattattatggaaacaataaaatttattgtgtcagttgctttgattctt

SEQ ID NO: 4507 - protein, 28 aa, Homo sapien
MCCHCLHCLCPEPIIMETIKFIVSVALI

SEQ ID NO: 4508 - DNA, 454 bp, Homo sapien
  Unsure 451: Unknown base
catgccaatgccttcatactgagttctgggcccctctgcaaataagtctgagaagccccttctctccttcctttatcgtggcctatgctgcagaatctcactgcagctggcaaaaggcattggccagctctcagaaatccctttactcaacgttgaagctgcattttggtcaatgtgggtaacttactttagaaaatgacttgagtttaggtctcccccacccatatttaatttttcccaagttgctggtagaagagaaatttaaaagtggatcaatcctcacagagagagttctttttgttgttgtttattgaaaaaaatgcaatacaagaagcaagaccaaacagatatctaaacactacaaccacttctactacgaaagggcccaaaacagcagacttgattattgcctgtatagtcctaaagattctgccaatctggattctgctgnccg

SEQ ID NO: 4509 - DNA, 4786 bp, Homo sapien
gggggctgccaagggaggaggaagatggcggcgggggcgaggtgaggtgttggcagtggaaaggggttcgggctcggggggcggggggacgcggagcgatggcccgcgccggccgcaggggcggataaaaagccgtcgcgctgcgggagtgggcgggagggagagggggtgtccgagggccacaagagtatgacggggctgtacgagctggtgtggcgggtgctgcacgcgctgctctgtctgcaccgcacgctcacctcctggctccgcgttcggttcggcacctggaactggatctggcggcgctgctgccgcgccgcctctgccgcggtcctagcgccgctcggcttcacgctccgcaagcccccggcagtcggcaggaaccgccgtcaccaccggcacccgcgcgggggggtcgtgcctggcagccgcacaccaccggatgcgctggcgcgcggacggtcgttccttggagaagctgcctgtgcatatgggcctggtgatcaccgaggtggagcaggaacccagcttctcggacatcgcgagcctcgtggtgtggtgtatggccgtgggcatctcctacattagcgtctacgaccaccaaggtattttcaaaagaaataattccagattgatggatgaaattttaaaacaacagcaagaacttctgggcctagattgttcaaaatactcaccagaatttgcaaatagtaatgacaaagatgatcaagttttaaattgccatttggcagtgaaggtgctgtctccggaagatggaaaagcagatattgtaagagctgctcaggacttttgccagttagtagcccagaagcaaaagagacccacagatttggatgtagatacgttagccagtttacttagttcaaatggttgtcctgatcctgatttagtattgaagttcggtcctgtggacagcacattaggctttcttccctggcacatcagattgactgagattgtctctttgccttcccacctaaacatcagttatgaggactttttctctgcccttcgtcaatatgcagcctgtgaacagcgtctgggaaagtagtggtcattggttgcataatttgatttgaggcttgtggaggaaaggaaccaagtgactctgatgtttacaaagcacctatgaaaccctgtacacacctagttcataatcctcataatttatcaacaaacacaaaaaagtgtcttacttgagagtgagtgtgtgtagtgtgcgtgtgcacgtgcacacatgtgcacgtttgtatgtatggaaataaacttataaatggggacgtattggagaaggaaatacatagacctacaactttgagcaaatagcagtgatgttttaggaactgaaatgtcacacttaaagtcttcagcccagctacttccctatttttgtggggagaagagggcctgattagaactgttctggttgtgtttggcgggaggggaataatttttgttcagtccttcttagtgaccaaactttaatttttaagaataatatattgacttactgaactgaagcattctgagttgaaaggagctccagaggagtggagttctgtgttgctcacatgttaaaatcttgctcaccttcagagcagagggaatacctatcttcagatatccgtccattttcatctcttaattgtagtcaaaagtatgacttgagagtgttgctctggtattctgggttctgaagtctggtattctggtattctgggttcaaaagtatgacttgagagtgttgctctggtattctgagagttgctctgtattctgggttctgaagattatttgaaaaataactcctactacattgaaatgcagacttaaaaatttaaacattggattaggcagtcaaaaaaaccaagcaagcataaaaggtcaataagttgtaatcttgatagtaaaggtggaaaacttattataaatggaaagaaagttttatttccttttttgtttgatgggcagtatgccatattatacccaaagttcttttaaaaaatatttccatcaaccatttttatttaaaataaacatttgagggaagttaccaaggcagcttttttcctcaaaagtaacctgttcctctttggaatagcacattttaggggcatggttaatacctgagatttttactcagtaaatcctgatggttactgtgtgtaaaatatctttaagtaggattgaaggcctctgtgggggaataaaatattaccaaagtctataaaaataaattttacatgttctcttttatgacagagagcagcactggttctgttatttttaaaatgaataattgatttcttgataggtgtttaatatttcttccctcactgctgattcttagatagaaaccattctttatatttgatagactgctttcagaaaacccttatcaacaagtgtacaatacttatctaaaactatacatttagaatggagcagtttaatactagatctcagaagttttgaaaaatagcaaagaagactggatttggaaagcatggtctacaattggttgttaaattctgaagctatgaagaataaatgtttcaactttggattatgaaaccccatttatgattttttaaatacacttgaaataaaaatgattaaactaaattttggtccagtgacattactttgcactgcataatccattatacgttgtacgacttttttttttggttttaatttattactgagagttttgtgtgaagctacagcatatctaaccagagaatttctgattccttatactgtgattatattatattgaggcatttgtagtgcagctgaagactgaatttatgccttttgtaaacatgataggtataaatgtcttataaacattctggagtatgtatagctttaatgaatgaaatttaatggacctgattaaaatgaagggatttaatcgttgttaaagttaagttagtcaaataaattacctactggaatatagcccaagccagtaaaggtttaatatttgcattttcgtgcttttattttctccttccattcataagtatatacttgaaagtacatctgtagcctatgatttgagtctcttgaagttctaggaagaggcaaactacaaactactaggattctgatttcagatgtagtcattccagaaccttctctttatgagttcacctgctagtacaatctccacaacttgaatggcattggttgttctgtaattcctgccaaaagcatcacaagttgtacatcatcaaggctccctttgcactcccaagaagaactggtaattttaaacaaaagtatgtgtctttatttgtattggaaaatactgtctttaaattgtttcttgttgacactccccacaatggaaaaattaccgaattaaacctgttttatggatggcagcttggagcatagcaagaagttggaggatttgaattccattcccagttctcattgtgttttgtttcttaaaactataataatcggttactgttataaagtttaaaaggtggttttaatgtgaatagcaaattctggtatatcgtgactaacgcttaagaatgcctgtctttgagaggaaggtgttataatattaatgaacagtgccaaatacactgtgcatatctgcaatttaatctttgaatgtatgttactggattagctccctcctcctgtgtgatggtaccatgcatagagtcaatcaaatccttgtgatgttttgtatggactttgacaatatgtaaataatgtgtaaagccagtttttatgattaaggaatcaaatttattgaattttattattgaaagttgaaacttaacatgtatgaacaaaaaccaataaaagaatatactcttttcattgactatagtattatgtgaatgctacatttgttctgaacacttaggggctgcaaaaatgtaataagaaatgcatatgactagatagcaatagtgttttttttagatggtatgctcttgattgaaatatattctcacttttaccaggttaaacatttggaatcttataatgttacttgctttttgatagataatagtgaaataaattcagctttgccattgctggagttgtcaaaattccacagtaattaaaatttgaatttttaccgaatatgaaatttccaaattaaaaacgtatatgtgtactcttttaaaaaggaatttgatagttcttgtcaaatgagaaaatttaaaggtaagagttatggtttgtcttatgctgcatagactattcacctcctaacttgaaggtctaatcataagacaattgtttttttgtgcatagttttcatctaaaattaagtttaccaaaggcaaataactgcttactaggaacttcctttagcaaaaattactataaagttcaggacagtttgaaataaaacccaggaaacaagattaatgtgagcagttctccaagatcctaactggtgggacataaactatgatgcaatggataggaaaaggtagtgcaaaaagaatttcttaaggtttaaaaaatacacttttcattataggaaaaagaagattcagagaaacaaaggaatgtaaccttattgattacatttttggtgatcaccgagaattttttgtactatattttaaaaaatgtattctactgtaacaagttaataaagagattttttaaaaaactataaactagaaattgagagtcttgcattctcttttgtatttgattattgtgtctggatataaattacaatagcacatgaaaataaaatgttttaaaaaaa

SEQ ID NO: 4510 - protein, 209 aa, Homo sapien [sequence omitted]

SEQ ID NO: 4511 - DNA, 7204 bp, Homo sapien
gccccagcactcgccggcggcagtgaaaggacgcgccggagccggataacagaaagtaacgtgaaggaattcaggtgactcagacatggaggagagaagacctcatctggatgccaggcccaggaattcccataccaaccacagaggccctgtggatggagagttaccaccaagagctagaaatcaggccaataacccaccagccaatgctctccgaggaggagccagccaccctggaaggcatcctagggccaacaaccatcctgctgcttactggcagagggaagagagatttagggccatgggcaggaacccacatcaaggaaggaggaaccaggaggggcatgccagcgacgaagctagagaccaaagacatgaccaggagaatgacaccaggtggagaaatggcaaccaggactgtaggaaccgcagaccaccatggtccaatgacaacttccagcagtggcggactccccaccagaagcctacagaacagccacagcaggcgaagaaactgggctacaagttcttagaaagtcttctgcagaaagacccttctgaggtggtcatcacacttgccacaagtttagggctgaaagagctcctttctcattcttccatgaaatctaacttccttgagctcatctgtcaggttcttcggaaggcttgtagctccaaaatggatcgccagagtgttctccatgtactgggcatattgaaaaactccaaatttctcaaagtctgcctgcctgcttatgtggtagggatgatcactgaacccatccctgacatccgaaaccagtatccagagcacataagcaacatcatctccctcctccaggaccttgtaagtgtcttccctgccagctctgtgcaggaaacttccatgctggtttccctcctgccaacctctcttaatgctctgagagcctctggtgttgacatagaagaggaaacggagaagaacctggaaaaggtacagactatcattgaacatctgcaggaaaagaggcgagagggcactttgagagtggatacctacactctagtgcagcctgaggcagaagaccatgttgagagctaccgaaccatgcccatttaccctacctacaatgaagtgcacttggatgagaggcccttccttcgccccaatatcatttctggaaaatacgacagcactgctatctatctggatacccacttccggctcctgcgagaagatttcgtcagacctttacgggaaggtattttggaacttctccaaagctttgaagaccagggcctgaggaagagaaagtttgatgacatccgaatctactttgacaccaggattatcacccccatgtgttcatcatcaggcatagtctacaaggtgcagtttgacacaaaaccactgaagtttgttcgctggcagaattccaaacgattgctctatgggtctttggtatgcatgtccaaggacaacttcgagacatttctttttgccaccgtatctaacagggagcaggaagatctctgccgaggaattgtccagctctgcttcaatgagcaaagccaacagctgctagcagaggtccagccctctgactctttcctcatggtagagacaactgcatactttgaggcctacaggcacgtcctggaaggactccaggaggtccaggaggaagatgttcccttccagaggaatatcgtggagtgtaactctcatgtgaaggagccaaggtacttgctaatggggggcagatatgactttacccccttaatagagaatccttcagccactggggaatttctaagaaatgtcgagggtttgagacatcccagaattaatgtcttagatcctggccagtggccctcaaaagaagccctgaagctggatgactcccagatggaagccttgcagtttgctctcacaagggaactggctattattcaaggacctcctggaacaggcaaaacctatgtgggtctaaaaattgttcaggccctcctaaccaacgagtctgtttggcaaattagcctccagaagttccccatcttggttgtgtgttatactaatcatgctttggaccagtttctggaaggcatctacaattgtcagaagaccagcattgtgcgggtgggtggaaggagcaacagtgaaatcctgaagcagttcaccctaagggagctgaggaacaagcgggaattccgccgcaacctccccatgcacctccgaagggcctacatgagtatcatgacacagatgaaggagtcagagcaagagcttcatgaaggagccaagaccctggagtgcaccatgcgtggtgtcctacgggaacagtacctgcagaagtacatctcaccccagcactgggaaagtctcatgaatggaccagtgcaggatagtgaatggatttgcttccagcactggaagcattccatgatgctggagtggctaggtcttggtgtcggttctttcacgcaaagtgtttctccagcaggacctgagaatacagcccaggcagaaggggatgaggaggaagaaggggaggaggagagttcgctgatagagatcgcagaggaagctgacctgattcaagcagaccgggtgattgaggaggaagaggtggtgaggccccagcggcggaagaaggaagagagtggagcagaccaggagttggctaaaatgcttctggccatgaggctagaccattgtggcactgggacagcagctggacaggagcaagccacaggagagtggcagacccagcgcaaccagaaaaagaaaatgaaaaaaagagtgaaggatgagcttcgcaaactgaacaccatgactgcagccgaggccaacgagatcgaggatgtttggcacctggacctcagttctcgctggcagctttataggctctggctacagttgtaccaggctgacacccgccggaagatcctcagctatgaacgccagtaccgcacatcagcagaaagaatggccgagctgagactccaggaagacctgcacattcttaaagatgcccaggttgtaggaatgacaaccacaggtgctgccaaataccgccagatcctacagaaggtggagccgaggattgtcatagtggaagaagctgcggaagtccttgaggcccataccattgccacattgagcaaagcttgccagcacctcattttgattggggaccaccagcagctgcgccccagtgccaacgtgtatgatctggccaagaacttcaaccttgaggtgtccctttttgaacggctagtgaaagtaaacattccctttgtccgtctgaattaccagcaccgtatgtgccctgaaattgcccgccttttgaccccccacatttaccaggatctggagaatcatccatctgttcttaagtatgagaagattaagggggtgtcttccaaccttttctttgtagaacacaactttcctgaacaggaaatccaagagggcaaaagccatcagaaccagcatgaggctcactttgtggtagagctgtgcaagtacttcctgtgccaggaatacctgccttcccagatcaccatcctcactacctataccgggcagctcttctgcctgcgcaaactgatgcctgccaagacatttgctggcgtcagggtccatgttgtggacaaataccaaggggaagagaatgacatcatcctcctctcgctagtgcggagcaaccaagaaggcaaggtgggttttctgcagatatccaaccgcatctgtgtggccttgtcccgagccaagaagggaatgtactgcatcggaaacatgcagatgctggccaaggtgcccctgtggagcaagatcattcatacacttcgagagaacaatcaaataggccccatgctccggctctgctgccagaaccaccctgaaacccacaccttagtatccaaagcttctgacttccaaaaagtacccgaaggaggctgcagcctgccctgcgagttccgcctgggctgtgggcatgtctgcacccgtgcctgccacccttatgactcttcacacaaggagttccaatgcatgaagccatgccagaaggtcatctgtcaggaagggcaccggtgtccccttgtttgcttccaggagtgtcagccttgtcaggtgaaggtgcccaaaatcattcctcggtgcggccatgaacaaatggtcccttgttccgtgcctgagtcagatttctgctgccaggagccttgctccaagtctctgagatgtgggcacagatgcagccacccatgtggtgaggactgtgtgcagttgtgttcagaaatggtcaccataaaactcaagtgtgggcacagtcaaccggtaaaatgtggtcatgtggaaggcctcctgtatggtggtctgctagtcaagtgtaccacaaagtgtggcactatcttggactgcgggcatccttgcccaggctcctgccacagctgcttcgaagggcgtttccatgaacgctgtcagcagccctgcaagcgcctgcttatctgctcacacaagtgccaggaaccatgcattggtgagtgcccaccctgccagcggacctgtcagaaccgctgtgtccacagccagtgcaagaagaaatgtggggagctgtgtagtccctgcgtggaaccctgtgtctggcgctgccagcactaccagtgcaccaaactctgctctgagccctgcaaccgacccccatgctatgtgccttgtactaagctgctagtttgtggccacccctgcattggtctctgtggggagccatgccccaagaaatgccggatctgccacatggatgaggtcacccaaatattctttggctttgaggatgagcctgatgcccgctttgtgcagctggaagactgcagccacatctttgaggtgcaagccctagaccgctacatgaatgaacagaaggatgatgaagtcgccatcagattgaaagtctgccctatctgccaggtgcccatccgcaaaaacctgaggtatggaactagcataaaacagcggctagaagagattgaaatcatcaaggaaaagatccagggctcagcaggggaaatagcaaccagccaggaacggcttaaggccctgctggagaggaagagcctcctccaccagctgcttcctgaagacttcctgatgttaaaggagaagctggcccagaaaaatctgtcagtgaaggacctgggtctggttgagaattacatcagcttctatgaccacctggccagcctgtgggattccctgaaaaagatgcatgtcttagaagagaaaagagtgaggactcgactagaacaggtccatgagtggctggccaagaagcgcttgagcttcactagccaggaactaagtgacctccgaagtgaaatccagaggctcacatacctggtgaaccttctgacccgctacaagatagcagagaagaaggtgaaagatagcatagcagtagaggtctatagtgtccagaatatccttgagaaaacatgtaagttcacccaagaggatgaacaacttgtgcaggaaaagatggaagctctgaaagccacccttccctgctctggcctgggcatctcagaggaagagcgagtgcagattgtcagtgccataggttatcctcgtggtcactggttcaagtgccgcaatggccatatctatgtgattggcgattgtgggggagccatggagaggggcacgtgtcctgactgtaaggaagtgattggtggcacaaatcatactctggaaagaagcaaccagcttgcttctgaaatggatggagcccagcatgctgcctggtctgacacggccaacaacctgatgaactttgaggagatccaggggatgatgtaggaagatggtacaccactgccttttgccctcgccactgaatgactggggccagctccctaatgaaggaactgaagtttgttttttattatcatcctttttaggctgggcgcagtggcttacgcctgtaatcccagcactttgggaggccgaggcaggcggatcacgaggtcaggagttcgagaccagcctgaccaacatggcgaaaccccgtctctactaaaaatacaaaaattagctgggcgttatggcgggcgcctgtaatcccagctacttgggaggctgaggcagaagaatcgcttaaacccaggaggcggaggttgcagtgagctgagatcatgccattgcactccagtctgggcgacaggagcaagactctgtctcaaaaaaaaaaaatcattctttttagtcttagcacctacttaaggatccacttttagggctcacccacatttgtttctagatttacccctgcgctagagtaagcactttatctccagaactgagagcaaagttaacaaatctcaccccttctctcctgcaaattagtggacagactccctggaacatgtttggggcttccacctagggccacctagtggtatctctgggtctttacttggtcagatgtttattctacattgttccccaggaacagagtatgagctcattgatgcagaccgattctaattgccaggccctaatttgcagactaactctcataataaacagaggcccatagttgtttatgaactgcttatcccttaaaggagcacaagaacccctccctgccctccttgggcaccctgcctccaggagatggaggcacgtgataagacaaaagactgcaccaactcaccctgacacagttacatagtcactgagagtggggaagatgggacagcccacatgctgcataagatgggccttatgcagcaggcccaggtcgtcattaaggagtgacccctttcctgtaacctgcactttgggatggtagaagtttctttacctgctgacaggtttggtggcactgctggttacccctgggccctgaatggagctaaaatcacatttggtaccagcagcacctatcccaagtgtgatccttcatcccaacactccctcttggagctgttccctgggtagagctagcatgccagcagcttctgcaggctccaaacccaggccagaagccagacccaggcctgctgcctgcatctgcattccctccttccagtgttccttagaacagacatttaggtatctcaggtcctttctaagtgtccctttcctatgtatgcatttcctttttttgtctttactatgcactttagcttataaagccaattaaaaacgatgattgag

SEQ ID NO: 4512 - protein, 1925 aa, Homo sapien
RNSGDSDMEERRPHLDARPRNSHTNHRGPVDGELPPRARNQANNPPANALRGGASHPGRHPRANNHPAAYWQREERFRAMGRNPHQGRRNQEGHASDEARDQRHDQENDTRWRNGNQDCRNRRPPWSNDNFQQWRTPHQKPTEQPQQAKKLGYKFLESLLQKDPSEVVITLATSLGLKELLSHSSMKSNFLELICQVLRKACSSKMDRQSVLHVLGILKNSKFLKVCLPAYVVGMITEPIPDIRNQYPEHISNIISLLQDLVSVFPASSVQETSMLVSLLPTSLNALRASGVDIEEETEKNLEKVQTIIEHLQEKRREGTLRVDTYTLVQPEAEDHVESYRTMPIYPTYNEVHLDERPFLRPNIISGKYDSTAIYLDTHFRLLREDFVRPLREGILELLQSFEDQGLRKRKFDDIRIYFDTRIITPMCSSSGIVYKVQFDTKPLKFVRWQNSKRLLYGSLVCMSKDNFETFLFATVSNREQEDLCRGIVQLCFNEQSQQLLAEVQPSDSFLMVETTAYFEAYRHVLEGLQEVQEEDVPFQRNIVECNSHVKEPRYLLMGGRYDFTPLIENPSATGEFLRNVEGLRHPRINVLDPGQWPSKEALKLDDSQMEALQFALTRELAIIQGPPGTGKTYVGLKIVQALLTNESVWQISLQKFPILVVCYTNHALDQFLEGIYNCQKTSIVRVGGRSNSEILKQFTLRELRNKREFRRNLPMHLRRAYMSIMTQMKESEQELHEGAKTLECTMRGVLREQYLQKYISPQHWESLMNGPVQDSEWICFQHWKHSMMLEWLGLGVGSFTQSVSPAGPENTAQAEGDEEEEGEEESSLIEIAEEADLIQADRVIEEEEVVRPQRRKKEESGADQELAKMLLAMRLDHCGTGTAAGQEQATGEWQTQRNQKKKMKKRVKDELRKLNTMTAAEANEIEDVWHLDLSSRWQLYRLWLQLYQADTRRKILSYERQYRTSAERMAELRLQEDLHILKDAQVVGMTTTGAAKYRQILQKVEPRIVIVEEAAEVLEAHTIATLSKACQHLILIGDHQQLRPSANVYDLAKNFNLEVSLFERLVKVNIPFVRLNYQHRMCPEIARLLTPHIYQDLENHPSVLKYEKIKGVSSNLFFVEHNFPEQEIQEGKSHQNQHEAHFVVELCKYFLCQEYLPSQITILTTYTGQLFCLRKLMPAKTFAGVRVHVVDKYQGEENDIILLSLVRSNQEGKVGFLQISNRICVALSRAKKGMYCIGNMQMLAKVPLWSKIIHTLRENNQIGPMLRLCCQNHPETHTLVSKASDFQKVPEGGCSLPCEFRLGCGHVCTRACHPYDSSHKEFQCMKPCQKVICQEGHRCPLVCFQECQPCQVKVPKIIPRCGHEQMVPCSVPESDFCCQEPCSKSLRCGHRCSHPCGEDCVQLCSEMVTIKLKCGHSQPVKCGHVEGLLYGGLLVKCTTKCGTILDCGHPCPGSCHSCFEGRFHERCQQPCKRLLICSHKCQEPCIGECPPCQRTCQNRCVHSQCKKKCGELCSPCVEPCVWRCQHYQCTKLCSEPCNRPPCYVPCTKLLVCGHPCIGLCGEPCPKKCRICHMDEVTQIFFGFEDEPDARFVQLEDCSHIFEVQALDRYMNEQKDDEVAIRLKVCPICQVPIRKNLRYGTSIKQRLEEIEIIKEKIQGSAGEIATSQERLKALLERKSLLHQLLPEDFLMLKEKLAQKNLSVKDLGLVENYISFYDHLASLWDSLKKMHVLEEKRVRTRLEQVHEWLAKKRLSFTSQELSDLRSEIQRLTYLVNLLTRYKIAEKKVKDSIAVEVYSVQNILEKTCKFTQEDEQLVQEKMEALKATLPCSGLGISEEERVQIVSAIGYPRGHWFKCRNGHIYVIGDCGGAMERGTCPDCKEVIGGTNHTLERSNQLASEMDGAQHAAWSDTANNLMNFEEIQGMM

SEQ ID NO: 4513 - DNA, 2286 bp, Homo sapien
gttcctcacccccgcttcgccctcacactttcgggatgtctgcgattcctgctgaggagagcgaccagctgctgatccgaccccttggagctgggcaagaagtaggaagatcatgtattattctcgagttcaaaggaagaaaaataatgctcgactgtgggatccaccctggcctagaaggaatggatgctcttccttatattgatttaattgacccagctgagattgatctcctattaattagtcatttccatttggatcactgtggagctctgccctggtttctacagaagacaagtttcaaaggaagaacatttatgactcatgccacaaaagctatttatagatggcttctttctgattatgtcaaagttagtaacatatcagcagacgacatgctgtataccgagacagatttggaagaaagcatggacaaaattgaaactatcaactttcatgaagttaaggaagttgcgggaatcaagttttggtgttaccatgcaggtcacgtcctaggagccgccatgttcatgattgagatcgcaggcgtgaagcttttgtacactggtgatttctcaagacaagaagataggcacttaatggcagctgaaattcctaatattaagcctgatattcttatcattgaatctacttatgggacccatatccatgagaaacgtgaagagcgagaagcaagattctgtaacactgtccacgatattgtaaacagaggaggcaggggtctcattcctgtctttgctcttggaagggctcaggagctgctcttgattctagatgagtactggcagaatcacccagaactacatgacattccaatatactatgcatcatctttggccaagaagtgtatggcagtgtaccagacatatgtaaatgccatgaatgacaaaatccgcaaacagatcaacatcaataatccctttgttttcaaacacattagtaacctcaagagcatggatcattttgatgacattggtcccagtgttgtaatggcctccccaggcatgatgcaaagtggcttatccagagaattatttgaaagctggtgtactgataagaggaatggtgtcattatagcgggatactgtgtagaagggacacttgccaagcacatcatgtctgaacctgaagaaatcactactatgtctggacagaagttaccactgaaaatgtctgttgattacatttctttctcagctcacacggattaccagcaaaccagtgaatttattcgtgctttgaaaccgcctcatgtgattttagtccatggagaacagaatgaaatggccagattgaaagcagcactgattcgagaatatgaagataacgatgaagttcacatagaggttcataatcctcggaatacagaagcagtgaccttaaacttcagaggagaaaaactagccaaggttatgggatttttagcagacaaaaaaccagaacaaggccagcgggtctcaggaatacttgttaaaagaaactttaattatcacatactttctccttgcgacctgtccaattatactgacctggccatgagcacggtgaagcagacccaagccattccatatactggtccctttaatttgctctgttaccagctgcagaaattgacaggtgatgtggaagaattagaaattcaagaaaaacctgctctgaaagtgttcaaaaatattactgtaatacaagaaccaggcatggtggtattagaatggctggcaaacccttctaatgatatgtatgcagatacagtaacaactgtgatattggaagttcagtcaaatcccaaaataagaaaaggtgcagtacagaaggtttctaaaaaattagaaatgcacgtttacagcaagaggttggagatcatgctccaggacatatttggagaagactgtgtaagtgtaaaggatgactctattcttagcgtcacagtggacgggaaaactgccaaccttaacttggagacacggactgtagaatgtgaagagggaagtgaagacgatgaatccctccgagaaatggtggagctggctgcacagagactgtacgaggccctgacgccagttcactgagactgtgcctgtatatgaactttgaaaaaatacttgactctacttttgttacctaaaataaaatgcattcgtttctctgggaaaaaaaaaaaaaaaaaaaaaaaaaaaaaaaaaaaaaaaaaaaaaaaaaaaaaaaaaaaaaaaaaaaaaaaaaaaaaaaaaaaaaaaaaaaaaaaaaaaaaaaaaaaaaaaaaaa

SEQ ID NO: 4514 - protein, 684 aa, Homo sapien
MSAIPAEESDQLLIRPLGAGQEVGRSCIILEFKGRKIMLDCGIHPGLEGMDALPYIDLIDPAEIDLLLISHFHLDHCGALPWFLQKTSFKGRTFMTHATKAIYRWLLSDYVKVSNISADDMLYTETDLEESMDKIETINFHEVKEVAGIKFWCYHAGHVLGAAMFMIEIAGVKLLYTGDFSRQEDRHLMAAEIPNIKPDILIIESTYGTHIHEKREEREARFCNTVHDIVNRGGRGLIPVFALGRAQELLLILDEYWQNHPELHDIPIYYASSLAKKCMAVYQTYVNAMNDKIRKQININNPFVFKHISNLKSMDHFDDIGPSVVMASPGMMQSGLSRELFESWCTDKRNGVIIAGYCVEGTLAKHIMSEPEEITTMSGQKLPLKMSVDYISFSAHTDYQQTSEFIRALKPPHVILVHGEQNEMARLKAALIREYEDNDEVHIEVHNPRNTEAVTLNFRGEKLAKVMGFLADKKPEQGQRVSGILVKRNFNYHILSPCDLSNYTDLAMSTVKQTQAIPYTGPFNLLCYQLQKLTGDVEELEIQEKPALKVFKNITVIQEPGMVVLEWLANPSNDMYADTVTTVILEVQSNPKIRKGAVQKVSKKLEMHVYSKRLEIMLQDIFGEDCVSVKDDSILSVTVDGKTANLNLETRTVECEEGSEDDESLREMVELAAQRLYEALTPVH

SEQ ID NO: 4515 - DNA, 1939 bp, Homo sapien
  Unsure 108-139: Unknown base
gtggtagaggaggtttccaaggcaggggagattatggtggaagagggggttatggtggaagagggggctatggtggaagaggctatggagatcccatatggcaggcannnnnnnnnnnnnnnnnnnnnnnnnnnnnnnncaggtggatatagaagatactaaaaactataaaaattagatagcagtgcttgcttctttatagatacattagaaatagtgttccaaataacatacttgaatatcatctttgaagtaaacaccatgttagactccctggtgataccactcttgaattggttaatatgtaagaacattgttttttattaccagttgatctctcaaatgaagtgatgactttttccatattctgtgtacccttgagcatgttgtgtctttttaaaaaacaaaaaaaagaacaaaaattattttttaaaatgtaaatatttattaccatcagacttggaaaatggaaagtattttattgtcatgattgaatttagattgttacctgtattttgttcaggtttgagacatataaaagaccccacctgtaatagaaaggaatatagacccttgcctcacctgtattgctgtggatgtgttttgtgggtttttcattcgattttacaaaatagggaaaggcacttccagttgtatttagtaggcagttgttgtgaatcatttttttctcttataggaggagattcctctctagccatgtttctgttaaagtttcattaattgaagcccaagtttactttttactgtacatacttattttctaattggatttgaaatcagcatgattttgtttgacaaagcaaagtttaagattgaggtcagaaatactttaatggagcaaagacacataccaactttacatgacggtgtgagaaatagtcctataaactggtctcttcatcatttatgctctcactttagatatccaaatattaaaaggcaggctgacctgtatcacacagaattaaggcagtaattttctgcttcagtagatcaagggtagggctaaggcatcctgtggtaattctgattcacagctagatttgggaaacacaaagttagggaatggctatatgtgatttgctagttggagcagtcaaagtcttagctatcaagagttgtgaatttgaatcatggcactaggtcaggggtgctatggattgaaatgaccttagttctcaaggagtgatttgtcctcatttgtcaaatgaggaatgagacacttaccatcatctcaggttgtttcttaaagacctaaatacaaatacaatttgttaaaaacttacagagggcctattttgaatgctttaagatgtaggccaagtaatgtatttttctcttagtgtagaaagttaagagaaaaagagctggtaccataaattttttcaatcttagtgtaaaatctgtatctcattgtaggcttctggtcaatacctatacataacaacttaatgtgatctaaccaactcaactgatagaaagctgaattgttcccagtggacaagtggtatttgatgtttagcaggtttttttgttgttatttttttggtaaactctgtggtaaaatctaaaataatgttaaaaccctaaaagtaactattgaatattctgtaatcttagacatgtatttttcaagctaaccctttgaagaaatgtgttcaaggtaggaaaatataaaattttttggttatttgtaaatttattttttgtgtgtttatatttaatgaaaagatgtaatttcatttgtgatagctgaaaaaaaggctttccataattaagaaaatacctttatcagtagctatgaactctgaaaaataatttttaaaaacttttaagaaaaaaactacttgagtaaaatatttcaagagttgtttaaaaatcttctttaaaacctttacatttctgcctcacttctttt

SEQ ID NO: 4516 - protein, 84 aa, Homo sapien
MIEFRLLPVFCSGLRHIKDPTCNRKEYRPLPHLYCCGCVLWVFHSILQNRERHFQLYLVGSCCESFFSLIGGDSSLAMFLLKFH

SEQ ID NO: 4517 - DNA, 1350 bp, Homo sapien
aaaaaaaaaaaaaaaggtgtgcccaggcccctagccattgccatgtgcccagccagagagccaaattagagggctggcttccctatcacacagaataaatgctagtgctagccaatgatccctttgcttttaatgtatagaaaatactgttgttccttttgtcatttccagtgacatctgttttctaagcagctcttttctagggaggaaaccaaaggggctaggttaagaccctaatagaaatgttttttctaatctctggtgagtctggaagtgtcacattcacagtccacccttgggagtggcttggtggagctggggacaaggttttgtttactacatagtgcacatgataaatggccttaaactgtgattctttctggtaggataagttataataaactgaccctaaagaatgcaatggcttttaaactgcagttactgtgttcttaatgaagcaatacccaaagctctgttcttttggagcacttgaggggagcttgaatgaaaggtgcagataagagcagtaccttgatcttatgctttctgagtgtcctgccttgttgccatctgcatggatgagtgaatgcttctatgcacgaggagactcaagccaactcagagtctgctttttccaacgctcttcccaggtttcttttgcaaagcttggtcatttggcccaggtcttcctggaaagtggagtacatgtcactgactagggtggcgtggtgtctttacccttaacattaagtcttgttacctcagtgatgtgaagccaatggttggaattataaaaagcatccttgctggttcttcacaggacactggaacccaccctgtcaattcagctagcatgtccacacagtcttgatgatccctctctgtaacaggcagctaacattaagagaagggggaaagagaagaagagagcaatagcttatgggagagctgagatcttacttcgttgacccatatttttcccctgaccaagttacctgtaaactggaatttgcaaggggatgctgtgatgataacccctttctattgctgtaatgttcatataacctgggaaactgagagaaggggatgtgtaaataaaagcttaaacattttagtaatgtgttaaaatgtcactctctcttaccctgtttcccttttttgccagatgatgatttttttatttttattttgtactttactggatgactgtgaagcgatgagtattgggttggggtaggtgtgttgattttgagagtgcatgttaagaactgaaggggaactacttgagatgacttaagaagcatcccatgcaaatatcttgttttgccctaataaaatattcagaaagat

SEQ ID NO: 4518 - protein, 14 aa, Homo sapien
MQISCFALIKYSER

SEQ ID NO: 4519 - DNA, 840 bp, Homo sapien
cgcgggccgcagggcatggaccttcaggccgccggggcccaggcgcagggggccgcggagccgtctcggggcccgccgctgcctagcgcgcggggggcgccccccagcccggaggctggctttgctacagctgaccactccggtcaggagagagagactgagaaggctatggatcgactagcccgtggaacacagagcattcctaatgacagtcctgcccggggtgagggcacccattctgaagaggaaggctttgccatggatgaggaggactctgatggagaactgaatacctgggagctgtcagaagggacaaactgtccacccaaggaacagcctggcgatctttttaatgaggactgggactcggagttgaaagcagatcaagggaatccatatgatgctgacgacatccaggagagcatttctcaagagcttaaaccttgggtgtgctgtgccccacaaggagacatgatctatgaccccagctggcaccatccgcctccactgataccctattattccaagatggtctttgaaacaggacagtttgacgatgctgaagattgagtgtggagctttctgccttgtaggtgggcgggcctccacgtcaagatctcttttcctgtcttggaggtgaaaagtcatatctgagaaaatgtttgcagtgacccctagtctggggtacacagaccagtgttccttattgacagtgttcaataaggccccgtcattctcgccagtctgttgttgttcttaatgggctcctccttgaaatgtgtgtgtgtttgtgtcaagaggagttgtgttctttgtaaataaaggttaaaaagagaaacc

SEQ ID NO: 4520 - protein, 184 aa, Homo sapien
MDLQAAGAQAQGAAEPSRGPPLPSARGAPPSPEAGFATADHSGQERETEKAMDRLARGTQSIPNDSPARGEGTHSEEEGFAMDEEDSDGELNTWELSEGTNCPPKEQPGDLFNEDWDSELKADQGNPYDADDIQESISQELKPWVCCAPQGDMIYDPSWHHPPPLIPYYSKMVFETGQFDDAED

SEQ ID NO: 4521 - DNA, 2816 bp, Homo sapien
aaaaaaaaaagttcccacagctcaccactacagaagcagggaagacaactatgcagaaaacagagttagtggcggtcagcaggaatgcagctggtcttttggacccctacgggatgggggcagtgcagaagacactggtgaagtcctttatactgaagacctgtggttgggagcaggggtagtccatgggtctgctgattttttttccctatttagtactaatgtgtgtgtgatctttgttttacaaacagtaccttttgggttttctgcatattttataatttttgtacagttttgaattctatagattgtcttggaaggatactgtgtgatgggtcaggcacacagtaattggagacttttaatgtatgtaatatttcatagattgcatgctattaatcatctgtgagggtagtattttttgttttattgtaagtttccctctttttttataaattaaaagatggttggtattaggaatttcaaatgaatgcagaaaatcttacatgctgtgtactattaatattataacagacgatccaagtccaaaatctgaccaataaagcaaccattttatcaagatagagggattctaatgggagaggggattcttccctcctgaagtttgtgtgtccagtccccttaaaaaaaatgaatagttgtcttttcttgtcatattaatactcgaaagtccatggtggtattaatgaaagtacactttattgttgcctttgaacttacggccaaggcaataaatcagaaacaaaaatagtgccaatgtgtcaaaatcgacatctgagagattcagcctcccatttggaataaatatgaatcttctaagctatcttgtttaatattttccatcatttagctacttcctatctccctcagaggcgcctgctgttcccattttagagttgacagtggcctgctaattttgctatgttcctaaaagttactgggtgtgagacattttcatcccctcctttttcctactgctggtgtttattatccagctagacaatattttatgcatatttaccgtgatgtctggaccgtacctgtgctccttggcagtttatgttgaagataactaaagatttttctctttgggaggcatcaaaatgatggtagtttgcttttatctttttatgttcattttcttttagtaggtgacctttctgcattaagaactgtttttatcttttactaccttttcttttctcctttgtggagacagcatgacatgtcctgaaggtcacctttgcctttgaaaaaggtttgatggaggaattcacaggtgactgacaagtctttgaaaagaatgggatctgctcacttctggtctttttggccgggaactcctgattggtgttaaggtggtaatttcccccatataagatttagaatcactgagtttgagctagatgaaatttttaaaatttctggttgtctcattagactgatgaggtgagttttcttcttcatatgaacagctagttaataacagcagagttctcactcagtgctcagtacttaattttccactgcaccacaactgtcttaactaaatgtgctgtatttttctttaaaagttaagagttctatttggtgttttcaggaatatacgtgaaaagacatgccatgttttggtaaataccatcagagttgtgtaaaggcgtgtactaagtgcaatcttaatttgtggaaataatcttcatttacccctcctaaaactacactcagtataaacactttcccataaggtgtgtgcagtaaaaatgttatattactccaacactggcaggagcacagcacagcagccttattggagagagccttataaaagtgattaaatggaggcattgagctcattacctttaagtttactttgtgctgacctttgttcctgttttgagaatctcatataattattaaaaaaaaaaaacaattaaaacgaaacggcggggcctagctgtgtataaatgatccttgctgaatatcttaaggttttttgtaagaaaaaagaaaaaccaacaaaaaaagcttattttcacattaaaatgaaacctcttttgcaacttaagaattctatggaaaagcagtttttatcatattttgtgtccatgcaccatttttcttaaaatggcttacaaaaaagaatgtaaacaatttgtgatctggccagttgtacttttagctcccagagggagagttggtggtattatgagttgagtaaaaaccatccaggggaacttgagggagcagtctgttgccagtaatgttccttgtgtgccattaaaccacctccagatgagtggaggaacatcactttttaattttttaattgtatttggaattgttgccgtgtactaagaacttgacctaaataaaatcccacaaagtatattcaggtgtcttgttaacttatttatataaataacctctttttctaaggtggtatcttgagtttacgtgttagggataatctgacttttctgttgctctaaaccagggagctgccttttattactgaagaagtcgtctttttaaattttcaaagatttaaaatgttgagctttaaatttgatctcaagtttcttccctgaagacagctgttctaattaagaactttctaatcctgtttttgctccactcgcacctggggttttcttaccacttttctccaaatctaattctgttaatgtacagtttttttaattcaacagacaaacactgaagatgggtgttgactaaaaaatattgcagactggtcagaagtgaatctaaaagacaaactcgctaccttaggaccg

SEQ ID NO: 4522 - protein, 98 aa, Homo sapien
KKKVPTAHHYRSREDNYAENRVSGGQQECSWSFGPLRDGGSAEDTGEVLYTEDLWLGAGVVHGSADFFSLFSTNVCVIFVLQTVPFGFSAYFIIFVQF

SEQ ID NO: 4523 - DNA, 1400 bp, Homo sapien
gggggtgggtccggcgggtccccgggcggggcggggccggggcgaggggtgccgggtggtttccgcccggcagcccgcagcccgctgcgccccgggccgcgtctcccggcggtgggagggggcggcccccactcggttcctggcccctcgcggccccgtcagcctcccgctcggggtgcgccgcccttcgtctgggtctccgcccccaggacccgcggccgagagctccggagcgcggcttccccggccggctgcgcgatgggctgcgggaactccaccgccaccagcgcgggcgcgggccaaggccctgcaggagcagccaaagatgtaacagaagaatccgtaacagaagatgacaagaggagaaactatggaggagtatatgttggcctaccatctgaagctgtcaatatggtgtccagtcaaacaaagacggttcggaaaaattagaagaaaataacatcatgactcaagaatcaagagcttgctcatcagtttggaaggaatttggctccgtgggacgttgtaatgtgcacagacatttccaaggaaattctaaacagtcacccttcccttttgcattcccccaaatcttaagtgtatacataaaaccctgggtacatattgttgtggtaatagaagggaattggttaaacagtacacttgtttatggaactttctgtggccacctacgaaagacaagttaacaaactgtcatggaggctgttgttgcccagccagggccgctgcattttgacaacatttccaccctggccactcagcacatttcatggaggtcatgtcttttcactgatacttttttgatagtttttatataacaaaatccttattctatttataacttaagatgataaggcactataaattaatgacctaaaataatatatttgtctgttatcttttgctatttctacttcactttaatttttagctgtaaaattggtaaatggattcttacaactatctctttccatttcttactatttggttttcaaatttcatttaaatgtcagaatttccttttttaggaacaatgtgtatttcattgcactatttaaaaataaactcaaatttgcatgccatatgcacattttgattacatttttattttctttcgtgaaaggcatgtgcaactacaaatacttcatagctgtttgggttgctcattctacatcacgacaatctcatcatattatttctataacttttcaaggacttgcgatggatggttagtgggatatctggaaattaatttgataatgacttgtgtatctacttagtattgcaatgtaagttactcaattcaccaatgtatttcaacaattaaaacatttttatccctcttcaagaaaaaaaaaaaaaaaaaaaaaaaaaaaaaa

SEQ ID NO: 4524 - protein, 149 aa, Homo sapien [sequence omitted]

SEQ ID NO: 4525 - DNA, 2419 bp, Homo sapien
cacgataaaggggacatgccgggagttgcagtaccctcaggaagaagtcattgtcatggacatggacccttttcttcactgtgtgatcccaaacttcatccaaagccaagacttcttagaagggcttcagaaggaactgatgaacttggacttccatgagaatctgatgatttgaagaagagaagagagcctcacatctccactttaaggaaaattctgtttgaagatttccggtcctggctttctgatatttctaaaattgacctggaatcaaccattgacatgtcctgtgctaaatatgaattcactgatgccctgctgtgccatgatgatgagctggaagggcgccggattgccttcatcctgtacctggttccttcctgggacaggagcatgggtggtaccctggacctgtacagcatagatgaacactttcagccgaagcagattgtcaagtctcttatcccttcgtggaacaaactggttttctttgaagtatctcctgtgtcctttcaccaggtgtctgaagtgctgtctgaagaaaagtcacgtttgtctataagtggctggtttcatggtccatcattgactcggcctcccaactactttgaaccccccatacctcggagccctcacatcccacaagatcatgagattttgtatgattggatcaaccctacttatctggacatggattaccaagttcaaattcaagaagagtttgaagaaagttctgaaattctcctgaaggagtttcttaagcctgagaaattcacgaaagtctgtgaggccttggagcatggacatgtggaatggagcagccgaggtccccctaacaaaaggttttatgagaaagctgaggagagtaagcttcctgagatattgaaggagtgcatgaagttatttcgctctgaggcactattcttgctgctctccaacttcacaggcctgaagcttcatttcttggccccttcggaagaagatgagatgaatgataaaaaagaggcagaaaccactgatatcactgaagaagggactagccatagtcctcctgagccagagaataatcagatggccatcagcaacaacagccaacagagcaatgagcagacagacccagagccagaggaaaatgaaacaaagaaagaatcaagtgttcccatgtgccaaggggaactgaggcattggaagaccggtcactacactttaattcatgaccatagcaaggctgaatttgccctagacttaattctgtactgtggctgtgaaggctgggagccagaatatggcggttttacttcttacattgccaaaggtgaagatgaagagctgctaacagtgaatccagaaagcaattctttggcattggtctacagagacagagagactctgaaatttgtcaagcatattaaccaccgaagcctggaacaaaagaaaaccttcccaaacagaacaggtttctgggacttttcattcatctattatgaatgacagcactgggcaaagctgaacaaaaatgtgacccttcgtaattactgggaagtctgaaagagctaagcatggagtcaaggagaactacatggtagcttgcctgacagtgttcttaaaactggttgtcttttactaggactcataatgattgtcctcaaccgagaccttgagcttgcagctacgtacttatctcttgattaaaaaaaaaaaaaagttggctttttttttttttaacatttagtcctttttccatattggcttcttcagtgaatttttaagttcaatttgtttttattgaggtaaaatatttataacataaaactgaccagcttacccatttttaaatatgcaattcagtggattaagtacattctcattgttgtccagccatcaccatcatccatctccagaagttttccatcttcccaaattctgtgcccattgaacaataactccccacctccccttcccctagcaacagccatactttttgtctctatcatcaacttcactactcatatttctcatgtaagtggaatcatacagtatttgtccttttgtgactggtttcacttagcataaagtctttaagatgcatccatgtttccagtgtttcggtttttttagaaaaactcatacgtgattgcagccgggcatggtggctcacgcctgtaatcccagcacttgggaggccaaggcaggcggatcacctgaggtcaggagttaaacaccagcctgacaaacatggagaaaccccatctctactaaaaatacaaaattagctgggcgtggtggcacatgcctgtaatcccagctactcaggaggctggggcaggagaattggttgaacccaggaggcggaggttgcagtgagccgagattgtgccactgcactccagcctgggcaacaagagtgaaactctgtctc

SEQ ID NO: 4526 - protein, 402 aa, Homo sapien
MSCAKYEFTDALLCHDDELEGRRIAFILYLVPSWDRSMGGTLDLYSIDEHFQPKQIVKSLIPSWNKLVFFEVSPVSFHQVSEVLSEEKSRLSISGWFHGPSLTRPPNYFEPPIPRSPHIPQDHEILYDWINPTYLDMDYQVQIQEEFEESSEILLKEFLKPEKFTKVCEALEHGHVEWSSRGPPNKRFYEKAEESKLPEILKECMKLFRSEALFLLLSNFTGLKLHFLAPSEEDEMNDKKEAETTDITEEGTSHSPPEPENNQMAISNNSQQSNEQTDPEPEENETKKESSVPMCQGELRHWKTGHYTLIHDHSKAEFALDLILYCGCEGWEPEYGGFTSYIAKGEDEELLTVNPESNSLALVYRDRETLKFVKHINHRSLEQKKTFPNRTGFWDFSFIYYE

SEQ ID NO: 4527 - DNA, 4154 bp, Homo sapien
gtatatgtttcgtgagtaatttttaaaaaataaaacaggttaataagaagatccattcctttgcatgtgattgttataacattctttcccagggagttcaatttcagcaacctcagaaatccatacttgatattaggaaactgtaaatgtaacacctgaaattattatgttcactattctacatgaaccttatggaaattcatgatttatgtctttgtttttctttttccaagtatatgcaggactccccaaccttgattttataatggtgactgcattttgtaggtggaatcatttctaccgaaatcattttgaaacacaagaatattgatcagtactgtttcactctgatttagtaaatcagaaagcctccccctacccccagcccccactttcacataccttctgggaggtgcctcagtatagacttggtatctgtgaaggactgagttcatgaatatgcacagaagcacttaaaccatgcctcttatttctataatatctgaaaatggcttcataaaagttaagtcaggagaacactgtttacatgacacttcttaactcatttttaatgtttatttttaatttcaaaaacttgttgcctatttggttttcagtactgcataacactgactttcttaaattagtcatagttgcaataatttacttaaatttggtaatgtcacatttgggttggggtttcagtgggaatagtaacttgccgctagtgagaaatggcattgaatactaaagactcaatatgaacaggctttatagacccttagagaaactgttgccttaatgtttggtgcaatttctagtagtgcataagtgaatttagtcttatgataagtaactttgagctgtttttagcttagtaagaattgtggaaaccacatgtttattgtgcccatcattttacacaaagaaaagaggattatattatttcttctaaggaagtaggagttttcttcctaaaagtgcttacatattgtagtactattacttaaaagttatttatgaagttgggagccttctagtttgcctgtgttgatgtattttgaaaacaaaattgcaataaaggatgagcttccatcggtgtgtatggtataccagatacagatggttgcaaggaaaccttttcccccactagaatagtctattagtaactgctaagtcctagcttgcatttttgaaaatgcctttctgcatgttagcacccagactttcctttgtcatattcctttatagctacaacttaactgtagcttatcagagaagctctgtagtcctacactgaagtgtgttcccttggctgttcatatggggctgggtttggttgaacttccattctgtataaatgctagaacacagttactacagattgattcacaaactgcatgtgctggtgcttgaggcagccaaaatggaatgctgtggaaagcatatctatatcttaaaaaacactcagacaggagttaaggacagctttaataatttttttgtttaccacttaatctttatcaactttgattttagttagggcttagctcatggttgaagaaaagtggaaaataacaagtgcccatttaggtttgaagaatccagaatgttttacctttgactttatgagttatagaagcttggctttgctctaggtttcatgttcccaaatgagccatctgtcagtatattcacttaattcttactaatttcagtttcctgtaaaggaaacaacttacatattgatgcttaaatccagaaagtgtaaaaggttttcttaaactgttaaaatatagtgtctgatataaaggatgtaagttactcagctttctgctccctaagccaaacagtgtttgtcttcagtgtgaaatttaactgtaaaaactacttgtaatgtcaagagattatagatcatattattaataaaatggacctgggtctaatatttttttttcttcaaagggagtgtgaagctgtttattcttttatttgcatatgagtttttcttttagttttagtttttcatgttcatatttccactgatttgaaaacacaaaatttatttttataattttgttgcttgtagcataatcaagtgcaaaatcaagtgcaacctacttgtgactaaatctctttggatttatagctgaggatattgttagctaggttttgtcaatccctaatcattttttaaaatcaatgctgtattcccaggaggctttgagactcctatgaacctgaagcactcccttttgaaccttggaagatcctcaaagagtgagcactcttgtgctcttctaatcataattaattccttaacaaatcagagtaaggaccactgacatatagaacactcaagccaaagaaccatcacagaatttagtaactttagttctgtgaacatgaaaagatttcttttttggtttccaaaggagattatttatttttccacaaggaaaaacatcttgcagagactctgaattccaaatctgagtgagaaagaaaaggaaaaaaatctgtttcatggtggatttctaagcaacatatatacatgtttttaagacaaccttttgttggcagtgtttttcctgaacaccatatgcaccctaggaaacgtttttcctttaatcttgttcacatatcagaaaaggacatgaaatgctcatactggcatacaagtttctataagtagttattttttgagctacttatactatatccccaaaagctcacagtgccttgttgggattttttttttccatgaactagccattattttaaatgagtgggagagggtaagtctttagacagaggtcattcagcagttcaagactattcctcttcaagaacatgtcaggaattaagcagttatatgtggaaacactggtaattctttccacagtgttgttttggataatctgttctagtatatttaactaattgtatggtggacctgtactctgatacacatcgaatcagtcaatgggatttgtatgtgcttttccttcctacattttcattcctactgccccaacctagtagccctaagttgtggcttggtgggtttggcactgagcctcaagacactcactacattctttctggatgtttgctcacaggctccctgaggagcagaacctgtggagctggggagtgcgggtggtttctattcctaatattgtgtgtcagtcctttttcgtgtgatggtgccttcagaataacgaatatttctgttctggacaatgattaaatcttatgagaaatatatgtaggttatattaattcttgtccatttttgctaagcctgtgaaatactttggctctgatacaacttaacttgaataatatcttatcctgagtcttcctccaaggcagtacatattcctgccaggactgtagtaatcctttgggaactacatgtgagtaagcacttgtatgtaagccattatactgctgtaactaatgcatacaaacaattcttctctttacatttatagtctaaaaggggatatgcagtgggaaggaaaattcctgagagattccagcatagctttgtcaattccgactgagccatactgttttccacaagggctcaacacatagtcagtattccgtgctttcagtgtgtgttcagattctcctcttactggttttcttagactgtattgttctataagcaaatgcccatgtgtgatttttaagatgtgctggggaaaaataaatcaataccacaacggaaaaatcacacatgggcatttgcttatagaacaatacagtctaagaaaaccagtaagaggagaatctgaacacacactgaaagcacggaatactgactatgtgttgagcccttgtggaaaacagtatgggctactaggttggggcagtaggaatgaaaatgtaggaaggaaaagcacatacaaatcccattgactgattcgatgtgtatcagagtacaggtccaccatacaattagttaaatatactagaacagattatccaaaacaacactgtggaaagaattaccagtgtttccacatataactgcttaattcctgacatgttcttgaagaggaatagtcttgaactgctgaatgacctctgtctaaagacttaccctctcccactcatttaaaataatggctagttcatgg

SEQ ID NO: 4528 - protein, 4 aa, Homo sapien
MASS

SEQ ID NO: 4529 - DNA, 5034 bp, Homo sapien
agcggccgccaacgccgcccggactggagccctgacattgctgcgctcggggggctccaggcagcccgtatcggggcctttatttctcgtcggcggcgccctgcaccgcgcctcgcaaagccaaacaccagagcaccctagaaggtttaactaaaagaatgctcatgtttgacccagttcctgtcaagcaagaggccatggaccctgtctcagtgtcatacccatctaattacatggaatccatgaagcctaacaagtatggggtcatctactccacaccattgcctgagaagttctttcagaccccagaaggtctgtcgcacggaatacagatggagccagtggacctcacggtgaacaagcggagttcacccccttcggctgggaattcgccctcctctctgaagttcccgtcctcacaccggagagcctcgcctgggttgagcatgccttcttccagcccaccgataaaaaaatactcacccccttctccaggcgtgcagcccttcggcgtgccgctgtccatgccaccagtgatggcagctgccctctcgcggcatggaatacggagcccggggatcctgcccgtcatccagccggtggtggtgcagcccgtcccctttatgtacacaagtcacctccagcagcctctcatggtctccttatcggaggagatggaaaattccagtagtagcatgcaagtacctgtaattgaatcatatgagaagcctatatcacagaaaaaaattaaaatagaacctgggatcgaaccacagaggacagattattatcctgaagaaatgtcaccccccttaatgaactcagtgtcccccccgcaagcattgttgcaagagaatcacccttcggtcatcgtgcagcctgggaagagacctttacctgtggaatccccggatactcaaaggaagcggaggatacacagatgtgattatgatggatgcaacaaagtgtacactaaaagctcccacttgaaagcacacagaagaacacacacaggagaaaaaccctacaaatgtacatgggaagggtgcacatggaagtttgctcggtctgatgaactaacaagacatttccgaaaacatactggaatcaaacctttccagtgcccggactgtgaccgcagcttctcccgttctgaccatcttgccctccataggaaacgccacatgctagtctgattgcctctgtgtcctgcctcagcgtgactccccactcacctggctctctctctgtcctgcctcccattatctaacacattttttacatgtacattttaatttgattcagctggtctgaatctctgaatttatatcatccaaaacttccatatggtcagtagtagatgttctctaatcctccctctccttaccacgggtcagacctaaagaatgtgaacacttttttttttttttctggggatgctaagcaaacccttcttacagatacgtttaatgtaataagaacaagggaacatgtaaactaacataaccaattgtcagttctccatgtattcctcaaaagaatgtcagagtaaatgtattagaaatacagtatccagactgctagtccttgccagagacattcttacctctgccctgtgataatattttatgcttgacagtgaaaacaagtgtggccccttgcaccggttagctagaagtacagccagatttcaagctagtgcagtcacctcttccgtcattcttcacaaatcttgtcaacctggatcttagacttcatctgaatcgagttctttgccctcctttgtgcctgcagctcatatggaggtctttgccaccaatgggagatgagcccaaactttcgatctaggtgggtgatgtgtagcagttcaagggaagggtgctgtgttttcatagcatggagtcggaggagagggccatttagcagggggagcagaagaggcaattcctcctgggctaggggttgtcaatgaggtttcaacattttgttagctgtgtgcagcattcccagagcttcagtctctgtgcatactcagctttgtagaaccatgctgcaaagccatataccgatggggttatccatgcaactatctccattcctacaatgtccttaatatgagatcatcaaacattgatagtagggactccatggaatatttgcccagtaatggtaagaaatctttcgggtaagagtatggatggttcttcttttacccaatctgcttatagctttttttgtaaacagggaaatgttgagtggtacttgtattcccttatcaaattaatcacatagcttttatacagaaactcttcctgtgtgagctgttaaggtgccaaattggctgtcatttgtattcatgacacataccataaagcatctgctaatgctttaatggattgattcaattaagacctgagtgacactatttgtaaatataactagttgtgaagcacacatacctttattttgggaatttatgagaaaatatagaaaaccacagatcagggattcatatatgtagctcaaaaattcccaaaagtttactgttagagttggcaatttcctatcactatttcagtgtcagaacaaactgaaaataatggctcgtgtttatgttgaagataaatagcaccattattgggggaagttattcaaaagcaggcttttgagcaccatagtctaaatgccaataaaaataattcatacatagaaatgtcattggtcctgaatttgaagaaagtgagcaacagtagttaaatgtgggtgcatataaccaaattccccttcatcaagaatggaggagaagagagaagaatgaaatcctgaagattcatcccagccgcaactcaggatccaacacaactttaactgggaggaatacattgtttgatcatttttaaaacatctgtgaatgagtgattccggaggcctgtgaattgtgtggggagcttgctttgatggcactgtgttaataaaagttgtagggactgtgcacctaagaggctaagaggtcccactcatccgccctgtgaaccagctgtaaagaaatgtagttaagaaatgcaaagaaatgtgttatcttggcacttgggtttgattttcctttttttaaagcactgcaaaacttctttaggatactaaaacatcctaattgggctgtttttttgttttgttttgtttttcagctaaaggcaaagataatttttttttcagctgaagtttttcttttttgcaactatgacatgaattgagtgataaaatggctctttgaaaagtagatattgtctgtattgtaaatgcttagtcatattcatggcaaagtgttcatttcttgagatggttctttcacaacacacaagaatcaagatggaacgcaaggaaaatctttttgttttgaccgaggtaaccagtttatgtgtgttccaatccatagagaagtgggggaaagggcgagaaaggatcagattgatctgggatcagctttgagcctgagttcagtgaatagcctcatgggcatctcatggaattgatgcatttgctgtggcatatttaaattttgttcaaaagatttgaagcaagaccttgcaaagactcttaacattactgttcagcttgcttagattgtgttaacagttcatttaacaaagatccgttttaactctgaacaaaagcaacccagagcggccattctctattcccatgctggtcaatacgctttcattaccaattggcccttaccaaacttttcttatatatatatttgtattttactatgatagttgagaaatttagcctcttagtcatttttagctgttattgtggaagacctcaaatacaagattagatgcccttgaacatgttttaatgatgtgtgtcatgttactatcaatggtgatttcaatcgcaatattttaaattgatgagaatgatttgtaaacatgaagttactattacgtaaattctgtttgttatagagtttcttcagttgttacccaagtgtcatcctagagaagtcagaagaatcagaatccatcgtattttagagttatgtgaatctacatcataaatgggcattaacattctaaattgcttggtttggagaatgtgttagcagcatagctatattcaactagggagatgctaaatacacagaagtttcaagagccttggaacagaattacaggggaactatatatgtatatgtatattttattaaacacccatctgcactatcagtattgcactaatgtggaatttgaaagactattttgctgatactgtatatatgcgcatcattcctgattagattgttgtaaagacaatctgaaagatctaaggttttaaaataatttggtttgaaaatatacagttgtcttgaaggaattgctgtcatacatgaagttgctccgagctgtctttattctcttcttggtcaaggttaacaattgctaaatgatcgcaaattcacctaaacaatacatttacaaagccatctttacatgcattaaacgagggctacaacaatattgttttacaaatactagcacttttttttctgttatgtacttagtgttagagggtcaaaataatctttctgcttagcatctcttaaaccatacctgcaaatatagcaggattattacatttacagtactttaatacttgtataaactatgcagaaatttttaataaagtgtaatatattttataagctaataagactgaatgggtaaaggtttttagcatgcgttagtatacttgcagatactgaaacattttggtaatctttcttactaaagatgtgaatgtttaatgtaccttctctgtttctactctgtagtccaatgggaattcagtaatgacattttgtcatgtcaaactgtgaacataaatttgtactgtacagtcctcatatactatatacagtatgcaatatatattatatacttgttaataaaaccatcagaatattaaaaaaaatctatgtcgggtgcggagaaagaggtaatgaaatggcaggaattcgatatcagc

SEQ ID NO: 4530 - protein, 345 aa, Homo sapien; identical to SEQ ID NO: 3718

SEQ ID NO: 4531 - DNA, 361 bp, Homo sapien
tttcgcaggccgatccccactccaaccgttccctcagcaaccccaggggtgtcagacggggcaccctcccactgtcttctccagccagccttaaaaaccccagagacgccagcctgggaacgatctcagtatggaatctgaagtcgccttgtcagcacagacacctctggggtccccagaagacctgtggcaaagttctctaaaccgaacctggagaggggaaggttttcaagcaggaaccacataaattcacctaaaactcacgcctacacccctctgtgataaaagatttctgtttcttctgttggagactgaattttctcttcaagactacagtactgtatctgtcaatctgtggaaa

SEQ ID NO: 4532 - DNA, 2494 bp, Homo sapien
  Unsure 1726: Unknown base
aaaaaagaagaaaaaaatagaaaatccaaaaagaaaaaccagaaggcctgctggcgtataaatccctgggcgggtttctgataaattgccctgtgctgtcagcccctgcactgcactgctgccttccatggtgggtgggagaccccagagcggggcaggcgccactgagggcttttcttggagtcggccagcaggccacgcagcatccggcaccctgggcgggctggctagctgccttcttaggacatctctactttgaaggattttaccgcaggaagcaatagcagcgctggccattggtgctgatgacagcattgggtctggttgaggggaaggggctggaaagcagcagacccccccagtgctgcgcatggtcccggagctgtcagccaggggagtggggtcagccgtcagccagccctcccatttcccgcccatgggccctgaccacactcccttttctagaagtcaatcctaaggtttctctgctctggctaagaggatgtaaatttggattcttagagggcatggcacccccagtccctgcccagataaagtagcacagtggcatgcagcacctctgtctgttgctgacgttggggggcttacacacccacctcatctccgtgcacagccatgactggccctgccggcagctggggtgcaggtaagggtctctctcatagaggggagctgcagctgagaactggcgaggccccttcctccaaggccctagctggcccccgggtgaacctgaggtggcaggttcaggttttcaagatggtgaggtctcgctgtctgctggacagtacgttaggctctcagaactcatgggtgtggagctgggcctgtcccgggccagtggacccctgtgtgtgggggatttggggtgctgtgggcctggttatgcactggcagatggaccttgctttggtccagctcttttccttaccctggctctgacgtgggaaggcttggagggcccgtctcatcacccccgttcgccctcagctgtccctttcccttgtcgcctggccgctgcctcgcccgcctgaggcctcctagcaggcagcctgggtgtgagttgagcctctctcttttccctctggtgggaaagtggcctttccctcaacacctgctccccggccccagaggaacccacctgttttggagctcagcttggcccagcgtttccttggggaagggaaaggagggctggacagcactgatccgggcaggcagcgtgtgcagcagtggccagccagagtgccaaagatgcacggggatgtggtgtgtggctccgggccctcgacatctctgctttgggggatttttaccttgtctgcacacttgtcaggggagaggggacagcaaggtgggaggttgaagagctttgaggctcagcagcatgtttgtggcattcggtggacaccatggccttgggcggctggacaggtttttgtgatgtgagggacacgcatggggcacatggtaagcttggcaagggctccaggaacgctgacgaagggttttaggacccccacccccatgcctgtaccagggctggcctccagagcgggtgaggacagagcagctgtgggcttttcattctgaggtcttggcccccctggccaccgcaagggactctttgcttgtcagggcttgcaaaaaccaaccttcgagaaagaaaagggaactcttcacgttgaatgttgactttgtgtgntgcgtgtgtgttgggtttgtgtgcccgcgcgcgtgtgcgtgtttacttcatggaattttgttttgtgaaattcccctccaatcgtgtcagaatttacctccatgccccagtcacactgttggttctgcgctctgaacctgggtgtagctcatttgaaggactctcttctgcgtttcctaacagttatttggtggtctcaagagttgaggttgtggagggttgggagaaactgaagttctatacatttccatagagtttacatcctgcagttaaaaggcagggagggctcagcccgggccccacagctccaggccatcccctacgggctgcccacagtgcccccttttctctagccgaatctttttcgaacagcccgggaaaggaaaacggattcacttgctgattttgttcacggcggaagcaccatgttccgttcctttttcaggttcagtttgttgtgtaaatggcggttttttctggtgtgagctttggtgatggtggcagggctcctttgaagagatggttccacctcgtggtctgaagaacaaaccagagaagagtctggtttggccagaggccccctccggcccacgtcaccctgagtacacccctctgattgctctgctgtcaagaagcacgtttccaccagctgtattcaacactacaatgcattttttaaactatatttgcatccaagacaataaagacaccttatttttttagaaaaaaaatctatgtcggtgcggagaaagaggtaatgaaatggca

SEQ ID NO: 4533 - protein, 108 aa, Homo sapien [sequence omitted]

SEQ ID NO: 4534 - DNA, 3463 bp, Homo sapien
ctcttacaacattggctgccggcgtgactttgaccgcttcccggtgcgttaccggcagctgaacccacccggcgccacgggactttgacgcgtgctctgcgcttgccatgagactcctgggagctgcagccgtcgcggctctggggcgcggaagggcccccgcctccctaggctggcagaggaagcaggttaattggaaggcctgccgatggtcttcatcaggggtgattcctaatgaaaaaatacgaaatattggaatctcagctcacattgattctgggaaaactacattaacagaacgagtcctttactacactggcagaattgcaaagatgcatgaggtgaaaggtaaagatggagttggtgctgtcatggattccatggaactagagagacaaagaggaatcactattcagtcagcagccacttacaccatgtggaaagatgtcaatattaacattatagatactcctgggcatgtggacttcacaatagaagtggaaagggccctgagagtgttggatggtgcagtccttgttctctgtgctgttggaggggtacagtgccagaccatgactgtcaatcgtcagatgaagcgctacaacgttccgtttctaacttttattaacaaattggaccgaatgggctccaacccagccagggccctgcagcaaatgaggtctaaactaaatcataatgcagcgtttatgcagatacccatgggtttggagggtaattttaaaggtattgtagatcttattgaggaacgagccatctattttgatggagactttggtcagattgttcgatatggtgagattccagctgaattaagggcggcggccactgaccaccggcaggagctaattgaatgtgttgccaattcagatgaacagcttggtgagatgtttctggaagaaaaaatcccctcgatttctgatttaaagctagcaattcgaagagctactctgaaaagatcatttactcctgtatttttgggaagcgccttgaagaacaaaggagttcagcctcttttagatgctgttttagaatacctcccaaatccatctgaagtccagaactatgctattctcaataaagaggatgactcaaaagagaaaaccaaaatcctaatgaactccagtagagacaattcccacccatttgtaggcctggcttttaaactggaggtaggtcgatttggacaattaacttatgttcgcagttatcagggagagctaaagaagggtgacaccatctataacacaaggacaagaaagaaagtacggttgcaacggctggctcgcatgcatgccgacatgatggaggatgttgaggaagtatatgccggagacatctgtgcattgtttggcattgactgtgctagtggagacacattcacagacaaagccaacagcggcctttctatggagtcaattcatgttcctgatcctgtcatttcaatagcaatgaagccttctaacaagaacgatctggaaaaattttcaaaaggtattggcaggtttacaagagaagatcccacatttaaagtatactttgacactgagaacaaagagacagttatatctggaatgggagaattacacctggaaatctatgctcagaggctggaaagagagtatggctgtccttgtatcacaggaaagccaaaagttgcctttcgagagaccattactgcccctgtcccgtttgactttacacataaaaaacaatcaggtggtgcaggccagtatggaaaagtaataggtgtcctggagcctctggacccagaggactacactaaattggaattttcagatgaaacattcggatcaaatattccaaagcagtttgtgcctgctgtagaaaaggggtttttagatgcctgcgagaagggccctctttctggtcacaagctctctgggctccggtttgtcctgcaagatggagcacaccacatggttgattctaatgaaatctctttcatccgagcaggagaaggtgctcttaaacaagccttggcaaatgcaacattatgtattcttgaacctattatggctgtggaagttgtagctccaaatgaatttcagggacaagtaattgcaggaattaaccgacgccatggggtaatcactgggcaagatggagttgaggactattttacactgtatgcagatgtccctctaaatgatatgtttggttattccactgaacttaggtcatgcacagagggaaagggagaatacacaatggagtatagcaggtatcagccatgtttaccatccacacaagaagacgtcattaataagtatttggaagctacaggtcaacttcctgttaaaaaaggaaaagccaagaactaactttgcttactgtgagttgactgactctaattgaatctgcgtggttttgatactttgatggattccagtggaataaattcaggctgctgaaacaagaaattctgagcccaggaagcgggctcttctttcttcaaaagaagcccttcttgttcatattcaggagcttctgttatattcaaaggtaattctatgtctatctcaactctattgattggttttatagtttattgaaaatcctcaaataaaatataattattactgaaatatgtttaatatttaaggggaaaagagactaatttcagttatacttttaagcttagaatgtatgttcatttccaaattttgtatcataagagttttcaacatagagaaaagctgaaaaaatgcaaagaataaccacatactttccatctaccttcctttgttaacgggttgtttatcatataataatttgttttgtcatatttgctttcactgtctattatctgtttaagtctcataactctatttttagtttgctgaagacttgaaagtgaatcgcatatatcatgacacttcttggagtgtcattaatgggcaggcttttctgttgaagagtggattccgtatgttcttcatagagagtgtttttcagattcttcattgggatattaaaatattagccaaatttctctctgttttatatatgtctgtttatttcagtttgtggtttctgcaaatttgtaactgcctctgttttaggagtataagtattacttccttgtggtctattgtgaagtaaaaagtagacccttgcatatactattcttgtttgtgttcatcttaatgtttttgtacagctaaatcaaatgtaatttatagagttagtttcatcaacctaatgaatgctagttaaatttgaattccttggaatttatcgtatattgtattcactgagattatgaagggacaaatgttaatcttttgtttccagaaaaagttgggctttcccaagcagttctattacccggttcagaattgcttcatccaaaaatcatctgatggtatagatggatcctagtccttttcattacctgatggtagaaataaaataattgatt

SEQ ID NO: 4535 - protein, 751 aa, Homo sapien
MRLLGAAAVAALGRGRAPASLGWQRKQVNWKACRWSSSGVIPNEKIRNIGISAHIDSGKTTLTERVLYYTGRIAKMHEVKGKDGVGAVMDSMELERQRGITIQSAATYTMWKDVNINIIDTPGHVDFTIEVERALRVLDGAVLVLCAVGGVQCQTMTVNRQMKRYNVPFLTFINKLDRMGSNPARALQQMRSKLNHNAAFMQIPMGLEGNFKGIVDLIEERAIYFDGDFGQIVRYGEIPAELRAAATDHRQELIECVANSDEQLGEMFLEEKIPSISDLKLAIRRATLKRSFTPVFLGSALKNKGVQPLLDAVLEYLPNPSEVQNYAILNKEDDSKEKTKILMNSSRDNSHPFVGLAFKLEVGRFGQLTYVRSYQGELKKGDTIYNTRTRKKVRLQRLARMHADMMEDVEEVYAGDICALFGIDCASGDTFTDKANSGLSMESIHVPDPVISIAMKPSNKNDLEKFSKGIGRFTREDPTFKVYFDTENKETVISGMGELHLEIYAQRLEREYGCPCITGKPKVAFRETITAPVPFDFTHKKQSGGAGQYGKVIGVLEPLDPEDYTKLEFSDETFGSNIPKQFVPAVEKGFLDACEKGPLSGHKLSGLRFVLQDGAHHMVDSNEISFIRAGEGALKQALANATLCILEPIMAVEVVAPNEFQGQVIAGINRRHGVITGQDGVEDYFTLYADVPLNDMFGYSTELRSCTEGKGEYTMEYSRYQPCLPSTQEDVINKYLEATGQLPVKKGKAKN

SEQ ID NO: 4536 - DNA, 3463 bp, Homo sapien; identical to SEQ ID NO: 4534

SEQ ID NO: 4537 - protein, 751 aa, Homo sapien; identical to SEQ ID NO: 4535

SEQ ID NO: 4538 - DNA, 3305 bp, Homo sapien
tcgcagatatggccagtacactatgaaccaggaaagcaccaccatcaaagttatggagaagcctccatttgatcgatcaatttcccaggattctttggatgaactatctatggaagactattggatagaactagaaaacatcaagaaatctagtgaaaacagccaagaagatcaagaggtggttgttgtcaaagagcctgatgagggagaattggaagaagagtggcttaaagaggccggtttatccaatctcttcggagagtctgctggagatccacaggaaagcattgtgtttttatcaacattgacgcggacccaggcagcagcagttcagaagcgagtagagacggtctcccagaccttgaggaaaaaaaacaaacagtaccagattcctgacgtcagagacatatttgctcaacagagagaatcaaaagaaacagctccaggtggcactgaatcgcagtcacttagaacaaatgaaaacaaataccaaggaagagatgacgaggcatctaaccttgttggtgaagagaagctgatcccacctgaggagacgcctgcccctgaaacagacatcaacctggaggtatcatttgccgagcaagcactcaatcagaaagagagctccaaggagaaaatccagaagagcaaaggcgatgatgccacattacctagtttcagattgccaaaagacaaaacgggtaccacaaggattggtgacctcgcaccccaggacatgaagaaagtttgccatttagccctaattgagctgactgccctctatgatgtattgggtattgagctgaaacaacaaaaagctgtgaaaatcaaaacaaaagattctggtcttttttgcgttccattgacagcgctattagaacaagatcagaggaaagtaccaggaatgcgaatacccttgatctttcaaaaactgatttctcgaattgaagagagaggtttggaaacagaaggcctcttacggatccctggagctgccattagaatcaagaatctttgccaagaactagaagcaaagttttatgaagggacttttaattgggaaagtgtcaaacagcatgatgccgccagcctgctgaagctcttcattcgggagttgccccagccactgctcagtgtggagtatctcaaagcctttcaggctgtccagaatcttccaaccaagaagcagcaactacaggctttgaaccttcttgtcatcctcctacctgatgcaaacagggacacactgaaggcccttcttgaatttctccaaagagtaatagataataaagaaaaaaataaaatgacagtcatgaatgtagcaatggtcatggccccgaatctctttatgtgtcatgcattgggattgaagtccagtgaacagcgagaatttgtaatggcagctgggacagcaaataccatgcacttattgattaagtaccaaaaacttctgtggacaattcccaagtttattgtaaaccaagtgaggaagcaaaacacggaaaatcataaaaaggataaaagagccatgaagaaattgctgaagaaaatggcttatgaccgagaaaaatatgaaaagcaagataagagtacaaatgatgctgacgttcctcagggagtgattcgagtgcaagctccccatctttcgaaagtttccatggcaatacagctaactgaagaactaaaagccagtgatgtacttgccaggtttctcagccaagaaagtggggttgcccagactctcaagaaaggagaagtttttttgtatgaaattggaggaaatattggggaacgctgccttgatgatgacacttacatgaaggatttatatcagcttaacccaaatgctgagtgggttataaagtcaaagccattgtagaagacttaacaagctgcagataaccatgtggacttctgtcataattcttgctgagtcaagagtgtaaataaaagaaatggcaggactcatattattcagttgtacccaagtatttaaaaatgactctcttaagccttaaaaagtcatagatttgtgctgctgccagaattatattaattattattaatgttattattagaaaaaaaatttctggagtgagagtaaagaggcttaattagtttgtgggcagttttcatatgctctgtgaaatgtgtccagatgtgacatagtttttttttttaatatgtggaaatgtcttctcttcccattcttttctcctaaaatcatatatactgtaatatatgctctctcacctctattacctcctcacatctaccctttcccagttaggtttgctttttgaccaaaaagataacaaataccaggtatggcaagttgtgaagacagcacattaaaacatacctaatttcacagtattcctgtcacgacagaatgttagtattcatctctttgaatcatttgctcaaataataacattccaccttttcctgctgtatcacaggaagtgatttgcattttttttcagttcatctgacttatgttcacagaaccgtatcagcgaccaagaaaataggactgtcagaagctgccagttattactgaaccattaaatacttatatactaagaataaataaaatatacccatgtgaaataataattggattatggataacaagagagtgaaagccaaagcactttctgtctactgtactcttctaaatggaattttaaaagtcatagctggctttacgtgttgtcattattagcattataaatatgcatgatagtataatccagtaatggttgaagaatgtattttacttaaagagggatttttttttttaagtcctgaataagtctactggaagaattattcttctgggtgaaaaagcttttgtttgtgttcttattttaaataatcggagtcaatttattaaaatgttcttgaaagtactattcccagggattttaatgcacaaaccatattgtgacaagagatgagcctctgtactgtaaataagaaatgaagtagagaaatgttaaatattttatgagtttagaatatagtaaataaaaggtgatgtaaatgaatgctgcacaaacggtgttcatgatacttttagtagtactttaggaaaaactacacattctcagaagctcttgatgtctctaatgaagggggggaatgctgttaatgagaacagtcataaatttttagcatataattacaagaacagcctgtggatatgatcacttaaatgattttgtggtgattcgtgccattgcttttttatttaaaagaaaattttgtaattaaatgcctttttctaaattaaaaaaaaa

SEQ ID NO: 4539 - protein, 618 aa, Homo sapien
MNQESTTIKVMEKPPFDRSISQDSLDELSMEDYWIELENIKKSSENSQEDQEVVVVKEPDEGELEEEWLKEAGLSNLFGESAGDPQESIVFLSTLTRTQAAAVQKRVETVSQTLRKKNKQYQIPDVRDIFAQQRESKETAPGGTESQSLRTNENKYQGRDDEASNLVGEEKLIPPEETPAPETDINLEVSFAEQALNQKESSKEKIQKSKGDDATLPSFRLPKDKTGTTRIGDLAPQDMKKVCHLALIELTALYDVLGIELKQQKAVKIKTKDSGLFCVPLTALLEQDQRKVPGMRIPLIFQKLISRIEERGLETEGLLRIPGAAIRIKNLCQELEAKFYEGTFNWESVKQHDAASLLKLFIRELPQPLLSVEYLKAFQAVQNLPTKKQQLQALNLLVILLPDANRDTLKALLEFLQRVIDNKEKNKMTVMNVAMVMAPNLFMCHALGLKSSEQREFVMAAGTANTMHLLIKYQKLLWTIPKFIVNQVRKQNTENHKKDKRAMKKLLKKMAYDREKYEKQDKSTNDADVPQGVIRVQAPHLSKVSMAIQLTEELKASDVLARFLSQESGVAQTLKKGEVFLYEIGGNIGERCLDDDTYMKDLYQLNPNAEWVIKSKPL

SEQ ID NO: 4540 - DNA, 558 bp, Homo sapien
ggcacgaggccttcggccacccccgctgaccatggcagtgtttcatgacgaggtggaaatcgaggacttccaatatgacgaggactcggagacgtatttctatccctgcccatgtggagataacttctccatcaccaaggaagatttggagaatggggaagacgtggcaacgtgtcctagctgctctctcattataaaagtgatttatgacaaagatcagtttgtgtgtggagaaacagtcccagccccttcagccaacaaagaattagttaaatgctgaagaagccttcaggaatccaaatcctgaacatttggaatgagcccagatagaaatatcgaatgcaaagctactggcttcacagagacaaccatttatgatttgctgttctgtaagagtgtggattctttctatcaactgctgatatcatcttcaggaagcaagtccataacatgacatatctggattttgtgcttagaaccttaaattggaagcattcttaattatgcatctaaatttaaaagaagataatttcaaaacagtaaaaaaaaaaaaaaaaa

SEQ ID NO: 4541 - protein, 82 aa, Homo sapien
MAVFHDEVEIEDFQYDEDSETYFYPCPCGDNFSITKEDLENGEDVATCPSCSLIIKVIYDKDQFVCGETVPAPSANKELVKC

SEQ ID NO: 4542 - DNA, 463 bp, Homo sapien
tttaaattataatactgaatttttattgaaataaagcacactaaatcaaaccaattacaaagatacatgtgtcacaccaagaaaacattttcagttatgctgacagccccaaatgttttccatttttcaaagacagtttgtaatgtcatgggaaaattgctcacgacgttaaaatgaaaaaagcaagatacagtatcatatatgcagtatgatctcaactatgaaataactttaatatttatacattgaaaaaaagactagaagaaaatgcaccaaacattgaactgaagttaatctctatatactgggataacaagatattaattttttacttcttgaaaactttcaaattttccaagaaattaatcataaaatcagtgagaaaattgaacttgaatgaatatcaaaactgcttaaacaaggactaggctgagtaacctggctttgaggcatgctacatggc

SEQ ID NO: 4543 - DNA, 415 bp, Homo sapien
ggcacgaggccagatactactggccatcaagggacagaagaaaaaggcgctcattgtggggcactgcatgcctggcccccgaatgacccccagattcgactccaacaacgtggtcctcattgaggacaacgggaaccctgtggggacacgaattaagacacccatccccaccagcctgcgcaagcgggaaggcgagtattccaaggtgctggccattgctcagaactttgtgtgagttgagcccaggcctctggttgcaggactcgtgaatggagcagttctgagaaccacccttttgctaagggagcttgggagccacatggctgctcccttcacactgggtaacagtgtagtatcctgtgagagaataaatgtattcatttaaaaaaaaaaaaaaaaaaaaaaaaaaaaaaaa

SEQ ID NO: 4544 - DNA, 1664 bp, Homo sapien
tcatggccggctcctaccctgaaggtgcacctgcaatcctcgccgataagaggcagcagttcggaagccggttcctgagcgatccggcgcgggtcttccaccacaatgcctgttgattatgagatcaatgcccacaaatactggaatgacttctacaaaatccacgaaaatgggtttttcaaggatagacattggctttttaccgaattccctgagctggcacctagccaaaatcaaaatcatttgaaggattggttcttggagaacaagagtgaagtatgtgaatgtagaaacaatgaggatggacctggtttaataatggaagaacagcacaagtgttcttcgaagagccttgaacataaaacacagacacctcctgtggaggagaatgtaactcagaaaattagtgacctggaaatttgtgctgatgagtttcctggatcctcagccacctaccgaatactggaggttggctgtggtgtgggaaacacagtctttccaattttacaaacgaacaatgacccaggactctttgtttattgctgtgatttttcttccacagctatagaactggtccagacaaattcagaatatgatccttctcggtgttttgcctttgttcacgacctgtgtgatgaagagaagagttacccagtgcccaagggcagtcttgatattatcattctcatatttgttctttcagcaattgttccagacaagatgcagaaggctatcaacaggctgagcaggcttctgaaacctggggggatggtacttctgcgagattacggccgctatgacatggctcagcttcggtttaaaaaaggtcagtgtctatctggaaatttctatgtgagaggtgatggaaccagagtttacttcttcacacaagaggaactggacacgcttttcaccactgctggactggaaaaagttcagaacctggtggaccgccgactgcaggtgaaccgagggaagcaactgacaatgtaccgggtttggattcagtgcaaatactgcaagccccttctgtccagcaccagctaagaggcacctgctgccaacacgatgcaagcccgttgtgtttccgagctttttttaaaaaaaaatttgtagcaccgggcatggtgcatgcctgtaatcccagccactcaggaggctgaggcagggaggatccattgagcccaggagtccagcctgggcaaaatagcgagagaccctgaatctgaaagtaatgataaaataaaaagaatataaatgaggtctcgttgatgctggacaattcaagaattcagacttgaaccttaaacctaggaaaagttactttgtatcaggattctaacaattatgcttcatatttgtgaagtcctttaaaacataattttctcaagttctttctttgagacctcaatctgtcttagcattttgtaactaataactgaaattttattcaaaggaattgtaaaccttaaaccaccaatttatttccatgtgaaaaagtgttatatatgacaagtgttttttgattgtaattgcgttaaatcttttgagagtgtaaatgccgggctaggcaattgcagttaatacatacaggggttagtgaagggcttattaagttgtaggggaagcaagctgggaagaatcagatcagatattttcctgac

SEQ ID NO: 4545 - protein, 313 aa, Homo sapien
MPVDYEINAHKYWNDFYKIHENGFFKDRHWLFTEFPELAPSQNQNHLKDWFLENKSEVCECRNNEDGPGLIMEEQHKCSSKSLEHKTQTPPVEENVTQKISDLEICADEFPGSSATYRILEVGCGVGNTVFPILQTNNDPGLFVYCCDFSSTAIELVQTNSEYDPSRCFAFVHDLCDEEKSYPVPKGSLDIIILIFVLSAIVPDKMQKAINRLSRLLKPGGMVLLRDYGRYDMAQLRFKKGQCLSGNFYVRGDGTRVYFFTQEELDTLFTTAGLEKVQNLVDRRLQVNRGKQLTMYRVWIQCKYCKPLLSSTS

SEQ ID NO: 4546 - DNA, 903 bp, Homo sapien
catgctgaaagcagggcgggaccggggcggtcttccagcagggaaaatggcgctggccatgctggtcttggtggtttcgccgtggtctgcggcccggggagtgcttcgaaactactgggagcgactgctacggaagcttccgcagagccggccgggctttcccagtcctccgtggggaccagcattagcagtacagggcccagccatgtttacagagccagcaaatgataccagtggaagtaaagagaattccagccttttggacagtatcttttggatggcagctcccaaaaatagacgcaccattgaagttaaccggtgtaggagaagaaatccgcagaagcttattaaagttaagaacaacatagacgtttgtcctgaatgtggtcacctgaaacagaaacatgtcctttgtgcctactgctatgaaaaggtgtgcaaggagactgcagaaatcagacgacagatagggaagcaagaagggggcccttttaaggctcccaccatagagactgtggtgctgtacacaggagagacaccgtctgaacaagatcagggcaagaggatcattgaacgagacagaaagcgaccatcctggttcacccagaattgacaccaaagatgttaaaaggataacttcacagtaaatcatttctcctgaaatagaggaagattctttacgttgttgtgcttgtttttaaatcatcagtatagtttaacacattctttctaagcagttttgtgtgggataatttgaagaatatattatgagtaaactccgaaaattttgtttatccaaaggctcaatggattatgtttctattatatacaaggttttaagtaaacataaaatttccagaacaaaaataaaaaatttaaaattcatagcaaaaaaaaaaaaaa

SEQ ID NO: 4547 - protein, 188 aa, Homo sapien [sequence omitted]

SEQ ID NO: 4548 - DNA, 6654 bp, Homo sapien
  Unsure 65-103: Unknown base
  Unsure 6474-6504: Unknown base
  Unsure 6627: Unknown base
ctcgggcagagcgctagggctccgagcgaaccagcgagcgagcgaacgagcggcgctcggcgggnnnnnnnnnnnnnnnnnnnnnnnnnnnnnnnnnnnnnnngcgcggccgggcgaggcgggcccgtccgggagcgggctccggggaaggggtgcgggtctgggcgccggagcggggagcggggccgcgtccctctcagcgccagctctacttgagccccacgagccgctgtccccctggcgcgctcggggccgcgggacgggcgcacgccgccttctcctagtcaagtatccgagccgccccgaaactcgggcggcgagtcggccacgggaagtttattctccggctccttttctaaaaggaagaaacagaagtttctcccagcggacagcttttctttccgcctttttggccctgtctgaaatcgggggtccccagggctggcaggccaggctcgctgggctcctaatcttttttttaatttccaatttttgattgggccgtgggtccccgctgagctccggctgcgcgcgggggcgggagggcgcgcgcaggggagggaccgagagacgcgccgactttttagagggagggatcgggtggacaactggtcccgcggcgctcgcagagccggaaagaagtgctgtaagggacgctcgggggacgctgttcctgaggtgtcgccgcctccctgtcctcgccctccgcggtgggggagaaacccaggagcgaagcccagagcccgcggcgcggccggcggacgaacgagcgcgcagcagccggtgcgcggccgcggcgagggcgggggaagaaaaacaccctgtttcctctccggcccccaccgcggatcatgtaccaggattatcccgggaactttgacacctcgtcccggggcagcagcggctctcctgcgcacgccgagtcctactccagcggcggcggcggccagcagaaattccgggtagatatgcctggctcaggcagtgcattcatccccaccatcaacgccatcacgaccagccaggacctgcagtggatggtgcagcccacagtgatcacctccatgtccaacccataccctcgctcgcacccctacagccccctgccgggcctggcctctgtccctggacacatggccctcccaagacctggcgtgatcaagaccattggcaccaccgtgggccgcaggaggagagatgagcagctgtctcctgaagaggaggagaagcgtcgcatccggcgggagaggaacaagctggctgcagccaagtgccggaaccgacgccgggagctgacagagaagctgcaggcggagacagaggagctggaggaggagaagtcaggcctgcagaaggagattgctgagctgcagaaggagaaggagaagctggagttcatgttggtggctcacggcccagtgtgcaagattagccccgaggagcgccgatcgcccccagcccctgggctgcagcccatgcgcagtgggggtggctcggtgggcgctgtagtggtgaaacaggagcccctggaagaggacagcccctcgtcctcgtcggcggggctggacaaggcccagcgctctgtcatcaagcccatcagcattgctgggggcttctacggtgaggagcccctgcacacccccatcgtggtgacctccacacctgctgtcactccgggcacctcgaacctcgtcttcacctatcctagcgtcctggagcaggagtcacccgcatctccctccgaatcctgctccaaggctcaccgcagaagcagtagcagcggggaccaatcatcagactccttgaactcccccactctgctggctctgtaacccagtgcacctccctccccagctccggagggggtcctcctcgctcctccttcccagggaccagcaccttcaagcgctccagggccgtgagggcaagagggggacctgccaccagggagcttcctggctctgggggacccaggtgggacttagcagtgagtattggaagacttgggttgatctcttagaagccatgggacctcctccctcattcatcttgcaagcaaatcccatttcttgaaaagccttggagaactcggtttggtagacttggacatctctctggcttctgaagagcctgaagctggcctggaccattcctgtccctttgttaccatactgtctctggagtgatggtgtccttccctgccccaccacgcatgctcagtgccttttggtttcaccttccctcgacttgacccttccctcccccagcgtcagtttcactccctcttggtttttatcaaatttgccatgacatttcatctgggtggtctgaatattaaagctcttcatttctggagatggggcagcaggtggctcttctgctggggctgacttgtccagaaggggacaaagtgcaatacagagccttccctaccctgacgcctcccagtcatcatctccagaactcccagcggggctccctgagctctcaaggagatgctgccatcactgggaggctcagaggacccttcctgcccaccttcggagacggcttctggaggaacggcttggccagaagacagggtgtgagtgagacagtggggcacaggttgggtttgccaaacgcctaattaccaggccaggaagcatgccaacaaagccacacgggtgtcctagccagcttcccttcacctggtgtcttgagtagggcgtctcctgtaattactgccttgccattctgcccctggacccttctctccggaccagggaggcgtccctccctaggagccacacattatactccaagtccctgccgggctccgcctttcccccaccctggctctcagggtgacgccacccacagagatttaatgagcgtgggcctggaccttccccagatgctgccaggcagcccctccccaagcctcaaagaagcatttgctgaggatggagaggcaggggagggaggcgggaggccgtcactggagtggcgtctgcagcagctgctgccccagcacccgctcagcctgtcctggctgctcacctccccgcagggcaccgggcctttcctgccctctgtggtcatctgccacctgctggatcaagtgctttctcttttacactcccctgtccccaccccagtgcactcttctggcccaggcggcaagcaagctgtgaacagctggcctgagctgtcgctgtggcttgtggctcatgcgccattcctggttgtctgttgaatctttctggctgctggagttggagataggatgttttgcttcccactgcaggagagctgccccctttcacggggttggggaagggtccccctggcctccagcaggagcacagctcagcagggtccctgctgcccacccctctgagccttttctccccagggtatggctcctgctgagtttcttgtccagcagggccttgacaggaatccagggagtagctcctggccagaaccagcctctgcggggcttgtgctctgcaaagactctgctgctggggattcagctctagaggtcacagtatcctcgtttgaaagataattaagatcccccgtggagaaagcagtgacacattcacacagctgttccctcgcatgttatttcatgaacatgacctgttttcgtgcactagacacacagagtggaacagccgtatgcttaaagtacatgggccagtgggactggaagtgacctgtacaagtgatgcagaaaggagggtttcaaagaaaaaggattttgtttaaaatactttaaaaatgttatttcctgcatcccttggctgtgatgcccctctcccgatttcccaggggctctgggagggacccttctaagaagattgggcagttgggtttctggcttgagatgaatccaagcagcagaatgagccaggagtagcaggagatgggcaaagaaaactggggtgcactcagctctcacaggggtaatcatctcaagtggtatttgtagccaagtgggagctattttcttttttgtgcatatagatatttcttaaatgaagctgctttcttgtcttttatttctaaaagcccccttataccccactttgtgcagcaaagatccccgtgcaggtcacagcctgatttgtggccaggctggacaaattcctgaggcacaacttggcttcagttcagatttcaagctgtgttggtgttgggaccagcagaaggcaaacgtccagccaacacacaggactgtaagaggactctgagctacgtgccctgtgaagacccccaggctttgtcataggaggtcgttcagcttccccaaagtcagaggtgatttgatttggggaagactgaatattcacacctaagtcgtgagcatatcctgagttttacttccttatggcttgccctccaagttctctctctcatacacacacacacccttgctccagaatcaccagacacctccatggctccagctatgggaacagctgcattggggctgcctttctgtttggcttaggaacttctgtgcttcttgtggctccactcgcgaggcagctcggaggtgtggactccgattgggctgcaggcagctctgggacggcacagggcgggcgctctgatcagctcgtgtaaaacacaccgtcttcttggcctcctggccagtctttctgcgaatagtcctctccctggccagttgaatgggggaagctgctggcacaggaaggagaggcgatcccggctgaggcttaggaaattgctggagccggctccaagcagataattcactggggaggttttcagagtcaaacatcattctgcctgtgttgggggccaggtgtgtcacacaagcatctcaaagtcaaaagccatctggggctgctgcttctctttctcaggctctggggaaaggaatctccctctcctctcacttgattccaagtgtggttgaattgtctggagcactgggactttttttctcttttccttgatggaccaacagtgcaaatgcaatctcgccatttaactttcaggtcgatttcctttcctgatcagacatctttgtgccccctttaggaaggaaaagaatacacctacgatgtgccaggcactgtgttaggcgcttttatatagatcctcgttaggatgagactaagggatgaggacatctctttataaaaggcccctaagtaatggataaacagaaacacttagaggtgagaaggtctgtcttcaagatccaaggtaagattgccttcagtctgatgtttgttctcaaggacttatcccctacaatattctcccactccatacttctccttctaccccaccatgtgctcccgtgcactcctcagatggtcagaggggtaacccaagtccttagagaatttggggaccaatagaatatgtgatgtgtgaattttctttaaaaaacttaaggagtctttgctaccttctgcttgttgagttgttttggcattcatattaaaagccagcatctcactatttattgacaggttgggctgtgtgtgtgcgcatgtgtgtatacatttccaggcgtgcctgtgtcctgtagctttttaaaaggaaacccagtcatcccactatgaatctggcatcttcttatgcttctagtgttttggccatacatcaaccaaggggtttaatttatccaatgcttgacgacatgttcaggaggggctggatcaaattttgagagggttatgggaaagggagggggagaagaaattgacatttattttattatttattttaaatgtttacatcttctttatgttgtatcaagcctgaatagaaactgatagcattaaaatactccgttcctctctctcttctcgcttcctttttttttttttttaaatttaggataacacatttttgtttctaaagtgatttgtgatttgtgctgtataaactgtataaaaggttctgtttttaaaggtggattttcattcctctggggacagtggtcgccaagacatctacattgtaagagaacacagtggaagatcctgtcctgattctcaaaaattattttctctgtatgattaaaagtttattccatttattttagtttgtgtttacttgattttgaggaagaaaatatttgactttgtgtaaagagtagggtatcagggtgtcttttctgcggtgggagatgtgtatatatatagtattttggtgtatagtagaaaataagctttgtgcatctgtatttgagatatgttaatgacgtggagtaaagtcagctgtaagactctggaggcaaacaagttgtatatggttcatatggctctatggggaatttaattacctttctgggcacttttctttttttttttttcttaagtaatggtgaaatggtcccattggagagtctcctaaatagaccttccaggcagaaccgcaagctcaaaatctttgtatagttttgaaaattgaggagtagctttgtttggaagcctttcnnnnnnnnnnnnnnnnnnnnnnnnnnnnnnngttgttttactatatgtaatacaagcctacagtatttgcactaaagaaagcttgttagaaaaagcttgctgctatggaagaaagaacatattaaaacttctttcccttgcgatttttttgggngaggggggttagcatttccactttcag

SEQ ID NO: 4549 - protein, 326 aa, Homo sapien; identical to SEQ ID NO: 3558

SEQ ID NO: 4550 - DNA, 4444 bp, Homo sapien
aggaatgaaaggtcataagccattagaaatagtggcattattatgcaataacaacaccctagctaacctgcttttgtcatctgtagcacttacaataaagaatgatgaccttccaaccctggacactacctcgataaagcaaaccagagatcctctctacactttctatggaagccataaaagttgccatcaatatatccactttcatagttctatacttttatactttctagacttttttatagactttatgatcagatctttttgtctcagaggataggttttgcaagattcaaaggaaaatcaaactccttggttgttccagctttgaagcttttgcttcagtaaatttgtttaaagaaccagatcacataccatttatcaaattctttacttaagtcagaatactttgcagacatacatatttggaaaacaaactgtttcttgttcactagatagaatctgtattgtagtaagaaactacttacaaggtggctttctttctgctttgttactctatgtattactcaataatatatgtatggtcacaggttcctggagttgttttatttctttatgacagacacatgagtatgcacctctctctaatcctctgatgtcactgcagcttcagtctctctcactctgtttttgagtgccttcaaaatgccagcatcctggaacattcttttcctgatctaaatcctacctctgactatttcattatccatgaatattggaattcacccatattccaatgggcttaactctacaaactagctaaaaccttggacaagaatttgaccgtatttctagttttgttcctccatgtcatttttaggttatatttttaacttttatttatatcttatttcttcacatatttcgtctctctgttgaaagattttatccttatttgactcttcactttttttactttcaccagaaatttgacgttcctttaaaattaaaggtcattgaatgtcttttgaacacctttttctcaactgaagtcttcctgaatgcctcccctttctgatgaaaggatcctgagtgctgctgttgctctgccctgttcccatgtgcccactcccttccgtacacattttgcaagactatactctttattttagtcaaattaatttaaaattgctccctgggtttctgctctctcatggccctgtccctcaaaaacttctgtttactttttctagctgttttcatctaatttgtttaaaatgtatgatggatccataatatatgaaggatgtaatgaaaaggaggttgcagtgttttatataatatgatcgagcacctccgtgatgaaacatttagcaattggctagtccttcacagccagagtggaagtttgtgctgtggacaggtctttttactcccttccagttctcctccaaaactggacgaaaaaggaaaaaaaaaaagaactctttcaaatgaggagatttgattgcatttttttaggtgaatgaaagcttggagttgagcatttgggccttagtcagcatttttcctttctgacttaaaatctcatgtccttttccttaaagttaatagtactcaggtttttaagactaataaccacacaaggtgggtatctaagaaggcagctgttaatacattctccatctttcctgtctggcaacaggaaagatattattggtgagatagtgcaaaattgtgagaattggttatgttcgatgatgaataaattcaagatttttgaaggcttcactgctatttgggatgggaaggtgagtttacaaaatgaaaaaggtagatttttatgttacagaaatcagtaacgggtttcttgttgtgttaattacctttcacttgatttgccatgatgtttcttcctcattattgatctagaagtttgcctcttggatagtaactagcaacttagtatctactttaaaatttgtggcttttctcttcagggtcccaggccataaaacaacggagagctgtacttgcttgtcacttggaggaaccacatccttgagacagcctgctgtcttgtatgtcttcagtaggaaacttctgacacacacattcaagggagttcctgcccctgagaagtgttcccatagctttccagtcgcaggttactttcacactacgtcagcttctctggtgagatcagggatgttacatattacttgaaaatgatttcataggaagtgaggatggggcaagaaaggaggtagaagctgaattttgcttaacttcagaaggaaatctgatacttgccttggctagttctgatcaactaaagagcctgtgtctgtactggatgtgccaaagagtcaagttgtttctggaatatccagctcctctgaatgaacacagcttcctccctacctgtcttttatgggtgaaaagggaccgtctgatgagcatgatagacatcctgtacaggactcaagactgtttcattgcatttgaaagttggtgggaagtattttattctgctagagctcctaaccctcctagaaatatcttttcatgctctattaattcaattcattagtttaaaaagaaacagtgtgacataattttggtgtttacttcttaagttgtctccccaagggcatatatgtagcctctgaaaatgggatgatttcttctcaatcttccataaatttgaatatgcattttattcatttcttgacatgggctgtgtgactgttttccatcagcagttctggctttgtccacaagggagcaataaagtacgttagctttattctcaaccttctaaagaaagatcccacttttaaatctcttctggaatagcctcttagctcaaagcttattcatgtattttgattatttaagaaattttcccttattacaaagtccagtcgtcgttcatccctcatgatgccaagcaatgattgatgtgtgggtgtggagtccttgtgggtcaggcatcttaattaattagactttttacatattgatgatccccagattgaaagccaggaccttcccataggggcgcctttgtgtgctaaaggcagagcaggcaggcttctccactcctatctcctccgcaggccaccaccatcacatctataggaggaacaagagcactgggggaactctggagtatgagtaaggaaatgcttctcaccttctctgctccaaagagatatctgttacatcagggaacaagtcctctaggtcaggcacttcctcctgaccagtgcaacgggcactccaggttagaaactgtgtgtgctccctctctgtcagttacttgtctaagggctcctatccgtggtcatcagctctctggccatgagttctgtttgtgcttattgcagcagcatcttcacaacaaacaggtcagtaatcaacctgggaagggaaaagacgacagtaaatattaccccctgtagagccgggaggcatttacacctggaatggccttcttaactgatttctgcctggccacctcacccccagccaagtctgaacctgagcaataccaggcacagagaggtgtctacttgtaactccaacacttgacaaaaaacaaaactgaagctgtgattggtttaggcagcaagtggccaggtgcaacttgtttgtttttatttttgttttccccaacagtactgagatcacttgcacttttcctcatttcttaagaaaatccagtttgcttgccatgacttgtttagcgttaggtttacaaagcttgttgttgaatgttgaatatttgtccaaaggagtttgacaaaatagaagctgcttggtccctgttctgcctgctaggtcataaggatgaaggccatgtggctggggtacttatgtcaagtccagaatggggcagtgtccctctcctacctctctgcggagacgcaattgaaggtcaagtagactcagtgtagggcaggcagctgtcatgctgcaaagaagtttagaggagtctttgggttggggaggtgacaggtaggtaggacaggatctcttaagatgggaaagatactggggagaggagggctgcttggccccagggaactgcagtgaggtggaactgagctccgctcctgaatctccaaaggagcccatgctgcccggcttccctgagtcattttttccagcatcctgtcagatccctcaatgtactgatttcccccttgtgttaactataccgatattatttttttagcaattgaaatgcacttttttatttcaactcaatcatgattttaagtataaaaaatttatagattgttaaaactacttttttgtgtatttttaaccactcaatgtagcattgtatattttattcttgtgagactctggtacaggtgtgccgcctaatgatttttctgagatgctgggcctttggatgtgtacggtaaccaacttaatgctaatgttcaaagtacaaaacaaaaaaaagggg

SEQ ID NO: 4551 - DNA, 5306 bp, Homo sapien
  Unsure 2899-2999: Unknown base
gttaaaaaccaaggacctgatatcttataattcagtttaagcctaatacagttcatgtaaactccttttttggcaatttaacatatacatggatcaagtttagtaggtttagaggaaaatgaatgtcttgttctgaaaaaatagcagtaccagctgagctttggggaggtgacagattgagtcacttcacagcttaattctgttatgaactggtcccatgggcatggattgtcaattagggagacttgaatcttttagatattaaatctacaggcagacaacaaagaacacattattcttttgtaaaaatagaggaacctggctgtctactacagaactagaggaacctagcttagacagaagctcatcccacttcagcacctacaacagatttgatacctttgagcaagattggatacttttctcaaagtaaatactgggttggtaccccagagttatgcaccactgaacatggattttaacttaaaatacttaagggcagatttttactgttagttttcttgactaacagagcaacccagtgcagttcctaaagacttctgattttgtgtagcaccagctcctgttgcattttctgaatgaattagtattaaaaatggagccccaagaagctggttaaatttttagccttctgcatttaagctgtagcccaggctgtgagctagtatcgcatcttattcattatccaacatagaaccaggtttacaacaggcactcaaaatgtttgtgggatgaatgaatgagaaactgccaattctggggatttctgtttcagaagagttgatgctaagctgttctttctaacaatggttcccaggttcagctgtttcagtccacaccttgttcacagtaagatattcaattcaattcagcaaacatttgttgtgtgcttgctgctctgtgcctgaccagaagaaatgaagccaagatacaaataatagaaccctgtcatgagcacagaaagacctggtgagtttctattgattgtggtaaaccagcctgcatccagttccaagtaacagctgcccacttagtgaatactctctcatgtttcaacactcagttctagtgtagcctcttctataaagcctttcttttccagatgcagctcaaaaagctgtgtctgccctgaaggccagtggggttcaagctcaaatggcaaagcaacaggaacaagatcctaccaacctctacatttctaatttgccactctccatggatgagcaagaactagaaaatatgctcaaaccatttggacaagttatttctacaaggatactacgtgattccagtggtacaagtcgtggtgttggctttgctaggatggaatcaacagaaaaatgtgaagctgttattggtcattttaatggaaaatttattaagacaccaccaggagtttctgcccccacagaacctttattgtgtaagtttgctgatggaggacagaaaaagagacagaacccaaacaaatacatccctaatggaagaccatggcatagagaaggagaggtgagacttgctggaatgacacttacttacgacccaactacagctgctatacagaacggattttatccttcaccatacagtattgctacaaaccgaatgatcactcaaacttctattacaccctatattgcatctcctgtatctgcctaccaggtgcaaagtccttcgtggatgcaacctcaaccatatattctacagcaccctggtgccgtgttaactccctcaatggagcacaccatgtcactacagcccgcatcaatgatcagccctctggcccagcagatgagtcatctgtcactaggcagcaccggaacatacatgcctgcaacgtcagctatgcaaggagcctacttgccacagtatgcacatatgcagacgacagcggttcctgttgaggaggcaagtggtcaacagcaggtggctgtcgagacgtctaatgaccattctccatatacctttcaacctaataagtaactgtgagatgtacagaaaggtgttcttacatgaagaagggtgtgaagctgttattggtcattttaatggaaaatttattaagacaccaccaggagtttctgcccccacagaacctttattgtgtaagtttgctgatggaggacagaaaaagagacagaacccaaacaaatacatccctaatggaagaccatggcatagagaaggagaggctggaatgacacttacttacgacccaactacagctgctatacagaacggattttatccttcaccatacagtattgctacaaaccgaatgatcactcaaacttctattacaccctatattgcatctcctgtatctgcctaccaggtgcaaagtccttcgtggatgcaacctcaaccatatattctacagcaccctggtgccgtgttaactccctcaatggagcacaccatgtcactacagcccgcatcaatgatcagccctctggcccagcagatgagtcatctgtcactaggcagcaccggaacatacatgcctgcaacgtcagctatgcaaggagcctacttgccacagtatgcacatatgcagacgacagcggttcctgttgaggaggcaagtggtcaacagcaggtggctgtcgagacgtctaatgaccattctccatatacctttcaacctaataagtaactgtgagatgtacagaaaggtgttcttacatgaagaagggtgtgaaggctgaacaatcatggatttttctgatcaattgtgctttaggaaattattgacagttttgcacaggttcttgaaaacgttatttataatgaaatcaactaaaactatttttgctataagttctataaggtgcataaaacccttaaattcatctagtagctgttcccccgaacaggnnnnnnnnnnnnnnnnnnnnnnnnnnnnnnnnnnnnnnnnnnnnnnnnnnnnnnnnnnnnnnnnnnnnnnnnnnnnnnnnnnnnnnnnnnnnnnnnnnnnncttcaattttctgggtatgcacaaagaccatgaagacttatccaagtgcatgaccggatttttgtggttttgttcattttgtgtttaatttgtgtttttttttttccagctgtatgaaatgggctttctgaagtttaaatagtccgacttcacccatggtgttctgtgcttgcagtgcgagtgttgctgtaattcagtgttgccgtcagtgtctcttttcttagctttctgtctttctttcaacgtagtgtgaagtgtcttatccttttctatgaattccaatttgccttaactcttttgatgctgtagctgtttcagtaaaagttagttcaaactaatgatgtagaatgctttgaccaaatgagctggtctattatgccttgtaaaacagcagcatagggcttttaaaaggtagtcaataaaagttgctgaaattttggcttttttaaatatgtagtaggtgtttttaatgatttttcacataatgtgtaaggtagtgaaatgcaagaagggaaaaatgttttgtgtgaaacacattttctgactggggaacttttattagggtaaattgtttgtaaggctgtacgccaacagtttcctctgatagtttgactgatttaggatatctgctgtatgatgcaatgtaaagtcttttttgccttttttcaggaaaaaaaaaaaagctaacttgatgtactagatttagtgtaggtagtgttggggttggggatgggggtgggggaggggagtcactgaatgttttgtccttcctttatactaatgatagtgctttagaatgagaattatgcctgaaatctggcaaaccgaaaaatgttgctattgcaacaaagtggcaaaagctaaaagtaaggatttatcttcaaacataagctgagataacgaatagaagcaaaacgattggctactagctctctctctctctctctattaggtaaatttgaaaaataaaaatgacttggcacttttaaaggtaacttcaccaaagaccgaagagccagtaaccagtagctccaacttgtctcagcatcacatcttctgtgctctttatttttgccggaccagtttgcggttaggagaatgtgccttttttgtacctttgcatttaggttttataattttaattgatgtatggacacacacaaacaaaaaagcatgaaggaagatttggatccaagcagtgccacactttacatcatcactacaagtgttcaagtgtaaagaaaaccaattttgaaactatgaaattcctgattcataaatacacagttatttctactttagtacatataagataattcactgttattaaagctcttttattaaggcaattgcatatgttttaaaagcaatggtaaattaagttgtcttccaaaactgtgtacttgtctggtcagctgtgtatgatcagttatctacctcagagtctattttcttttgtgctgggacaggttgctggccctccctgtttccacagaccaaatcctcctagctcaggagctagggctaagcagttatttctttcaagtattttttagttcttaaattttatgcttgtatttgatgatagatgtcagtgacatttcatagtttcaaaagtccttgctgctctgagaagtgtagattctagtgaaaattacatagtcataagagaaatgtgtttttgtttttgtttttgtttcatttttttaaagttgtggtattattggttctatgctccctggaatattactgctttgtgaaagtccagactgaacgcagcaccctctgtgtacctagtacagttataaacctgggtctctcactacttgatatttttgcattagttaagacagaaatttgatagctcggttagaggggaggggaaatctgctgctagaaatgtctgaactaagtgccatactcgtctgggtaagatttgggaaacataacctctgtacataaaaaaaaaaaaatcagttaaacatcacatagtagacagccattaaattataaaaaaattaatttatgaagaaagaccttttgtacagattgaaaaaaaaagattttcatagagatatctatatgatcaagagagttaattttttatttttgttttactagtgccacagacttgccagtggtaacttatttgtccggttcaagataactctgtagttttctttcctaggacttgttgttaaacgccaaaagacatttttgaactgtacatttgatcagattgttagcttttctgttttatttcttttgagaacctttgaataaaaaacatctgaaattttaaaaaaa

SEQ ID NO: 4552 - protein, 499 aa, Homo sapien
MAKQQEQDPTNLYISNLPLSMDEQELENMLKPFGQVISTRILRDSSGTSRGVGFARMESTEKCEAVIGHFNGKFIKTPPGVSAPTEPLLCKFADGGQKKRQNPNKYIPNGRPWHREGEVRLAGMTLTYDPTTAAIQNGFYPSPYSIATNRMITQTSITPYIASPVSAYQVQSPSWMQPQPYILQHPGAVLTPSMEHTMSLQPASMISPLAQQMSHLSLGSTGTYMPATSAMQGAYLPQYAHMQTTAVPVEEASGQQQVAVETSNDHSPYTFQPNKNCEMYRKVFLHEEGCEAVIGHFNGKFIKTPPGVSAPTEPLLCKFADGGQKKRQNPNKYIPNGRPWHREGEAGMTLTYDPTTAAIQNGFYPSPYSIATNRMITQTSITPYIASPVSAYQVQSPSWMQPQPYILQHPGAVLTPSMEHTMSLQPASMISPLAQQMSHLSLGSTGTYMPATSAMQGAYLPQYAHMQTTAVPVEEASGQQQVAVETSNDHSPYTFQPNK

SEQ ID NO: 4553 - DNA, 3910 bp, Homo sapien
gctttctgccttctaaagtgcaacagtatatatcttgtagaactgtgggaggagagaagataatttttctaccttactccatattcttacttcaaactattttgaatagaggttcactgagccattgctgatagactgtgcatagctactagctgtcacactattgtaggttttttggagagattcatagggaagtgaatgtaaccaggaataaaggctctcactttagctctgggactatgcagtggatcttgggaacaaaataagatatctaatctattttccccattctggctagattttggttgttgtgatgctcctacttcctgtataggtttttgggatcatggtgcaggctagtaataggattcagaattgcttcccttttatatcgaccatgtaagggattctaaaggagggtaaatctcaaagtgctctgaaatcatccctctaaaatctgtcctgtggtgtgctaagatgtctgttgcctttttatgttaagctaaggaacttgaatgccttacctaataactcaactagtagtaagctcattttgtaaatatgaaaatggctgtaagaagtggcattcatgtatattcaatgttagtcaatagaccatagtggcctggatgctttaacaagccaaattccgcaattttttttccttttttccccttcatacttgtatgatctcacctgaccagtgatttcttttcctcctaaccccatgctaccaccattttctggaaatcaaagagatgtggtagtaaatcatacagtacacacgatcatctgagatcaatatgagcacaaaactcatcaagtaggtctgcctggaatgtatataaaaaatgtaaataaaaatttgtaaattagtgtgaactgtatcttgcatatgagactgtgtattgttttgcattctcttcccttttgtagaaatttttctgtaaggaaatgattcagcttgttggttttagagtaaaaatagccaacagttgtggctacacagtgagatcacaggaactggaaatagggtttgtcggctttggttaatgtcagtactcatttatttagcctctcagtgcttaataagacttttctttattttttagttagccgttaggttttgtgaggttagattcctggaagcagtgaatttatacactgttatattaatagagctccgttctttgagtcatgattccaagctaaaggaaattaaaaatgtaatttaataatttcctatttttagggttgttaatttttttctacaaaaaaaccttgaaattttagatatcccaatgtgaatctaatttccatatatacagaaattagacaaataataagtctttagttcaacttaagcatatctcaaatgacttctctaaatttaaagttgatcatgataggatcataaaagacagaaaagacttaagtaatcttgtaatgacaattatttccatttttgctgaactaaaaatatttaacttcataaatatgttactacagcttccagatttaaagaaaaaaagtttcccccactctcaattaaaagttagaaccctccacttttaaaattatacaaatatttcttttttacattacacagaagccttctgtaccattttacgaatttctgtcttcataatataagtgaaaatactgtcatttcaattttctgctttaaattgtttttaataagcattccaaagtgatacagacttaagcttttaatcaatcagtcattcagttgatagacaaagttagcgatgctttatgctaggaaacttgttgacagtaacctgtgcgactttatgcagaagacaaatgctagtaattattatgcacagaggaaaaatcattttaagtatgtggtaaagcagcttcatctttcaaaattgatttgctctggtttttctttagtccattagattccagaatgtccttttactgggaatttagttatgtattaagataacctgttttcagttctttttgaaaagaagacattatttatattgaaccaccttattttaaaatttttaacttttatataccacttgtgtgattccagtgtcatgtcttgggtttgatgtcgttggacagaaaagtgtatcaattattttaaatgaatttttccccatgtttgaggcttagtctgtaaatgtgttgctgtaacagaaaatacttgggtatgcattacttgaatacttgaaaactgaaattaataagatgtattacataatgaattagatttctctgaacagtttttacactgaaaatcttcatttctggattgcagtttgaaatggaatgaagacctgaattatttgggtagaaaaaattatgatagtgcttataagaactgtaaactgttttaaactattttgtgtttgacgcatcaaacttcaagttttttgtaagtttctctcctgaaattttctttctcttctatactttatgcacttactatactactgatgtaataaaagagcagggttaaaaatattgtatctgtattcattgtgaatcctgtagcttttctagttaacaaaaaatcgctttctaaaatactcttaatcccattgttttggttaacatcttacccatttgttgtatttcaaatgccattaatcattttagtacaacacctatgtttataaaaatttgaaaacattacatattgtatttaaaactaattagtgaagagtaagaaaaaaactagccaacagaattgtaggtgatgcattagttaaatttcaaaactcataataaaggaactttcagagattggttgaaacccagtggtatccctgtaaattagctcctgtgactggaaaagaccccaaaaaggcagtagaggagattagtgtttacttgctgtggttgtggtgtgctgctacttaattataggtagtgacacactgaaattcttatttgtccaataatctgaagtagtttcctatatttatctgtactaaattgactataaattgagtctgcaaagaggaaactttttgactgtactgtatttaggagcctttgtacagcttggtcaaatttccatgatatgaagtatttgagttttaaaatatactgttattaaaaggaaaaagacatggccattattccatgtgcttaaatgataatttccttattcagtttcagaagaaaaagaatgaaattgggtaactgtcattgcgttagctttatgttgaattgggaaattgtggcataaagcttaaattcgtgtttatcaaatgtgaaccatagtagtataatgctgctttgtatataatgtaagtgctacaaatagtctcagcactgaaaatgtattgatacctcttaaatgaatgcaacttttgatgtaggtgttttgctatgcctcagaaaatatctgtctgagaatttgttaatctgtttgataatgaagatacttcctgttttcttgtttcatattttcatgttcaaaatttaagttttacatttttactactgttaatttaaataaaatttgttctgtggataaaatgaggttggcagtgaagaaaattaaaaacagcctcattcatgtaactggttaagtaaaaatacattttcactatgtgttcataaacttttaatgaagctgtttgtctttcagttcaaatataagtgatgtttaggctttatttctgttaataaggctttttaccattgattaaatgaaggaatgtatctttttgaagagatttatattctgtaaataaaaattcgttgtaacaataaagttgagttctaactacagtgtattcataaattttattgttacttcaacttatttttgaggttttccttgtgaatatctgcaaacacaagactttccaaagttagtgtataaatgtatatgtggagtgattctttgaattct

SEQ ID NO: 4554 - protein, 42 aa, Homo sapien
FLPSKVQQYISCRTVGGEKIIFLPYSIFLLQTILNRGSLSHC

SEQ ID NO: 4555 - DNA, 951 bp, Homo sapien
aagggtgaaatagaagattatcgtttgctgacagatattttgggaattgaagattacaatggtgacatggacttcaaaatagctggcactaataaaggaataactgcattacaggctgatattaaattacccggaataccaataaaaattgtgatggaggctattcaacaagcttcagtggcaaaaaaggagatattacagatcatgaacaaaactatttcaaaacctcgagcatctagaaaagaaaatggacctgttgtagaaactgttcaggttccattatcaaaacgagcaaaatttgttggacctggtggctataacttaaaaaaacttcaggctgaaacaggtgtaactattagtcaggtggatgaagaaacgttttctgtatttgcaccaacacccagtgctatgcatgaggcaagagacttcattactgaaatctgcaaggatgatcaggagcagcaattagaatttggagcagtatataccgccacaataactgaaatcagagatactggtgtaatggtaaaattatatccaaatatgactgcggtactgcttcataacacacaacttgatcaacgaaagattaaacatcctactgccctaggattagaagttggccaagaaattcaggtgaaatactttggacgtgacccagccgatggaagaatgaggctttctcgaaaagtgcttcagtcgccagctacaaccgtggtcagaactttgaatgacagaagtagtattgtaatgggagaacctatttcacagtcatcatctaattctcagtgatttttttttttaaagagaattctagaattctattttgtctagggtgatgtgctgtagagcaacattttagtagtatcttccattgtgtagatttctatataatataaatacattttaattatttgtactaaaaaaaaaaaaaaaaaaaaaaaaaaaaaa

SEQ ID NO: 4556 - DNA, 1127 bp, Homo sapien
ggcacgagggcggggcgcatctcccgctaggagttcctagtaaagtggcgggagccgcagctatggagccgcaggaggagagagaaacgcaggttgctgcgtggttaaaaaaaatatttggagatcatcctattccacagtatgaggtgaacccacggaccacagagattttacatcacctttcagaacgcaacagggtccgggacagggatgtctacctggtaatagaggacttgaagcagaaagcaagtgaatacgagtcagaagccaagtatcttcaagaccttctcatggagagtgtgaatttttcccccgccaatctctctagcactggttccaggtatctgaatgctttggttgacagtgcggtggcccttgaaacaaaggatacctcgctagctagttttatccctgcagtgaatgatttgacctctgatctctttcgtaccaaatccaaaagtgaagaaatcaagattgaactggaaaaacttgaaaaaaatttaactgcaactttagtattagaaaaatgtctacaagaggatgtcaagaaagcagagttgcatctgtctacagaaagggccaaagttgataatcgtcgtcagaacatggactttctaaaagcaaagtcagaggaattcagatttggaatcaaggctgcagaggagcaactttcagccagaggcatggatgcttctctgtctcatcagtccttagtagcactatcagagaaactggcaagattaaagcaacagactatacctttgaagaaaaaattggagtcctatttagacttaatgccgaatccgtctcttgctcaagtgaaaattgaagaagcaaagcgagaactagatagcattgaagctgaacttacaagaagagtagacatgatggaactgtgacaaaagccaaataaacatccttttccctaacaaagtaaattgaataggactttacagagttctttttcctcttggcatttcctaataacaaaactttctgtgttcttagattacagaatatcataattgatagaatatggtttcttactgtgtgttgcatttttgtgcccaaatacatagttttcatattaaaaagccttttctcttaaaaaaaaaaaaaaaaaaaaa

SEQ ID NO: 4557 - protein, 278 aa, Homo sapien
MEPQEERETQVAAWLKKIFGDHPIPQYEVNPRTTEILHHLSERNRVRDRDVYLVIEDLKQKASEYESEAKYLQDLLMESVNFSPANLSSTGSRYLNALVDSAVALETKDTSLASFIPAVNDLTSDLFRTKSKSEEIKIELEKLEKNLTATLVLEKCLQEDVKKAELHLSTERAKVDNRRQNMDFLKAKSEEFRFGIKAAEEQLSARGMDASLSHQSLVALSEKLARLKQQTIPLKKKLESYLDLMPNPSLAQVKIEEAKRELDSIEAELTRRVDMMEL

SEQ ID NO: 4558 - DNA, 1750 bp, Homo sapien
atttgaaacccaggaggccgacttagccggtggcacgacagttgctgcagggaatcttttaaacgagagcgagaaggactgcgggcaggaccggcgggctcctggggttcagccgtgcctcctcgttacgatgaccagtgtggttaagacagtgtatagcctgcagccctcctctgcgctgagcggcggccagccggcagacacacaaactcgggccacttctaagagtctcttacctgttaggtccaaagaagtcgatgtttccaaacagcttcattcaggaggtccagagaatgatgttacaaaaatcaccaaactgagacgagagaatgggcaaatgaaagctactgacactgccaccagaaggaatgtcagaaaaggctacaaaccactgagtaagcaaaaatcagaggaagagctcaaggacaagaaccagctgttagaagccgtcaacaagcagttgcaccagaagttgactgaaactcagggagagctgaaggacctgacccagaaggtagagctgctggagaagtttcgggacaactgtttggcaattttggagagcaagggccttgatccagctttaggcagtgagaccctggcatcacgacaagaatccactactgatcacatggactctatgttgctgttagaaactttgcaagaggagctgaagctttttaacgaaacagccaaaaagcagatggaggagttacaggccttaaaggtaaagctggagatgaaagaggaaagagtccgattcctagaacagcaaaccttatgtaacaatcaagtaaatgatttaacaacagcccttaaggaaatggagcagctattagaaatgtaagaagaagcaagtggccagatggctccctcttgggcataaaatctcagaggaagctacttaggacatcatcttggccatgatcttctgggactcaccatctccagaatgaaaacaatttctacagtagacttaaggacagtttatgctgaaatggcaattcctcatttaagcaagttttcccaaccttcaggttggtcagccctcctgagcctcacaggtggataattgaggcctacaagagaggggagcctaggagcttggattgaccttctagtcaaccacctgacttcagcacaccattacaatcgggagactaaaccaacaaccagaggatctaaaatgtcacattcagattttcaggaagaaaatcttcattacagtggagcacaaatgttccatacaagacatcattgaggagccatgctgtccccttctaacctgaaacacattctttcccatcctggttgggcttctgtacctccttattaatttatgaacctgaagttgcttgaagtgttttgggcttaataaatggggtgaaagtataggtagcagtaacacctacatgaaacaatacaccttggatcttttaatctaaattacttttcttttttaagtctacttttaaaataaatacttctgtaaatattctgactgtaacattgaggaatgaaaatagccttttaacctagatatgtcagttgatcattattgaactaatttagttaacaagtccaagatattctgacttaatttagaatatttttctgctactctttaagagtcctgtggctagtccctctgtctcccaagagcattggctagtctcctgagggtgttgcccatttgtagcagtggtttcaccaggtctgtggccacttgctgcccatgttttccctgcac

SEQ ID NO: 4559 - protein, 281 aa, Homo sapien
FETQEADLAGGTTVAAGNLLNESEKDCGQDRRAPGVQPCLLVTMTSVVKTVYSLQPSSALSGGQPADTQTRATSKSLLPVRSKEVDVSKQLHSGGPENDVTKITKLRRENGQMKATDTATRRNVRKGYKPLSKQKSEEELKDKNQLLEAVNKQLHQKLTETQGELKDLTQKVELLEKFRDNCLAILESKGLDPALGSETLASRQESTTDHMDSMLLLETLQEELKLFNETAKKQMEELQALKVKLEMKEERVRFLEQQTLCNNQVNDLTTALKEMEQLLEM

SEQ ID NO: 4560 - DNA, 2535 bp, Homo sapien
gaaagatcaatgaggatgagatcccacctccagtggccttaggaaagcggcccctggccccccaggaaccagccaacaggagccctgagacagaccctccagctccccctgccttggagtcagacaacccctcccaacctgagaccagcctccctggcatttctgcccagcccgtttcagacttagacccagacccgcgggccctgctgtcatcccgacagagagagtacaaagtggctgccctcagtgccaagcgggctggagagctagaccgtgcccgagagctcatgaggattgggaagagattcggtgctgtcctggaggccctggagaaggggcagcccgtggatctgagtgccatgcccccggcacctgaggatctgaagccccagcaggcttctcaggctcccacagcaccctcagtcattcccccagccgtggagcgagtgcagccagtgatggcccctgacgtcccagcaaccccagtggcccctacagagtcacagacagtgctggatgccctgcagcagaggctgaacaagtaccgcgaggcgggcatccaggcccggagtggtggggacgagcgcaaggctcggatgcatgagcgcattgccaagcaatatcaagatgctattcgagcacaccgagcaggacggaaagtcaactttgctgaattgcctgttcctccaggatttccccccatccctggcctggagtccactatgggtgttgaggaggacgcagtggcagcgacattggcagctgcagagaaactggcctctgcagaggattcagccccggctgataaagacgaggacgagggtgagcccccagcacaggccccagtggccaagaaacctgcacggcccacagtcccttcatcccagcgcctgcctgagcccagggcctcaagttctaaggagtcaccgagtccatctgtgcgggagcagctggcactgctggaggcacggaaactgcagtatcagcgggcagccctgcaggccaagcgcagccaggacctggagcaggccaaagcctatctgcgggtagccaaatggcttgaggctcagatcatccaggcccgatctggcagacctgttgatctgtccaaggtgccttcgcccttgacggatgaggagggtgacttcatcctcatccaccatgaggacctgcgactctcccagaaggcggaggaggtgtatgcccagctgcaaaaaatgcttctggagcaacaagagaagtgcctgctgttctccaagcagttcatgcaccagggcaacgtggctgagaccacccgatttgagaagcttgctcaggaccgcaagaaacagctggagatcctgcagctggcccaggctcagggcctcgaccctcccacccaccactttgagttgaagacattccagactgtgaggatcttctcagaactcaacagcacagaaatgcatctgatcattgtccggggaatgaacctcccagcccctccaggggtgactcccgatgacctggatgcttttgtgcggtttgagtttcactaccctaactcggaccaggctcaaaaaagcaaaacagctgtggtgaagaacacaaactctccagaatttgatcaactcttcaaactaaacatcaaccgaaaccaccggggcttcaagagggtgatccagagcaaaggcatcaagtttgagatcttccacaaagggtccttcttcagaagcgacaagctggttggcacagcacacctgaaactggagcggctggagaatgagtgtgagatcagagaaattgtggaggtcctggatggaaggaagcccaccggggggaagctggaggtgaagccgatggccagcaccaggagaggagtcaggccgcgactgtgcaggagatgactttcccagctttgctggcttcagaagcctttgtacataagagatgctgctacccaagcaccaaagacctgttaagcatgtgcactactgaccacgactctggtctttcctgttgttggcccctctggggctctacagaaacaggctgggttccaggagcccatctccccactgtctccccctgccccgagtctggaagagggcaaggacacttccattcctctgtaccatggagtcctgcagccccttaaccctgcgtggcaactgtgtacagcttacccctgcctccagttgcaccacttctagatgtgcctttaaaagatctaactatgggatgggagaacttgagggtgatcgggaacctcccctgctgagggtggtgtcagggttccgtgactccagtgggccagtggtagcctgtcccagacaactccgtcaccccagctctgcctgtgcctttatccctgacagctgctgcactagccttcctgcttccctaaggacttagtggagggggaaagttgtttttggtactacttggtgggaagtaaggggaaggttggatcttgggtttggtctacccacccaagagaaaagactgttaactggaagaaaaaatatatatataaaatttaaaaaaaaaaaaaaa

SEQ ID NO: 4561 - protein, 532 aa, Homo sapien
MRIGKRFGAVLEALEKGQPVDLSAMPPAPEDLKPQQASQAPTAPSVIPPAVERVQPVMAPDVPATPVAPTESQTVLDALQQRLNKYREAGIQARSGGDERKARMHERIAKQYQDAIRAHRAGRKVNFAELPVPPGFPPIPGLESTMGVEEDAVAATLAAAEKLASAEDSAPADKDEDEGEPPAQAPVAKKPARPTVPSSQRLPEPRASSSKESPSPSVREQLALLEARKLQYQRAALQAKRSQDLEQAKAYLRVAKWLEAQIIQARSGRPVDLSKVPSPLTDEEGDFILIHHEDLRLSQKAEEVYAQLQKMLLEQQEKCLLFSKQFMHQGNVAETTRFEKLAQDRKKQLEILQLAQAQGLDPPTHHFELKTFQTVRIFSELNSTEMHLIIVRGMNLPAPPGVTPDDLDAFVRFEFHYPNSDQAQKSKTAVVKNTNSPEFDQLFKLNINRNHRGFKRVIQSKGIKFEIFHKGSFFRSDKLVGTAHLKLERLENECEIREIVEVLDGRKPTGGKLEVKPMASTRRGVRPRLCRR

SEQ ID NO: 4562 - DNA, 5580 bp, Homo sapien
cttgtccttcctcccgctttttcttctctctccttgcggtctgaagatgccctcggcaccagccacagcgggagcggcagcaagtcgtccggaccgccaccgccgtcgggttcctccgggagtgaggcggccgcgggagccggggccgccgcgccggcttctcagcaccccgcaaccggcaccggcgctgtccagaccgaggccatgaagcagattctcggggtgatcgacaagaaacttcggaacctggagaagaaaaagggtaagcttgatgattaccaggaacgaatgaacaaaggggaaaggcttaatcaagatcagctggatgccgtttctaagtaccaggaagtcacaaataatttggagtttgcaaaagaattacagaggagtttcatggcactaagtcaagatattcagaaaacaataaagaagacagcacgtcgggagcagcttatgagagaagaagctgaacagaaacgtttaaaaactgtacttgagctacagtatgttttggacaaattgggagatgatgaagtgcggactgacctgaaacaaggtttgaatggagtgccaatattgtccgaagaggagttgtcattgttggatgaattctataagctagtagaccctgaacgggacatgagcttgaggttgaatgaacagtatgaacatgcctccattcacctgtgggacctgctggaagggaaggaaaaacctgtatgtggaaccacctataaagttctaaaggaaattgttgagcgtgtttttcagtcaaactactttgacagcacccacaaccaccagaatgggctgtgtgaggaagaagaggcagcctcagcacctgcagttgaagaccaggtacctgaagctgaacctgagccagcagaagagtacactgagcaaagtgaagttgaatcaacagagtatgtaaatagacagttcatggcagaaacacagttcaccagtggtgaaaaggagcaggtagatgagtggacagttgaaacggttgaggtggtaaattcactccagcagcaacctcaggctgcatccccttcagtaccagagccccactctttgactccagtggctcaggcagatccccttgtgagaagacagcgagtacaagaccttatggcacaaatgcagggtccctataatttcatacaggattcaatgctggattttgaaaatcagacacttgatcctgccattgtatctgcacagcctatgaatccaacacaaaacatggacatgccccagctggtttgccctccagttcattctgaatctagacttgctcagcctaatcaagttcctgtacaaccagaagcgacacaggttcctttggtatcatccacaagtgaggggtacacagcatctcaacccttgtaccagccttctcatgctacagagcaacgaccacagaaggaaccaattgatcagattcaggcaacaatctctttaaatacagaccagactacagcatcatcatcccttcctgctgcgtctcagcctcaagtatttcaggctgggacaagcaaacctttacatagcagtggaatcaatgtaaatgcagctccattccaatccatgcaaacggtgttcaatatgaatgccccagttcctcctgttaatgaaccagaaactttaaaacagcaaaatcagtaccaggccagttataaccagagcttttctagtcagcctcaccaagtagaacaaacagagcttcagcaagaacagcttcaaacagtggttggcacttaccatggttccccagaccagtcccatcaagtgactggtaaccaccagcagcctcctcagcagaacactggatttccacgtagcaatcagccctattacaatagtcgtggtgtgtctcgtggaggctcccgtggtgctagaggcttgatgaatggataccggggccctgccaatggattcagaggaggatatgatggttaccgcccttcattctctaacactccaaacagtggttatacacagtctcagttcagtgctccccgggattactctggctatcaacgggatggatatcagcagaatttcaagcgaggctctgggcagagtggaccacggggagccccacgaggtcgtggagggcccccaagacccaacagagggatgccgcaaatgaacactcagcaagtgaattaatctgattcacaggattatgtttaatcgccaaaaacacactggccagtgtaccataatatgttaccagaagagttattatctatttgttctccctttcaggaaacttattgtaaagggactgttttcatcccataaagacaggactacaattgtcagctttctattacctggatatggaaggaaactatttttactctgcatgttctgtcctaagcgtcatcttgagccttgcacatgatactcagattcctcacccttgcttaggagtaaaacaatatactttacagggtgataataatctccatagttatttgaagtggcttgaaaaaggcaagattgacttttatgacattggataaaatctacaaatcagccctcgagttattcaatgataactgacaaactaaattatttccctagaaaggaagatgaaaggagtggagtgtggtttggcagaacaactgcatttcacagcttttccagttaaattggagcactgaacgttcagatgcataccaaattatgcatgggtcctaatcacacatataaggctggctaccagctttgacacagcactgttcatctggccaaacaactgtggttaaaaacacatgtaaaatgctttttaacagctgatactgtataagacaaagccaagatgcaaaattaggctttgattggcactttttgaaaaatatgcaacaaatatgggatgtaatccggatggccgcttctgtacttaatgtgaaatatttagatacctttttgaacacttaacagtttctttgagacaatgacttttgtaaggattggtactatctatcattccttatgacatgtacattgtctgtcactaatccttggattttgctgtattgtcacctaaattggtacaggtactgatgaaaatctctagtggataatcataacactctcggtcacatgtttttccttcagcttgaaagcttttttttaaaaggaaaagataccaaatgcctgctgctaccacccttttcaattgctatcttttgaaaggcaccagtatgtgttttagattgatttccctgtttcagggaaatcacggacagtagtttcagttctgatggtataagcaaaacaaataaaacgtttataaaagttgtatcttgaaacactggtgttcaacagctagcagcttatgtgattcaccccatgccacgttagtgtcacaaattttatggtttatctccagcaacatttctctagtacttgcacttattatcttttgtctaatttaaccttaactgaattctccgtttctcctggaggcatttatattcagtgataattccttcccttagatgcatagggagagtctctaaatttgatggaaatggacacttgagtagtgacttagccttatgtactctgttggaatttgtgctagcagtttgagcactagttctgtgtgcctatgaagttaatgctgcttattgtctcattctgacttcatggagaattaatcccacctttaagcaaaggctactaagttaatggtattttctgtgcagaaattaaattttattttcagcatttagcccaggaattcttccagtaggtgctcagctatttaaaaacaaaactattctcaaacattcatcattagacaactggagtttttgctggttttgtaacctaccaaaatggataggctgttgaacattccacattcaaaagttttgtagggtggtgggaaatgggggatcttcaatgtttattttaaaataaaataaaataagttcttgacttttctcatgtgtggttgtggtacatcatattggaagggttaacctgttactttggcaaatgagtatttttttgctagcacctccccttgcgtgctttaaatgacatctgcctgggatgtaccacaaccatatgttacctgtatcttaggggaatggataaaatatttgtggtttactgggtaatccctagatgatgtatgcttgcagtcctatataaaactaaatttgctatctgtgtagaaaataatttcatgacatttacaatcaggactgaagtaagttcttcacacagtgacctctgaatcagtttcagagaagggatgggggagaaaatgccttctaggttttgaacttctatgcattagtgcagatgttgtgaatgtgtaaaggtgttcatagtttgactgtttctatgtatgttttttcaaagaattgttcctttttttgaactataatttttctttttttggttattttaccatcacagtttaaatgtatatcttttatgtctctactcagaccatatttttaaaggggtgcctcattatggggcagagaacttttcaataagtctcattaagatctgaatcttggttctaagcattctgtataatatgtgattgcttgtcctagctgcagaaggccttttgtttggtcaaatgcatattttagcagagtttcaaggaaatgattgtcacacatgtcactgtagcctcttggtgtagcaagctcacatacaaaatacttttgtatatgcataatataaatcatctcatgtggatatgaaacttcttttttaaaacttaaaaaggtagaatgttattgattaccttgattagggcagttttatttccagatcctaataattcctaaaaaatatggaaaagttttttttcaatcattgtaccttgatattaaaacaaatatcctttaagtatttctaatcagttagcttctacagttcttttgtctccttttatatgcagctcttacgtgggagacttttccacttaaaggagacatagaatgtgtgcttattctcagaaggttcattaactgaggtgatgagttaacaactagttgagcagtcagcttcctaagtgttttaggacatttgttcattatattttccgtcatataactagaggaagtggaatgcagataagtgccgaattcaaacccttcattttatgtttaagctcctgaatctgcattccacttgggttgtttttaagcattctaaattttagttgattataagttagatttcacagaatcagtattgcccttgatcttgtcctttttatggagttaacggggaggaagacccctcaggaaaacgaaagtaaattgttaaggctcatcttcatacctttttccattttgaatcctacaaaaatactgcaaaagactagtgaatgtttaaaattacactagattaaataatatgaaagtctggttttctcactgtccttgaacgcagtctgcttaagttgttaaaaaccatccagcaaaagctgtagttgaagaagtgctactggtgtgaagagaggaaaaggttataaaagcaatctgatagcctcatctaatacacttctcagcttctgctactaatatc

SEQ ID NO: 4563 - protein, 724 aa, Homo sapien
LVLPPAFSSLSLRSEDALGTSHSGSGSKSSGPPPPSGSSGSEAAAGAGAAAPASQHPATGTGAVQTEAMKQILGVIDKKLRNLEKKKGKLDDYQERMNKGERLNQDQLDAVSKYQEVTNNLEFAKELQRSFMALSQDIQKTIKKTARREQLMREEAEQKRLKTVLELQYVLDKLGDDEVRTDLKQGLNGVPILSEEELSLLDEFYKLVDPERDMSLRLNEQYEHASIHLWDLLEGKEKPVCGTTYKVLKEIVERVFQSNYFDSTHNHQNGLCEEEEAASAPAVEDQVPEAEPEPAEEYTEQSEVESTEYVNRQFMAETQFTSGEKEQVDEWTVETVEVVNSLQQQPQAASPSVPEPHSLTPVAQADPLVRRQRVQDLMAQMQGPYNFIQDSMLDFENQTLDPAIVSAQPMNPTQNMDMPQLVCPPVHSESRLAQPNQVPVQPEATQVPLVSSTSEGYTASQPLYQPSHATEQRPQKEPIDQIQATISLNTDQTTASSSLPAASQPQVFQAGTSKPLHSSGINVNAAPFQSMQTVFNMNAPVPPVNEPETLKQQNQYQASYNQSFSSQPHQVEQTELQQEQLQTVVGTYHGSPDQSHQVTGNHQQPPQQNTGFPRSNQPYYNSRGVSRGGSRGARGLMNGYRGPANGFRGGYDGYRPSFSNTPNSGYTQSQFSAPRDYSGYQRDGYQQNFKRGSGQSGPRGAPRGRGGPPRPNRGMPQMNTQQVN

SEQ ID NO: 4564 - DNA, 3502 bp, Mus musculus
gtctgaggctcggccgcctgagccgcggacggtttgctgagcccgttagtgcgcccggccgagacacgccgccgccatgtcccgctacctgcgtccccccaacacgtctctgttcgtcaggaacgtggccgacgacaccaggtctgaagacttgcggcgtgaatttggtcgttatggtcctatagttgatgtgtatgttccacttgatttctacactcgccgtccaagaggatttgcttatgttcaatttgaggatgttcgtgatgctgaagacgctttacataatttggacagaaagtggatttgtggacggcagattgaaatacagtttgcccagggggatcgaaagacaccaaatcagatgaaagccaaggaagggaggaatgtgtacagttcttcacgctatgatgattatgacagatacagacgttctagaagccgaagttatgaaaggaggagatcaagaagtcggtcttttgattacaactatagaagatcgtatagtcctagaaacagtagaccgactggaagaccacggcgtagcagaagccattccgacaatgatagaccaaactgcagctggaatacccagtacagttctgcttactacacttcaagaaagatctgaaagcggaaaaagaaccaaagaagggcagttcaagcgaccaaagggtgggtggaaggtgctgcagtatgaatactgtacgaatattttgactctggtctgaaaagataaaagaatgttatcgaaaactacatggaataattgaagtcccttcaagtttgaaagtaagcattttaggacaaataaaaggaaattcaactttgtacttgtggaaactaatccctaaatatgaataggtttatattgattcatgggtaacaggtccataataaattattggaaactaggatgtctgaatatcaaggaagacagccatagtctcttacagtgcctctgttggtctgtctcaaactgaattgggtgggaaaaggtatggtccaatataaaagttccatttttgccattattggcaaatcttgcctttgtttattttggtgccagtgttttctgcttaatcatttgctttgttggcatctgtgtttatttacttgtacaccacatgcagtttacatctgtcttaactactccttcccaggtaaattccaattatatttgacatccagctaagagggcccatctcttctcacctctttcctagtcagtatattcagcaaatatttattgagcccttactgtgggcaaatcattgtactggataattgagaaaaatagataattcccttattcagtaaatgtctactgagcacaatctagtgaatcattacagtatggcctcattgttttgtttgaggtgtgttattcataacaatattttacaccattcgtatcaatgtaattatagaacacaatatacgatcaaggataagtaattgtgtggttatctgccatttaaaagtatccagtatttgatcacattattataaataatgaaaaaatgatttaatctgtaataaactggtttattgtgcagtgactgtaatatactagagttataataaattgtttactctgcctcaccaaacacatgctaggatataacccccaaaataagtatttaactttgcattaggtataaaggagactgggtgctataattagattattttgaggcagacagagagctgttatcctaactgatttagtatgttctgtaattgagaaaatgttcaccaaattatactttttagtgatttacatgtacattttataggggacatgttctgtgtatagcgaataaataacttttatagtatcacaaaatgttttggattccttagtttcttattaggatatgatgtttctttacctatacattgatttcatcacatttgatttttgtcatcttttttgccacatacttaaaattttccatataaaattaactaaaaatctggaagtggaatttaagcttttaatttgtagcaattttgaaaatatagcagaggtatattttcaagggaggtgtgaaatggaggtattattgtttgtattttattttagaaattttgtttgaacttgcccaagatcacacagcaagtgtcagatcctaggttacagcccataatttttcacttgtttcatcttttgttaccatgtttgttgtttaatccaatggggaagtgtttttatagctttattttcatggagatagtaacattgatataatgggatctagaatttacttagagtcaaagtgactagatttaattacaaaaagtattttgttgtataccgttatacactcattaacataggggttcttatggacagaggttctatgtatttttaaaagaatatgtagaggctatagacttttttgccctctacctcccttctccatttccttttgaagttaagacatttaagggggagaattaaggtgcatattgagttggggttttgtttaaaaaaaattaggtaaatacatatataactacaataacaacagttggtagttctctaaaatatttaattatggtaaatcagaaaaggccctttaatttttgcatctgttgaatgaattgctttaggatctcttctgtggttgtttctctctatactgaatgctgtcaatattattgagcacttactgtgccgaaccatgtgcttttcaaatatttctatttaatcctaaaaacactcctgggaaatgggtattattcccattttacagatgagaaaattgtcctttgtagaatacccatcatgtgatagcttcttgcatattatgctattcatttctcacaaccttacaaggtaaatggataatgttcctggatgagagattaaacgtactcgaagatcttatggttgtgtggctcagagactctaagcatggctttccaaatctcattctcttgtagagattttccattgtattgcattttgaccatgttcctgtttacaaaacctaagattatattctgaagtatctgtgacttgagtgatagctcaggaataatctgagggcattctattaggaaggaggactagcaaagcctatagttagcctatcctaggcatgaactattctcattttagataggatgacttgataaataggatgaagtgagcaacctgtttgtcttcggttattgctatctacaagacattctgctagtcactgtggaaaagtttccttctcttgggttttttcctcttccccttcctcttaacagtgttggttatctttattatgtttctgtgtatttgtaacagctgtttcacccttgtattgcataatggggatttttcttggaataaaaagtgaggcatgtaaattcattgagaactaaccgtagtttgtaaagaagtaaaaggcctttgtatctagttttttgcagatcacatttctttgaatgctggaaagtgaaataaactggtctaggagccaaaaaaaaaaaaaaaaaaaaaaaa

SEQ ID NO: 4565 - protein, 183 aa, Mus musculus
MSRYLRPPNTSLFVRNVADDTRSEDLRREFGRYGPIVDVYVPLDFYTRRPRGFAYVQFEDVRDAEDALHNLDRKWICGRQIEIQFAQGDRKTPNQMKAKEGRNVYSSSRYDDYDRYRRSRSRSYERRRSRSRSFDYNYRRSYSPRNSRPTGRPRRSRSHSDNDRPNCSWNTQYSSAYYTSRKI

SEQ ID NO: 4566 - DNA, 2331 bp, Homo sapien
aaaaacaagctcagcgatggcggctccagaaggcagcggtctaggcgaggacgcccggctggaccaggagaccgcccagtggctgcgctgggacaagaattccttaactttggaggcagtgaaacgactaatagcagaaggtaataaagaagaactacgaaaatgttttggggcccgaatggagtttgggacagctggcctccgagctgctatgggacctggaatttctcgtatgaatgacttgaccatcatccagactacacagggattttgcagatacctggaaaaacaattcagtgacttaaagcagaaaggcatcgtgatcagttttgacgcccgagctcatccatccagtgggggtagcagcagaaggtttgcccgacttgctgcaaccacatttatcagtcaggggattcctgtgtacctcttttctgatataacgccaaccccctttgtgcccttcacagtatcacatttgaaactttgtgctggaatcatggtaactgcatctcacaatccaaagcaggataatggttataaggtctattgggataatggagctcagatcatttctcctcacgataaagggatttctcaagctattgaagaaaatctagaaccgtggcctcaagcttgggacgattctttaattgatagcagtccacttctccacaatccgagtgcttccatcaataatgactactttgaagaccttaaaaagtactgtttccacaggagcgtgaacagggagacaaaggtgaagtttgtgcacacctctgtccatggggtgggtcatagctttgtgcagtcagctttcaaggcttttgaccttgttcctcctgaggctgttcctgaacagaaagatccggatcctgagtttccaacagtgaaatacccgaatcccgaagaggggaaaggtgtcttgactttgtcttttgctttggctgacaaaaccaaggccagaattgttttagctaacgacccggatgctgatagacttgctgtggcagaaaagcaagacagtggtgaatggagggtgttttcaggcaatgagttgggggccctcctgggctggtggctttttacatcttggaaagagaagaaccaggatcgcagtgctctcaaagacacgtacatgttgtccagcaccgtctcctccaaaatcttgcgggccattgccttaaaggaaggttttcattttgaggaaacattaactggctttaagtggatgggaaacagagccaaacagctaatagaccaggggaaaactgttttatttgcatttgaagaagctattggatacatgtgctgcccttttgttctggacaaagatggagtcagtgccgctgtcataagtgcagagttggctagcttcctagcaaccaagaatttgtctttgtctcagcaactaaaggccatttatgtggagtatggctaccatattactaaagcttcctattttatctgccatgatcaagaaaccattaagaaattatttgaaaacctcagaaactacgatggaaaaaataattatccaaaagcttgtggcaaatttgaaatttctgccattagggaccttacaactggctatgatgatagccaacctgataaaaaagctgttcttcccactagtaaaagcagccaaatgatcaccttcacctttgctaatggaggcgtggccaccatgcgcaccagtgggacagagcccaaaatcaagtactatgcagagctgtgtgccccacctgggaacagtgatcctgagcagctgaagaaggaactgaatgaactggtcagtgctattgaagaacattttttccagccacagaagtacaatctgcagccaaaagcagactaaaatagtccagccttgggtatacttgcatttacctacaattaagctgggtttaacttgttaagcaatatttttaagggccaaatgattcaaaacatcacaggtatttatgtgttttacaaagacctacattcctcattgtttcatgtttgacctttaaggtgaaaaaagaaaatggccaaacccaacaaactaacattcctactaaaaagttgagcttggacatattttgaatttttgtaagtgaagatttttaaactgactaacttaaaaaaatagattgtaattgatgtgccttaatttgcataaatcataaatgtatgtcctctctgtaattgttttaatgtgtgcttgaaatatccagaaaacctatggagttagtaaattctgggctgtcatatgtaggatagccactttttaggtatatgtacatttatatttctatcaattccttagaaagtaaaataaatgaatagatc

SEQ ID NO: 4567 - protein, 612 aa, Homo sapien
MAAPEGSGLGEDARLDQETAQWLRWDKNSLTLEAVKRLIAEGNKEELRKCFGARMEFGTAGLRAAMGPGISRMNDLTIIQTTQGFCRYLEKQFSDLKQKGIVISFDARAHPSSGGSSRRFARLAATTFISQGIPVYLFSDITPTPFVPFTVSHLKLCAGIMVTASHNPKQDNGYKVYWDNGAQIISPHDKGISQAIEENLEPWPQAWDDSLIDSSPLLHNPSASINNDYFEDLKKYCFHRSVNRETKVKFVHTSVHGVGHSFVQSAFKAFDLVPPEAVPEQKDPDPEFPTVKYPNPEEGKGVLTLSFALADKTKARIVLANDPDADRLAVAEKQDSGEWRVFSGNELGALLGWWLFTSWKEKNQDRSALKDTYMLSSTVSSKILRAIALKEGFHFEETLTGFKWMGNRAKQLIDQGKTVLFAFEEAIGYMCCPFVLDKDGVSAAVISAELASFLATKNLSLSQQLKAIYVEYGYHITKASYFICHDQETIKKLFENLRNYDGKNNYPKACGKFEISAIRDLTTGYDDSQPDKKAVLPTSKSSQMITFTFANGGVATMRTSGTEPKIKYYAELCAPPGNSDPEQLKKELNELVSAIEEHFFQPQKYNLQPKAD

SEQ ID NO: 4568 - DNA, 2830 bp, Homo sapien
acgaactggtacacagaatgaaaggaacagagggcctgaggctatggcaggaggagcaggagaggaaggtgcaagccctctcggagatggcatctgaacaactgaagcggtttgatgaatggaaggaactgaagcagcataaagaattccaggacttgcgggaagtaatggagaagagctccagagaagccttgggacaccaagagaagctaaaagctgagcaccgtcacagagcaaagattctcaacctgaagctgcgggaagcagagcagcagcgcgtgaagcaagcagaacaggagcggcttcggaaggaagaaggccagatccgcctgcgggccctctatgctctgcaggaggagatgctgcagctcagccagcagctggatgcctctgagcagcacaaagccctgcttaaggtcgacctggctgccttccagacccgaggcaaccagctgtgcagcctcatctcagggatcatccgggcctcttcagagagcagctatcccacagcagagagtcaagctgaggctgagcgagctctgcgggaaatgcgggacctcctgatgaacttggggcaggagatcaccagagcctgcgaagacaagaggaggcaggatgaagaagaggcccaggtaaagctgcaagaggcacagatgcagcagggaccagaggcccacaaagagcccccagctcccagccagggcccaggagggaaacagaatgaagacctccaggtgaaggtacaagacattacaatgcagtggtaccagcagctgcaggatgcttccatgcagtgtgtgttgacctttgagggcctgaccaacagcaaggacagtcaggccaaaaagataaagatggacctccagaaggctgctaccatcccagtgagccaaatctctaccattgcaggctcaaaactgaaggagatctttgacaagatccacagcctgctctctggaaaacctgttcaatctggtgggcgctctgtgtctgtcacacttaacccacaggggctggactttgttcaatacaaactggcagagaaatttgtgaaacaaggcgaggaggaagtggcctctcaccatgaagcagcattccccattgcagttgtggcatccgggatctgggagctccaccccagagtgggggacctcattcttgctcatctacataagaagtgtccttactctgttcctttctatcccactttcaaggagggaatggctttggaagactatcagaggatgcttggttaccaagtaaaggattccaaagtggagcagcaagacaactttctaaaacgcatgtcagggatgatccgtctctacgctgctatcatccagctccggtggccatatggaaaccgacaggagattcaccctcatggcttaaatcatggatggcgctggttggcacagatcttaaacatggagcccttgtcagatgtgacagccaccctcctctttgacttcctggaggtgtgtgggaatgccctcatgaagcaataccaggttcagttctggaagatgctaattctcatcaaagaggactactttcccagaattgaagctatcacaagctcaggacagatgggctccttcatacgcctcaagcagttcttggagaaatgtttgcaacacaaggacattcctgtccccaagggctttctgacttcctccttctggcgctcctgatgtcactccatcacccaccatcaccgctgctgcaaagaggcaataataaaggaactgaagacagctgtatttgggagaagtcatgtcagattcagaaatttgccattatgtatttttatgtatttatgccttgtgactaggagaggagattttcatgggtcacaaaattcttggaggtcccttagtagatttggtagttccttaagagatccacgtgataaaataaatggagttggcctttcttgttttttgcaaaagtgataaaaggtctttagcacttggtctcctcccttgtctctagtgtctttcagaaagttggcaataccttaacaaatgcactctgagctggagggagcccaccatttgcacccacctacccaccctcacccctgttcagatgaatttccagaaagagctaaggctcataaggttcccttttaagtattatttaatagttgaggccagatacttacatgcaagtctgggttatggttgttttgcctttctcagcttgtgaagtcattctaaagctagaggaagtatgtgatatacacatggactaaggctcaggtgacactatggctagattaacatctgggattaggactggaaacacatgtcattttgaactaagggaaactctttgtcatcctaatttggaatttggtccctggatggctagggatccatgaaccaggcaggtaccttttttgtttttgttttgttttgtttcttttctgtttgaattaagatgggctaagatggggcttgcaacattaaacatgagctgagcatccataagcattgaattgggattaaataaagatgttgggcaggaactgaacactgctaatatgatgataaatatgcctgactaaagccactacagaaatccagagattggctgttaaaatttgttttgtggaaagactaattctctttgatactgcagaggcagtggccatggatctgttcctctgtgctaaatgtcttgtggcagggtgtgtttgtgggggagtgttcactggtactcttgagtggcctgaagtgacccattctatgaattgttaattaaggtgccaaaaaaaattaataataaagcttggttttttgaaaaaaaaaaaaaaaaaaaaagg

SEQ ID NO: 4569 - DNA, 4689 bp, Homo sapien
ccggccgcgtcccgcccgctccccggcaccagaagttcctctgcgcgtccgacggcgacatgggcgtccccacggccctggaggccggcagctggcgctggggatccctgctcttcgctctcttcctggctgcgtccctaggtccggtggcagccttcaaggtcgccacgccgtattccctgtatgtctgtcccgaggggcagaacgtcaccctcacctgcaggctcttgggccctgtggacaaagggcacgatgtgaccttctacaagacgtggtaccgcagctcgaggggcgaggtgcagacctgctcagagcgccggcccatccgcaacctcacgttccaggaccttcacctgcaccatggaggccaccaggctgccaacaccagccacgacctggctcagcgccacgggctggagtcggcctccgaccaccatggcaacttctccatcaccatgcgcaacctgaccctgctggatagcggcctctactgctgcctggtggtggagatcaggcaccaccactcggagcacagggtccatggtgccatggagctgcaggtgcagacaggcaaagatgcaccatccaactgtgtggtgtacccatcctcctcccaggagagtgaaaacatcacggctgcagccctggctacgggtgcctgcatcgtaggaatcctctgcctccccctcatcctgctcctggtctacaagcaaaggcaggcagcctccaaccgccgtgcccaggagctggtgcggatggacagcaacattcaagggattgaaaaccccggctttgaagcctcaccacctgcccaggggatacccgaggccaaagtcaggcaccccctgtcctatgtggcccagcggcagccttctgagtctgggcggcatctgctttcggagcccagcacccccctgtctcctccaggccccggagacgtcttcttcccatccctggaccctgtccctgactctccaaactttgaggtcatctagcccagctgggggacagtgggctgttgtggctgggtctggggcaggtgcatttgagccagggctggctctgtgagtggcctccttggcctcggccctggttccctccctcctgctctgggctcagatactgtgacatcccagaagcccagcccctcaacccctctggatgctacatggggatgctggacggctcagcccctgttccaaggattttggggtgctgagattctcccctagagacctgaaattcaccagctacagatgccaaatgacttacatcttaagaagtctcagaacgtccagcccttcagcagctctcgttctgagacatgagccttgggatgtggcagcatcagtgggacaagatggacactgggccaccctcccaggcaccagacacagggcacggtggagagacttctcccccgtggccgccttggctcccccgttttgcccgaggctgctcttctgtcagacttcctctttgtaccacagtggctctggggccaggcctgcctgcccactggccatcgccaccttacccagctgcctcctaccagcagtttctctgaagatctgtcaacaggttaagtcaatctggggcttccactgcctgcattccagtccccagagcttggtggtcccgaaacgggaagtacatattggggcatggtggcctccgtgagcaaatggtgtcttgggcaatctgaggccaggacagatgttgccccacccactggagatggtgctgagggaggtgggtggggccttctgggaaggtgagtggagaggggcacctgccccccgccctccccatcccctactcccactgctcagcgcgggccattgcaagggtgccacacaatgtcttgtccaccctgggacacttctgagtatgaagcgggatgctattaaaaactacatggggaaacaggtgcaaaccctggagatggattgtaagagccagtttaaatctgcactctgctgctcctcccccacccccaccttccactccatacaatctgggcctggtggagtcttcgcttcagagccattcggccaggtgcgggtgatgttcccatctcctgcttgtgggcatgccctggctttgtttttatacacataggcaaggtgagtcctctgtggaattgtgattgaaggattttaaagcaggggaggagagtagggggcatctctgtacactctgggggtaaaacagggaaggcagtgcctgagcatggggacaggtgaggtggggctgggcagaccccctgtagcgtttagcaggatgggggccccaggtactgtggagagcatagtccagcctgggcatttgtctcctagcagcctacactggctctgctgagctgggcctgggtgctgaaagccaggatttggggctaggcgggaagatgttcgcccaattgcttggggggttggggggatggaaaaggggagcacctctaggctgcctggcagcagtgagccctgggcctgtggctacagccagggaaccccacctggacacatggccctgcttctaagccccccagttaggcccaaaggaatggtccactgagggcctcctgctctgcctgggctgggccaggggctttgaggagagggtaaacataggcccggagatggggctgacacctcgagtggccagaatatgcccaaaccccggcttctcccttgtccctaggcagaggggggtcccttcttttgttccctctggtcaccacaatgcttgatgccagctgccataggaagagggtgctggctggccatggtggcacacacctgtcctcccagcactttgcagggctgaggtggaaggaccgcttaagcccaggtgttcaaggctgctgtgagctgtgttcgagccactacactccagcctggggacggagcaaaactttgcctcaaaacaaattttaaaaagaaagaaagaaggaaagagggtatgtttttcacaattcatgggggcctgcatggcaggagtggggacaggacacctgctgttcctggagtcgaaggacaagcccacagcccagattccggttctcccaactcaggaagagcatgccctgccctctggggaggctggcctggccccagccctcagctgctgaccttgaggcagagacaacttctaagaatttggctgccagaccccaggcctggctgctgctgtgtggagagggaggcggcccgcggcagaacagccaccgcacttcctcctcagcttcctctggtgcggccctgccctctcttctctggacccttttacaactgaacgcatctgggcttcgtggtttcctgttttcagcgaaatttactctgagctcccagttccatcttcatccatggccacaggccctgcctacaacgcactagggacgtccctccctgctgctgctggggaggggcaggctgctggagccgccctctgagttgcccgggatggtagtgcctctgatgccagccctggtggctgtgggctggggtgcatgggagagctgggtgcgagaacatggcgcctccagggggcgggaggagcactaggggctggggcaggaggctcctggagcgctggattcgtggcacagtctgaggccctgagagggaaatccatgcttttaagaactaattcattgttaggagatcaatcaggaattaggggccatcttacctatctcctgacattcacagtttaatagagacttcctgcctttattccctcccagggagaggctgaaggaatggaattgaaagcaccatttggagggttttgctgacacagcggggaccgctcagcactccctaaaaacacaccatggaggccactggtgactgctggtgggcaggctggccctgcctgggggagtccgtggcgatgggcgctggggtggaggtgcaggagccccaggacctgcttttcaaaagacttctgcctgaccagagctcccactacatgcagtggcccagggcagaggggctgatacatggcctttttcagggggtgctcctcgcggggtggacttgggagtgtgcagtgggacagggggctgcaggggtcctgccaccaccgagcaccaacttggcccctggggtcctgccccatgaatgaggccttccccagggctggcctgactgtgctgggggctgggttaacgttttctcagggaaccacaatgcacgaaagaggaactggggttgctaaccaggatgctgggaacaaaggcctcttgaagcccagccacagcccagctgagcatgaggcccagcccatagacggcacaggccacctggcccattccctgggcattccctgctttgcattgctgcttctcttcaccccatggaggctatgtcaccctaactatcctggaatgtgttgagagggattctgaatgatcaatatagcttggtgagacagtgccgagatagatagccatgtctgccttgggcacgggagagggaagtggcagcatgcatgctgtttcttggccttttctgttagaatacttggtgctttccaacacactttcacatgtgttgtaacttgtttgatccacccccttccctgaaaatcctgggaggttttattgctgccatttaacacagagggcaatagaggttctgaaaggtctgtgtcttgtcaaaacaagtaaacggtggaactacgact

SEQ ID NO: 4570 - protein, 330 aa, Homo sapien
GRVPPAPRHQKFLCASDGDMGVPTALEAGSWRWGSLLFALFLAASLGPVAAFKVATPYSLYVCPEGQNVTLTCRLLGPVDKGHDVTFYKTWYRSSRGEVQTCSERRPIRNLTFQDLHLHHGGHQAANTSHDLAQRHGLESASDHHGNFSITMRNLTLLDSGLYCCLVVEIRHHHSEHRVHGAMELQVQTGKDAPSNCVVYPSSSQESENITAAALATGACIVGILCLPLILLLVYKQRQAASNRRAQELVRMDSNIQGIENPGFEASPPAQGIPEAKVRHPLSYVAQRQPSESGRHLLSEPSTPLSPPGPGDVFFPSLDPVPDSPNFEVI

SEQ ID NO: 4571 - DNA, 1911 bp, Homo sapien
gtccgacggcgacatgggcgtccccacggccctggaggccggcagctggcgctggggatccctgctcttcgctctcttcctggctgcgtccctaggtccggtggcagccttcaaggtcgccacgccgtattccctgtatgtctgtcccgaggggcagaacgtcaccctcacctgcaggctcttgggccctgtggacaaagggcacgatgtgaccttctacaagacgtggtaccgcagctcgaggggcgaggtgcagacctgctcagagcgccggcccatccgcaacctcacgttccaggaccttcacctgcaccatggaggccaccaggctgccaacaccagccacgacctggctcagcgccacgggctggagtcggcctccgaccaccatggcaacttctccatcaccatgcgcaacctgaccctgctggatagcggcctctactgctgcctggtggtggagatcaggcaccaccactcggagcacagggtccatggtgccatggagctgcaggtgcagacaggcaaagatgcaccatccaactgtgtggtgtacccatcctcctcccaggagagtgaaaacatcacggctgcagccctggctacgggtgcctgcatcgtaggaatcctctgcctccccctcatcctgctcctggtctacaagcaaaggcaggcagcctccaaccgccgtgcccaggagctggtgcggatggacagcaacattcaagggattgaaaaccccggctttgaagcctcaccacctgcccaggggatacccgaggccaaagtcaggcaccccctgtcctatgtggcccagcggcagccttctgagtctgggcggcatctgctttcggagcccagcacccccctgtctcctccaggccccggagacgtcttcttcccatccctggaccctgtccctgactctccaaactttgaggtcatctagcccagctgggggacagtgggctgttgtggctgggtctggggcaggtgcatttgagccagggctggctctgtgagtggcctccttggcctcggccctggttccctccctcctgctctgggctcagatactgtgacatcccagaagcccagcccctcaacccctctggatgctacatggggatgctggacggctcagcccctgttccaaggattttggggtgctgagattctcccctagagacctgaaattcaccagctacagatgccaaatgacttacatcttaagaagtctcagaacgtccagcccttcagcagctctcgttctgagacatgagccttgggatgtggcagcatcagtgggacaagatggacactgggccaccctcccaggcaccagacacagggcacggtggagagacttctcccccgtggccgccttggctcccccgttttgcccgaggctgctcttctgtcagacttcctctttgtaccacagtggctctggggccaggcctgcctgcccactggccatcgccaccttacccagctgcctcctaccagcagtttctctgaagatctgtcaacaggttaagtcaatctggggcttccactgcctgcattccagtccccagagcttggtggtcccgaaacgggaagtacatattggggcatggtggcctccgtgagcaaatggtgtcttgggcaatctgaggccaggacagatgttgccccacccactggagatggtgctgagggaggtgggtggggccttctgggaaggtgagtggagaggggcacctgccccccgccctccccatcccctactcccactgctcagcgcgggccattgcaagggtgccacacaatgtcttgtccaccctgggacacttctgagtatgaagcgggatgctattaaaaactacatggggaaacaggtgcaaaaaaaaaaaaaaaaaaaaaaaa

SEQ ID NO: 4572 - protein, 311 aa, Homo sapien [sequence omitted]

SEQ ID NO: 4573 - DNA, 3611 bp, Homo sapien
ggagggagaggctgaatgttggctcggtaatggagaggagcggccgctccagagcttcctcccggggcgcccccctcagtccgtccgcgcttctcagccgccagtctcctggccgcgcagtccccgcggacggccgggccgcggagaccctcgcagaagaggcgctgccggcggcgaggactggccggcggcatccgaggcgcgcgccccaccgccacccccacccgcctgccagccggtccctccggccgccgccatgtcctcctcctcttcctcccccagggagacgtacgaggaggaccgggagtacgagagccaggccaagcgtctcaagaccgaggagggggagatcgactactcggccgaggaaggcgagaaccgccgggaagcgacgccccggggcgggggcgaatggcggcggctggcggccggagcttctctcagccggaggcaggtggaagtcatcataaagtttctgtttcacccgtcgtccatgttcgaggactctgtgaatctgtggtggaagcagacctcgtggaagcgctggaaaaatttgggacaatatgctatgtgatgatgatgccatttaaacgacaggctctagtggaatttgaaaacatagatagtgccaaagaatgtgtgacatttgctgcagatgaacccgtgtacattgctggtcaacaggcttttttcaactattctacaagcaaaaggatcactcggccaggaaatactgatgatccatcaggaggcaacaaagttcttctgctctcaattcagaatccgctttatccaattacagtggatgttttatatactgtatgcaaccctgttggcaaagtgcaacgtattgttatattcaagagaaatgggatacaagcaatggttgagtttgaatcagtcctttgtgcccagaaagctaaagcagcactcaatggagctgatatatatgctggatgttgcacactaaaaattgaatatgcacggccaactcgtctaaatgttattaggaatgacaatgacagttgggactacactaaaccatatttgggaagacgagatagaggaaagggtcgccagagacaagccattttgggagaacacccttcttcgtttagacatgatggctatggatcccatggtccattattgcctttaccaagtcgttacagaatgggctctcgagatacacctgaacttgttgcttatccattaccacaggcttcttcctcttacatgcatggaggaaatccctctggttcagttgtaatggttagtggattacatcaactaaaaatgaattgttcaagagtcttcaacctgttctgcttatatggaaatattgagaaggtaaaatttatgaagaccattcctggtacagcactggtagaaatgggtgatgagtatgctgtagaaagagctgtcacacaccttaataatgtcaaattatttgggaaaagacttaatgtttgcgtgtctaaacaacattcagttgttccaagtcaaatatttgagctggaggatggtaccagcagctacaaagattttgcaatgagcaaaaataatcgctttacaagtgctggccaagcatctaagaatataatccagccaccctcctgtgttttgcattattataatgttccattgtgtgtcacagaagagaccttcacaaagttgtgtaatgaccatgaagttcttacattcatcaaatataaagtgtttgatgcaaaaccttcagccaaaacactttctgggctattagaatgggagtgcaaaactgatgcagtagaagcccttacggcactgaatcactatcagataagagtgccgaatggttccaatccctatacattgaagctttgcttttctacatcatcccatttataagaagagaagagcatgttagaatttatgttcacctttattacaatttcaaagctacacttcattaaaaaaaaatctaaaatggttgatctcatgttgccttgcttactttaagatcctgttctgtaataaacatattttgccttgagtaaatttgttgtaagcttaaatattgaattgttttcattttaagatagaatatcataatgtagactatctacagcttcattgtagattatacagatatatgatttctaaccttattactggaatttttcttccacagtaaaaatatatttgcattcttaatgctaattatctgcaagtattttttcattgtgtaagagattaatgcaggtgaaagtattgcattttaatatagaattcctattatatgtttagatgtttaagtatgttgcagttactcatattaaacataacttgtatatttattattttaatgaagtttgagaataacgttacatatgttgaattttaagtactacagatttaactgattttatatttctgaaaggctaacagacatggatacacgtgtacagtatgcattcaaacttatttaaattggtgtatttttttttaagtcactgtccatttgtattgacatgcctctgtttctagtccagtttggagattttataaagttataacaatgagttaatgtgttcattttcatttgttgcatgtgacttaaatacagctagtatttggcattgagattttaatagaggttataattaacagttcctcttatagataataatctgggatccatgggtgggcttcagagaatctgtgtaccccctaaaattgtatgtagaattttggatatttacatttttattttttaactcttggatccatcagtaatatgtatttttctatatggtacaagatttaaggatctaattttatttttattccaaacagatagctatttgtctcaataccatttattaaacattctttctcccactggatctgttttttttttctttttaagataatagattttatacataggcaagtaagatttaaggaccaaacatggtattaagagactatagcacgattgttaccaagttcacagcttttttacaatagaaaaactgatgtggccattttgttttcatctttaaaagaagggagaatatgtgtcatctacctagaataactgatatcagtagttgacaatatcagttttgtaatcctgacacttttaaacaaatttgtaaatgaaagttccatttagatcttttgtaaagactttattttaaattttaatataaaaaatccttttagaaataaggcaggcatttacaattttagagctgtttaataggaagtttagatggaaactaaacacacattaacatttatttcccctcattttgatggcagtggaccagcatttagccctctaaagataaagaaaaaattaaatttaatctagaagtattttagacccttatcacagaacccagtaagttatgccaagggtaactgtgtgaactgtgttcgatactgggctatgtatgtttcttattcattgccaatttaatacctaagtttatctaactttacaataaagctttttttcccctataaatacttttctacctcttttgaaaaattgaaataccttaattttggtttatgtaatagttgtctacgttccttcctcctctgaaaattaatgtgggttg

SEQ ID NO: 4574 - protein, 628 aa, Homo sapien [sequence omitted]

SEQ ID NO: 4575 - DNA, 2055 bp, Homo sapien
ggagggagaggctgaatgttggctcggtaattgagaggagcggccgctccagagcttcctcccggggcgcccccctcagtccgtccgcgcttctcagccgccagtctcctggccgcgcagtccccgcggacggccgggccgcggagaccctcgcagaagaggcgctgccggcggcgaggactggccggcggcatccgaggcgcgcgccccaccgccacccccacccgcctgccagccggtccctccggccgccgccatgtcctcctcctcttcctcccccagggagacgtacgaggaggaccgggagtacgagagccaggccaagcgtctcaagaccgaggagggggagatcgactactcggccgaggaaggcgagaaccgccgggaagcgacgccccggggcgggggcgatggcggcggcggcggccggagcttctctcagccggaggcaggtggaagtcatcataaagtttctgtttcacccgtcgtccatgttcgaggactctgtgaatctgtggtggaagcagacctcgtggaagcgctggaaaaatttgggacaatatgctatgtgatgatgatgccatttaaacgacaggctctagtggaatttgaaaacatagatagtgccaaagaatgtgtgacatttgctgcagatgaacccgtgtacattgctggtcaacaggcttttttcaactattctacaagcaaaaggatcactcggccaggaaatactgatgatccatcaggaggcaacaaagttcttctgctctcaattcagaatccgctttatccaattacagtggatgttttatatactgtatgcaaccctgttggcaaagtgcaacgtattgttatattcaagagaaatgggatacaagcaatggttgagtttgaatcagtcctttgtgcccagaaagctaaagcagcactcaatggagctgatatatatgctggatgttgcacactaaaaattgaatatgcacggccaactcgtctaaatgttattaggaatgacaatgacagttgggactacactaaaccatatttgggaagacgagatagaggaaagggtcgccagagacaagccattttgggagaacacccttcttcgtttagacatgatggctatggatcccatggtccattattgcctttaccaagtcgttacagaatgggctctcgagatacacctgaacttgttgcttatccattaccacaggcttcttcctcttacatgcatggaggaaatccctctggttcagttgtaatggttagtggattacatcaactaaaaatgaattgttcaagagtcttcaacctgttctgcttatatggaaatattgagaaggtaaaatttatgaagaccattcctggtacagcactggtagaaatgggtgatgagtatgctgtagaaagagctgtcacacaccttaataatgtcaaattatttgggaaaagacttaatgtttgcgtgtctaaacaacattcagttgttccaagtcaaatatttgagctggaggatggtaccagcagctacaaagattttgcaatgagcaaaaataatcgctttacaagtgctggccaagcatctaagaatataatccagccaccctcctgtgttttgcattattataatgttccattgtgtgtcacagaagagaccttcacaaagttgtgtaatgaccatgaagttcttacattcatcaaatataaagtgtttgatgcaaaaccttcagccaaaacactttctgggctattagaatgggagtgcaaaactgatgcagtagaagcccttacggcactgaatcactatcagataagagtgccgaatggttccaatccctatacattgaagctttgcttttctacatcatcccatttataagaagagaagagcatgttagaatttatgttcacctttattacaatttcaaagctacacttcattaaaaaaaaatctaaaatggttgatctcatgttgccttgcttactttaagatcctgttctgtaataaacatattttgccttgagtaaaaaaaaaaaaaaaaaaaaaaa

SEQ ID NO: 4576 - protein, 542 aa, Homo sapien
MSSSSSSPRETYEEDREYESQAKRLKTEEGEIDYSAEEGENRREATPRGGGDGGGGGRSFSQPEAGGSHHKVSVSPVVHVRGLCESVVEADLVEALEKFGTICYVMMMPFKRQALVEFENIDSAKECVTFAADEPVYIAGQQAFFNYSTSKRITRPGNTDDPSGGNKVLLLSIQNPLYPITVDVLYTVCNPVGKVQRIVIFKRNGIQAMVEFESVLCAQKAKAALNGADIYAGCCTLKIEYARPTRLNVIRNDNDSWDYTKPYLGRRDRGKGRQRQAILGEHPSSFRHDGYGSHGPLLPLPSRYRMGSRDTPELVAYPLPQASSSYMHGGNPSGSVVMVSGLHQLKMNCSRVFNLFCLYGNIEKVKFMKTIPGTALVEMGDEYAVERAVTHLNNVKLFGKRLNVCVSKQHSVVPSQIFELEDGTSSYKDFAMSKNNRFTSAGQASKNIIQPPSCVLHYYNVPLCVTEETFTKLCNDHEVLTFIKYKVFDAKPSAKTLSGLLEWECKTDAVEALTALNHYQIRVPNGSNPYTLKLCFSTSSHL

SEQ ID NO: 4577 - DNA, 3362 bp, Homo sapien
ggcgggcgagcaagcgagcggcgtctccaccagcatctgccgcggccgcctttgcccgaagcccggggacgaaccgacggaccgaccgcctggcgcacggacgcgggcgctcgctttgtgttcggggctagcgtcggcgaggcttgagcttgcagcgcgcggcttccctgctttctcgcggccaccccggctccggcggcctcggcgcgcgaggggctggaggtgcgggagccgctctccgccggtcggtccccgcgcggctgagcccaggccgccagcgccgcggccccgtgcggtgtccctgagctcctgctccccgccgggctgctccgagcaacggtgcttcggagctccaaactcgggctgccggggcaagtgtcttcatgaacccagaggatgtccgggaagcactacaagggtcctgaagtcagttgttgcatcaaatacttcatatttggcttcaatgtcatattttggtttttgggaataacatttcttggaattggactgtgggcatggaatgaaaaaggagttctgtccaacatctcttccatcaccgatctcggcggctttgacccagtttggctcttccttgtggtgggaggagtgatgttcattttgggatttgcagggtgcattggagcgctacgggaaaacactttccttctcaagtttttttctgtgttcctgggaattattttcttcctggagctcactgccggagttctagcatttgttttcaaagactggatcaaagaccagctgtatttctttataaacaacaacatcagagcatatcgggatgacattgatttgcaaaacctcatagacttcacccaggaatattggcagtgctgtggggcttttggagctgatgattggaacctaaatatttacttcaattgcacagattccaatgcaagtcgagagcgatgtggcgttccattctcctgctgcactaaagatcccgcagaagatgtcatcaacactcagtgtggctatgatgccaggcaaaaaccagaagttgaccagcagattgtaatctacacgaaaggctgtgtgccccagtttgagaagtggttgcaggacaatttaaccatcgttgctggtattttcataggcattgcattgctgcagatatttgggatatgcctggcccagaatttggttagcgatatcgaagctgtcagggcgagctggtagaccccctgcaaccgctgctgcaagacactggacagacccagctttcgggaccctcccgcgtgccgaactgatcttcgagctgcatggacctaatcacagatgcagcctgcagtctcgcctaatggagctgccattaggggagtgtaaaactgggaaatgctgctcactgacagaattaaaaaaaaaaataaccagtatgaaagtcgttgcgccgtgaatctctactgtagccatgaatttatggacagttagatgcttaccaaaaaagaaaaaaagggagggtaggggacccagatgtacttgaatgtgcagaaaatacattcttgtcctcatcttccgtaattggagggctgggagaggcagctttgctcttcaccacaccttggacggaccaccttctttctgttccatggcctgaaggagtgcatctcctcaaagactcagcccctcacctgggagggcagtggtttgtgggcatccctccatgtacattttaggaaacacttgcaactctcatctgaagaagaaaacaactcatctttgggttcagattttgtgatggtattcagcaagtcacttgggcgagcacacttggtctatcctggaaagtctccttataagagaagttgtgtatttcatgtgcaccgagcaagggcattggaagacgtcatgaggctgtattttagcaggactgatcgtttttctaagtagacctgagctttgtttatcagtgaaattcaaggagaaaatgaggttaatgaagaggtatcagttaaatatccccttcttctcaccctgccaaaattagcagttggatttttggaaactctggaatattctgggtcattttgttttgtatgtttgttgtttttcgtcttccaaaggtgaaagctatgatacagttccacttaaattttagtgttttcttactcagctcaagcattaatttttgattaagtcttaatctgcatgacctgtgaatctgaatccatcatctccctttcctgccagcttttctacaaacattgaaatatgttatttggtcagcacttatttcctaggttcacagccttgggaggttgtggcatgtcctcccagtctggctgggaagagaccagctgtaccatccaaatgcttccctggtcttgatgatctcttccagagtcgatctgagtggccttttctgcaccctccccttctttctctttgaatggaattaaacccaatttggaaacaacattgacccagtcaaaagcttctaatggtttctttttcttcctccagttttagtttgcttttattaaaaaaagaaaatagtgcatggccatagctccttcagttctcttattgcagactaaccatcaggatggtatcaaagcacaaatactttggaggggaatgcgttgaactggggcaagtactctgtaacacaaagtgggaaaccacttcctggtgctgccgctcctgcccccactttaggtgggagggacgagttttgccctctagattttaatccagctggtgtccaccggatgttgccctcctggggagcagatatcagtctgtggaactctgggaaaaccacaggcacatttttcggtgcggacagatttgccagcacataactgggcagccagctagaatactttgtggaaattaagcgaggttttccatttcagccccatggtgcatggtggtggccgatgaatgtgtcagtctgctcagagaaaggacaaaaaggaaattattttcaaaactgtgttcactgtttgggtgtgtgtatggctctgcatgtgtgtgtttttgtctctgtataggtagaggtattcacatcttactccgactgtaaggttgtcttacttcatctctgcccccaccacagttgccattttgtaatgtccttccaacatggagaagacacgagctctctccagttggcatcatttgtcttttttgttgattgcctcattctccagtgaactccatctggccaattgattcagaatcaggcaagatccctgccctttggcacatccactgaaaggccaaacagcaagtccgagtgagttttaaatattaattaatcaccctttattttttacacttgagagtgattgtaataaaggctgtcattaataaacttggttctaccttaaaaa

SEQ ID NO: 4578 - protein, 268 aa, Homo sapien
MSGKHYKGPEVSCCIKYFIFGFNVIFWFLGITFLGIGLWAWNEKGVLSNISSITDLGGFDPVWLFLVVGGVMFILGFAGCIGALRENTFLLKFFSVFLGIIFFLELTAGVLAFVFKDWIKDQLYFFINNNIRAYRDDIDLQNLIDFTQEYWQCCGAFGADDWNLNIYFNCTDSNASRERCGVPFSCCTKDPAEDVINTQCGYDARQKPEVDQQIVIYTKGCVPQFEKWLQDNLTIVAGIFIGIALLQIFGICLAQNLVSDIEAVRASW

SEQ ID NO: 4579 - DNA, 1961 bp, Homo sapien
gggaacccacaggcgcgcgcgccgctgcttctggccgggcgcgggtcgtggtgcaccacgggagcgccgcaccggccggcatggaggagcgcggcgattccgagccgacccccggctgcagcggcctgggtccgggcggtgttcgcggctttggcgacggcggtggagctccttcgtgggcccctgaggacgcctggatgggcactcaccctaagtatctagaaatgatggaattagatataggagatgccacccaagtttatgtagcgttcttggtttacctggacctcatggaaagcaaaagctggcatgaagtaaactgtgtaggattaccagaactccagctcatctgccttgttggtactgagatagaaggggaggggttacagactgtggtgcctacccccatcactgcttccctcagccataacaggataagggagatcttgaaggcatctcgaaagttgcaaggtgatccagatttgccgatgtcttttactttggccatagtggagtctgattctacaatagtctattataaacttactgatggatttatgctgccagaccctcagaatatttctcttagaagatgacatccatgtttcctgatgcttgttttattcatacaagattggatttgagacccatcagactgcttcatcttttatctcagaaatagggttgacgtacatagtgagggttgacttccccattccataaggttttcattctgaagagtaaaacttccccaggtagaagactttctccttcttaaaaaatatagggtgatttctttaaaactttgttatctagagacagtttaattacagttatatacaggtttatgcctaggatgtattcagatgggtgggacctgtgtgctgcttttgtcatcccacactcaaagttgtctctttgtttcttgctgccactgccagctcattgttgagactgccatttctttctcttactcagctctccccagtgccttttggccactgcagctaccgtagaatggcattttatatgtaccttgtcacccacttctgtttactttttcctctccagtaaaaagtaaaagatttctttcaattggtcttcccattgcagttactgttatttctcttttttggttaactttaaatcaaaactcaaaatatgttcatccagagtgtgtcttaagtaacttacgtgtcttaagtaacagggaccagagacatgttacctacaagagttctgggctatccttttcattcttatcacatatcatagcttgaatattacaacagtgtgggagagaatcaaccgtaaaaatgtcttcattaattagacccagttattccacttttgttaatgtctctcaaattgtacaaagtataaaaaattatatgcacaaagatgttccaagtgacattacttttagtagcccaaattataaaccactttaaagtttggggtaaagattggcaaactttttctataaagggccagaaagtaactattttaggtttttaaacctactgtctctgtcataacttgtcaacactgctgtatgaagcacaaaagcagccatagacaatacataaacaatacgggcgtggctttgttccagtaaaactttgtttacaaatgtggtgccatagtttgtcatccctgggtctaggaaatagtcaataaacagatatatacaaatgatacataatgtacttattaaaaattagtaatgaatattattaaaaacatgaaaatattaccttaagtaaaaattgcaagacggaaaagtgtataagtgggtgtaatcatggctgaaataacagaccaagcatatgataaaaagataacaaagtaaatcaaattactaactggttatagtgggataggaggcagaaaatggatgactttgtcttttctcaatgtttttatttgtattttataataaaaatgttttaaaattaaaa

SEQ ID NO: 4580 - DNA, 1943 bp, Homo sapien
agcgtggggtgcgggtcgtggtgcaccacgggagcgccgcaccggccggcatggaggagcgcggcgattccgagccgacccccggctgcagcggcctgggtccgggcggtgttcgcggctttggcgacggcggtggagctccttcgtgggcccctgaggacgcctggatgggcactcaccctaagtatctagaaatgatggaattagatataggagatgccacccaagtttatgtagcgttcttggtttacctggacctcatggaaagcaaaagctggcatgaagtaaactgtgtaggattaccagaactccagctcatctgccttgttggtactgagatagaaggggaggggttacagactgtggtgcctacccccatcactgcttccctcagccataacaggataagggagatcttgaaggcatctcgaaagttgcaaggtgatccagatttgccgatgtcttttactttggccatagtggagtctgattctacaatagtctattataaacttactgatggatttatgctgccagaccctcagaatatttctcttagaagatgacatccatgtttcctgatgcttgttttattcatacaagattggatttgagacccatcagactgcttcatcttttatctcagaaatagggttgacgtacatagtgagggttgacttccccattccataaggttttcattctgaagagtaaaacttccccaggtagaagactttctccttcttaaaaaatatagggtgatttctttaaaactttgttatctagagacagtttaattacagttatatacaggtttatgcctaggatgtattcagatgggtgggacctgtgtgctgcttttgtcatcccacactcaaagttgtctctttgtttcttgctgccactgccagctcattgttgagactgccatttctttctcttactcagctctccccagtgccttttggccactgcagctaccgtagaatggcattttatatgtaccttgtcacccacttctgtttactttttcctctccagtaaaaagtaaaagatttctttcaattggtcttcccattgcagttactgttatttctcttttttggttaactttaaatcaaaactcaaaatatgttcatccagagtgtgtcttaagtaacttacgtgtcttaagtaacagggaccagagacatgttacctacaagagttctgggctatccttttcattcttatcacatatcatagcttgaatattacaacagtgtgggagagaatcaaccgtaaaaatgtcttcattaattagacccagttattccacttttgttaatgtctctcaaattgtacaaagtataaaaaattatatgcacaaagatgttccaagtgacattacttttagtagcccaaattataaaccactttaaagtttggggtaaagattggcaaactttttctataaagggccagaaagtaactattttaggtttttaaacctactgtctctgtcataacttgtcaacactgctgtatgaagcacaaaagcagccatagacaatacataaacaatacgggcgtggctttgttccagtaaaactttgtttacaaatgtggtgccatagtttgtcatccctgggtctaggaaatagtcaataaacagatatatacaaatgatacataatgtacttattaaaaattagtaatgaatattattaaaaacatgaaaatattaccttaagtaaaaattgcaagacggaaaagtgtataagtgggtgtaatcatggctgaaataacagaccaagcatatgataaaaagataacaaagtaaatcaaattactaactggttatagtgggataggaggcagaaaatggatgactttgtcttttctcaatgtttttatttgtattttataataaaaatgttttaaaattaaaaaaaaaaaaaaaa

SEQ ID NO: 4581 - protein, 171 aa, Homo sapien
MEERGDSEPTPGCSGLGPGGVRGFGDGGGAPSWAPEDAWMGTHPKYLEMMELDIGDATQVYVAFLVYLDLMESKSWHEVNCVGLPELQLICLVGTEIEGEGLQTVVPTPITASLSHNRIREILKASRKLQGDPDLPMSFTLAIVESDSTIVYYKLTDGFMLPDPQNISLRR

SEQ ID NO: 4582 - DNA, 2207 bp, Homo sapien
gcggccgcgaattcggcacgagggggccacaagagcccttcctgcagggaacctcaggcttcagagagccgaaaagttgggaggcgtaaccacttacaggccggaagtgtccggggtggacgcattcgggtagccgaagaagtcccaggattgccgaagaagtcccaggatttccgaagcgagccgaagcatcgcgacagttttcagagacagctgatcggttggagctgttgcgccgagcagtcatggcggcggccagagctactacgccggccgatggcgaggagcccgccccggaggctgaggctctggccgcaacccgggaacggagcagccgcttcttgagcggcctggagctggtgaagcagggtgccgaggcgcgcgtgttccgtggccgcttccagggccgcgcggcggtgatcaagcaccgcttccccaagggctaccggcacccggcgctggaggcgcggcttggcagacggcggacggtgcaggaggcccgggcgctcctccgctgtcgccgcgctggaatatctgccccagttgtcttttttgtggactatgcttccaactgcttatatatggaagaaattgaaggctcagtgactgttcgagattatattcagtccactatggagactgaaaaaactccccagggtctctccaacttagccaagacaattgggcaggttttggctcgaatgcacgatgaagacctcattcatggtgatctcaccacctccaacatgctcctgaaaccccccctggaacagctgaacattgtgctcatagactttgggctgagtttcatttcagcacttccagaggataagggagtagacctctatgtcctggagaaggccttcctcagtacccatcccaacactgaaactgtgtttgaagcctttctgaagagctactccacctcctccaaaaaggccaggccagtgctaaaaaaattagatgaagtgcgcctgagaggaagaaagaggtccatggttgggtagaagaatgtgtatgacaaccacacacagtgaagctcttttttcaaagtaaatttgaagaaatgctacaagtatgagatgagatctaagtaaaggtgttaagatatttttaagtggtatgtgatcgtgtcattatcatctgcacttcactcaagagcttactatgtgtctaagtcatgttctaggcagaattgggtatttaaagtaaattgaggacaggcttctcccagattgtgacatgtatatctcagatacatgggtgtggcattgaaccacataatgagaacattattctctttttagtccttgtgagacaaggatgaagtctcagttgctgatactcgctgagcttactggccctctaacccagtgtttttttttgttgttgttgtgtacatgttatatttattttgaaaccagtttaatgggatacaaccagcattttaaaaaatgaaatagaatacagcatggaaaatatcagtgtattgttttatgaaactttcacgtgtatatatagaccaaggatatgtgctgagttttgatgtcaaatatatttctctttcagggtcatgatcaaaaaatgaaaagtctgcttaactccaatttctcttttaaaaaagcagacttacagctttcaggcaactgaaattcatgttaacatgtttttatttttattgctttgtatttttgtggttaccttctaagacaagtgattgatctaaagttccttttaagtttataccgctaaacaaactgagttgatttctatcacaggcagtaagtaggtagagcaaaaatggtgaagtgacttgtgaagactgaagtttgatgaagtctggtttaaggcacaggtaaactgagtgtggatgcaaaagtaccaggagctagcttttaaccttgcccagcctcagtttcttttcttagaagaagctatgtttgggtgggaagggaagagagggataagaaaatacctttcttccttgtaaactccaatcaacaaacatattttgagtgccttttgtgttccttggcaccctgttgggtattgggtacttggcaccctgttgggtattgggtacaatggtgagccagacagacacagcgcctgtccttttgtaagaatatttatttttataaaaaagtataaagtataaaaaaaaaaaaaaaaaaaaaaaaaaaaaaaaaaaaaaaaaaaaaaaaaaa

SEQ ID NO: 4583 - protein, 253 aa, Homo sapien
MAAARATTPADGEEPAPEAEALAATRERSSRFLSGLELVKQGAEARVFRGRFQGRAAVIKHRFPKGYRHPALEARLGRRRTVQEARALLRCRRAGISAPVVFFVDYASNCLYMEEIEGSVTVRDYIQSTMETEKTPQGLSNLAKTIGQVLARMHDEDLIHGDLTTSNMLLKPPLEQLNIVLIDFGLSFISALPEDKGVDLYVLEKAFLSTHPNTETVFEAFLKSYSTSSKKARPVLKKLDEVRLRGRKRSMVG

SEQ ID NO: 4584 - DNA, 3693 bp, Homo sapien
cgcgccccgggctcggccgacccggcggggatctaggggtgggcgacttcgcgggaccgtggcgcatgtttcctgggagttactgatcatcttctttgaagaaacatgaagttacactatgttgctgtgcttactctagccatcctgatgttcctgacatggcttccagaatcactgagctgtaacaaagcactctgtgctagtgatgtgagcaaatgcctcattcaggagctctgccagtgccggccgggagaaggcaattgctcctgctgtaaggagtgcatgctgtgtcttggggccctttgggacgagtgctgtgactgtgttggtatgtgtaatcctcgaaattatagtgacacacctccaacttcaaagagcacagtggaggagctgcatgaaccgatcccttctctcttccgggcactcacagaaggagatactcagttgaattggaacatcgtttctttccctgttgcagaagaactttcacatcatgagaatctggtttcatttttagaaactgtgaaccagccacaccaccagaatgtgtctgtccccagcaataatgttcacgcgccttattccagtgacaaagaacacatgtgtactgtggtttattttgatgactgcatgtccatacatcagtgtaaaatatcctgtgagtccatgggagcatccaaatatcgctggtttcataatgcctgctgcgagtgcattggtccagaatgtattgactatggtagtaaaactgtcaaatgtatgaactgcatgttttaaagaagacaaatgcaaaccaaagcaacttagtaaaataataggtataaaaagttattctgtaagtctgttggttgtatcttgtatcagaatcccagtaagttaagttgtaaagactttggaataagtttcttttaaaaatatgacatagccagtgatgtgtttaattatataactgttcttactgattttattgccccctagcaataagccctttcctttgaatacatgtacaactttggtcatatgagaagcaggtgcgcagagaattccttgaaagatctgaggtttttaacataaagtctgatgtggttttcctctagcattccaaaaggtttttgctttgaaagtgttagcagaagcatgttgatgtgaattatgatttcttcatgtgctactgttagcacactgagtttttatagttgcacatcattcctcattgtgccttgttttatccattttataaatagagtagatatttgatataccactctgataactcatataaaaatatcatcataaaaagcttaatttcatcccttttatgttggttttaaaaggtaaatgcttaccatattttataattgagaactcttacatagtagaatccattctataatacatgtgttgacaaagctttagagaaagtttcctattctcttccatttcccctgcccaaagtgctgacataggcagtgatgaagaatctttaccaagattttcagggtgtacctatgaaattgctttaaatgcactgctggtgtaaataattagcaagcaaaagcgtttctgtgacttcaggtaccagcttaaagagcactagggatggggaacgaatgccaaatcagactccacctagagcaccaggaaacagcttgtaccctggtagggaaatggtgtcgctgaaaggggaggctgagccagtgcgagactgaacttgtgcagccttagccaagacaaagcagtgtttttcagcagacggctgatgggacaggaattgaagaagagaattgactcgtatgaacaggacagggtgaaaatgctgggaattataatgggaaacaaaactatctatgttcatattttgtaatatttcatttgttaagtttatatctggatataatgttctttttaaacaagtataatcatatcgtcggaggttaagattatgaaattttaaaatctctattcaagatgatgttcactccaaatacactacagaatttagtcaacattttatataatgtttcaataaatgtttctttcaataaagatactatgtgcccttcatagtaataaaatctcaatcttaaagcatgaatctaaaacataaatatttatattacagactcaattttacaaaattactaattgctctagtgcatatttgaactacaagcaactttttaggaatacctctttatacgtctacatattttagtatataaaaatagataatgctcttggacacattttgtattattcatgatctgaatagtagttagttaaaagatcatttgtaatattatgatcaactgttataaattaaggtcttaataccttttctgctctttcaaataactctaatgaatattcaagatattttagccttttaaaaagttgagatttagctcatggatatattttttggtagggaaacattagggtctccttttcttccttttacctagaatgcctcatttaaaagtgccttgaaaacatttagctccccttcttcatgagcatctgtagagctgaaagtattctggaactttagacagaaagctgaaaggaatctgcagtctcctgctgcagttcaactctgctgtttttcagtcatttcctactgtgagtggagtgatgtttgtgtgtgtgttggcaacatgcctaatgttttcttaatgatgacaacaaatattttaaaactgcatttatcattttttaggtcttcattaaattttaaaatgtaatatctgtttcccaccccctacattaggaggataatttcttaaaccacattgttttaattgatttttcttatcttgatttctttcattagaaactatccctaaatgtaaagatcttttgccttcaaatttggcttattttttctgatttatgagggtttgaaagaaagaattcacctaaaagattccatttccagttttataatgtatttcaggttctgaataacaatatttttccaaattgaaagtaaatattcaagaagttgatagcctggttaaaagttagatcctctattaccattctaagcacattcacttctatattgaagttttggtaaaaattcttttttcttttttaataaaaaattaggttattactttttttataaccagatttttaaagcactaggttttaaatcagtgggtatcataaaagccatatataaaagatcctttcttatagtaagacttgtgcttgttagcaggtttttctgttagtttttcccccataacatttaattattactaaaattgtatttacaatagtggtgccaaatcaaatggtaatttaaataaaatctattctgtgtttatgtagggtggtataaaaaagaggtcttcatttagacatgtgatttctaaaattccagaaagcaaaattgataagatgttagaaatttggaccgttatttataatcagggtagcattaaaatggagaaaagaaagttttctgaaaaaatgcagtaaatataagccacatttctaaagtttatttttatgaaagcttcttttaagattttgaaatctattctgcattcccaagagtttatgtttattgtattttatatgatctacaacatataaaattgtgtatttttctttggttgtccctattaacaaaaaagtattttaataaaaaattgaaatgaaaaaaaaaaaaaaaaaaaaaaa

SEQ ID NO: 4585 - protein, 223 aa, Homo sapien
MKLHYVAVLTLAILMFLTWLPESLSCNKALCASDVSKCLIQELCQCRPGEGNCSCCKECMLCLGALWDECCDCVGMCNPRNYSDTPPTSKSTVEELHEPIPSLFRALTEGDTQLNWNIVSFPVAEELSHHENLVSFLETVNQPHHQNVSVPSNNVHAPYSSDKEHMCTVVYFDDCMSIHQCKISCESMGASKYRWFHNACCECIGPECIDYGSKTVKCMNCMF

SEQ ID NO: 4586 - DNA, 2001 bp, Homo sapien
gtccgcttctctctgctcttcgactgcaccgcactcgcgcgtgaccctgactccccctagtcagctcagcggtgctgccatggcgtggcggcggcgcgaagccagcgtcggggctcgcggcgtgttggctctggcgttgctcgccctggccctgtgcgtgcccggggcccggggccgggctctcgagtggttctcggccgtggtaaacatcgagtacgtggacccgcagaccaacctgacggtgtggagcgtctcggagagtggccgcttcggcgacagctcgcccaaggagggcgcgcatggcctggtgggcgtcccgtgggcgcccggcggagacctcgagggctgcgcgcccgacacgcgcttcttcgtgcccgagcccggcggccgaggggccgcgccctgggtcgccctggtggctcgtgggggctgcaccttcaaggacaaggtgctggtggcggcgcggaggaacgcctcggccgtcgtcctctacaatgaggagcgctacgggaacatcaccttgcccatgtctcacgcgggaacaggaaatatagtggtcattatgattagctatccaaaaggaagagaaattttggagctggtgcaaaaaggaattccagtaacgatgaccataggggttggcacccggcatgtacaggagttcatcagcggtcagtctgtggtgtttgtggccattgccttcatcaccatgatgattatctcgttagcctggctaatattttactatatacagcgtttcctatatactggctctcagattggaagtcagagccatagaaaagaaactaagaaagttattggccagcttctacttcatactgtaaagcatggagaaaagggaattgatgttgatgctgaaaattgtgcagtgtgtattgaaaatttcaaagtaaaggatattattagaattctgccatgcaagcatatttttcatagaatatgcattgacccatggcttttggatcaccgaacatgtccaatgtgtaaacttgatgtcatcaaagccctaggatattggggagagcctggggatgtacaggagatgcctgctccagaatctcctcctggaagggatccagctgcaaatttgagtctagctttaccagatgatgacggaagtgatgagagcagtccaccatcagcctcccctgctgaatctgagccacagtgtgatcccagctttaaaggagatgcaggagaaaatacggcattgctagaagccggcaggagtgactctcggcatggaggacccatctcctagcacacgtgcccactgaagtggcaccaacagaagtttggcttgaactaaaggacattttattttttttactttagcacataatttgtatatttgaaaataatgtatattattttacctattagattctgatttgatatacaaaggactaagatattttcttcttgaagagacttttcgattagtcctcatatatttatctactaaaatagagtgtttaccatgaacagtgtgttgcttcagactattacaaagacaactggggcaggtactctaatataaaggacaggtggtgtttctaaataattggctgctatggttctgtaaaaaccagttaattctatttttcaaggtttttggcaaagcacatcaatgttagactagttgaagtggaattgtataattcaattcgataattgatctcatgggctttccctggaggaaaggttttttttgttgttttttttttaagaacttgaaacttgtaaactgagatgtctgtagcttttttgcccatctgtagtgtatgtgaagatttcaaaacctgagagcactttttctttgtttagaattatgagaaaggcactagatgactttaggatttgcatttttccctttattgcctcatttcttgtgacgccttgttggggagggaaatctgtttattttttcctacaaataaaaagctaagattctatatcgcaaaaaaaaaaaaaaaaaaa

SEQ ID NO: 4587 - DNA, 4591 bp, Homo sapien
  Unsure 4562-4575: Unknown base
  Unsure 4585: Unknown base
gggggggttttgtgtaggaaaaccataattgttgattttaaatacaggtacctgccaccggtaattagcatgtaaagctttgtctatattccttcctccaacttgggttcaatcagaagatacttgttggaatgaactgaagaaacttcccttttgatagattgaactgaaactgcttattgtatgtggttatatttggtaaaagttgcgtgtgagctttttacaaaagggtaagaattgtgttgaattttaattcacttgtataagaaaacaatttaaaactctcataataggtcttaaatatttttacttgctattctccctcagtgatatatacctcttcctttccagctttatgaaacatctatttaagatttaaagttatcagtgatcatagtttggagataaaatttgacccaggaatgaatatttattttaattaggttttcatacttattaaatgtaattaaagacttgggtcttgtctgagttcagtggaattgaaaccacaactttaatttccttacagaaaaacttaatttgtttcttttagtgccacaccttaaaaagaaaccccaaactagctcctcaggaatatagttttattttgcaagcataccatctagctgaaattgtatacacatgaatatatgtagacttttcctgttgggctgaagtgtgtgcttataaatgtgtttagtttttaagctaaacattcagttaacagtctgtgcattgattagcatagggcaggtggtgaggacctggatttttattaaacagtttagtaattataaaagtttcttgtgtttactagtaaagaattttaaaaatctattctaattcaacaagtttttaaaatcaactttgtaatttgaggggaaaatttggggggaagaggtgggtgggccactaagttacctctctttcatttggtggcccttccaggccattgaaaataaagacgttggctccagtttgcacattgggaagaaagcatagaaatttgacttgtatattaaaaataatagaaatgtaatatgtatattaagaatgcataggtctgtattctgtaaggggctctgaagaacaatatggcactgctgtgttcagtgtgaattcactgcctgggagaactgcaggaatgcttgtcttcaccattgtgttcttacaacgaattcaactttccatggtttatcttgacaaaatttacatgtgtttaggttacttgtatattgatatatttttttaatcttcagtttttgtcttccttttgcctttgtgttttcagaagtaacacatgaacactttttaaagtacattacagagaagaaaactgtgagctattatatagtgtttcttttttaacacaaatcttttaactttaaaaaaaggcaaaaatttttttttctacttcccacccagcttaccaccttgatctctttaacttatgttctaaactttggtgttaatggtggtgtctagcatgctagtagttagattttatttagatgccataactggtaatacagcttttattttgactatattaatttagttttttgaggggaagtttgtttattctgtgactctcaaagcacacagaggttttaaaatatatattattaagactgacgagaagaggaaatgggagggagtaacatcacagaagtgctgttgttcaactgttcttcaatatagttgctagtaggtttgtatttactcagtaaggaagtcagtgacctgaactacctataaaaattcagcagtgctgcagtgttgcttaagtgaaaccctttggctatctagtagtttttatgctactgaaacttggattactgtatgatattcagcttgtcttgggccctctatgtagacaaacattcatattcatagtagtgttgtatactggcctgtttttataactttatttttcaaatattaacaaccactgctttcagagtggttattttgttatttttgaagcaggaaataaccatttgtatttgcacctgcgtattgcatatgaattatggtatacttggcaaatgcttttcttttacctgtgaaaattctgaaagctggtccaagctacattgcataccaaattgtgctcttatatattatttgcatcgtgtcctttttaatcaaatagcatgttttagttttattatagtagcttttgctgtaagaatgtcacttgcttatcttttattgtacttgaattcttaatcatgcttttaacattgtatttaacaaatcatttcgtattaggttccattaaaatgtcattcctttgaaaaggcaagggatttccactttcagaatttgaaaatgaaagtagcatgtttatctaaaggcagaaaatagttcggacttggtattatgaaaataagtaatggtttctggagaggatttgtttagatttgcacagatggcgatggcaccttttacttaaattaacattaatcaacagtgctaaggaaaatttacacaaaattacaagataaaacatggaaatgtgtgcctttcagtatacaaactcttgcttggtggccatttgggtaatcagaccatttgaatgcctgagagcatgtttaatttctgtggagtgccacatatggctaaaacaactctttaatgtgcaattaatttctagagtaaaatgtctgttatgtgagggggatctttatgttgggcttttctattttttaaatgttcacatttctttctgttaattaaaatgccatcataatgtcacatttacactgttgcctcttttaaaagcaaagccactttcttgttctaagattacatcaagacttgagcagtgtgtagtaattaaaatgtgtgcttaatgagcataatagattctggttttaggaaataacatatagcttttatatgaatattttcttttgctataatgaaagtcacagattttttttttcctggcttttatggaggaatgaaaagagttgtctccctctaagagtatactatttttgattctcatagcaataatgtcaccattcttatcagagggtaaataccccttgtataggaaaacagacataatttcctcttgggagttctctttatgacttagcattttcttctacttgagaaaattcctgtttttccgattatttcatcttgaactttcttttttttaagcttttgtgcaatgtaatagtttgttgatccatctttgtacattttcattttatttcatgtctttctctcacctacctgtcagaatcagctatagcagattttgaattctttagttaaaaaatagttgctttacttgtttcctcatgagtttgttaaatagctttgcattttagtcctctattatgctatgaaaattattacgaagtttatattgttccctttttaagcctgccttactcttgtcttttgtcattgtctatggtttaatgaagaacacaccaaactaacatttttgtttattttgaggaacaaaaaaacttttctcttttaagggaagttactacacattgagttagtaactactctttcagtcaaggttccttaatcagtccagtctacatcaggactatgacttggggggcggggctaatcctttttgctgttctgagctactattgtcaactgctgttgtacatactgttatgtgtaatggcgtaaatatatttattatgtttgtaaaattcattgcagatcaaggttgctcttctgtgatatatgggatattatgttttaaagaccatcttggaatacaattagagaacttagtattttgatgtactaagacctattttaagtttaatattctactttgcaaaaactttaattaaagatgttatttaaaaaaaaatgttgcttgctttgcttactagtatatggcattgttatagataattgaataaaatacaatttagaaaggaaaatgctttacattgttaatgagaattccatttaacaacaacaaaaagatgctaaattctgtaccttaaagataagtagattgagatgtcaatttgaattagtaaactgtgttacaaatgattaatactagcttttaaaaagttgtattttccaggcacacaggaatttaggttgggcgaattcacactaacaaattataactaaaaattggtataattaacattgtttttcaaaataaagattactccttgtgaaatattaataattaacatattgtattaaataagtatttctactccaaagtatagattacttaggataaaaacattgttatttctctgtttagtcaaaccacttcctcttagttcagaggttataaataattgcatattaggagaattggattactgaggtttgtattgcgtattgaatatattttgtgttattttagaagataataattagcaggtattttaattttatagttaattcagctgaatcattaagaagctcgcctttttgtatttttttatcctgttaacagactatctagaaaacatgcaaattttaactattaacataatcataataaagatatcttatttattgccagcaaaaaaaaaaannnnnnnnnnnnnnaaaaaaaaangggggg

SEQ ID NO: 4588 - protein, 31 aa, Homo sapien
  unsure 23: unknown amino acid
  unsure 24: unknown amino acid
  unsure 25: unknown amino acid
  unsure 26: unknown amino acid
  unsure 27: unknown amino acid
  unsure 31: unknown amino acid
MQILTINIIIIKISYLLPAKKKXXXXXKKKX

SEQ ID NO: 4589 - DNA, 2156 bp, Homo sapien
gcgcggacctttcaacaagggctttattaattctcacgctgcggccctggaaagcgatggaggtggcggctaattgctccctacgggtgaagagacctctgttggatccccgcttcgagggttacaagctctctcttgagccgctgccttgttaccagctggagcttgacgcagctgtggcagaggtaaaacttcgagatgatcaatatacactggaacacatgcatgcttttggaatgtataattacctgcactgtgattcatggtatcaagacagtgtctactatattgatacccttggaagaattatgaatttaacagtaatgctggacactgccttaggaaaaccacgagaggtgtttcgacttcctacagatttgacagcatgtgacaaccgtctttgtgcatctatccatttctcatcttctacctgggttaccttgtcagatggaactggaagattgtatgtcattggaacaggtgaacgtggaaatagcgcttctgaaaaatgggagattatgtttaatgaagaacttggggatccttttattataattcacagtatctcactgctaaatgctgaagaacattctatagctaccctacttcttcgaatagagaaagaggaattggatatgaaaggaagtggtttctatgtttctctggagtgggtcactatcagtaagaaaaatcaagataataaaaaatatgaaattattaagcgtgatattctccgtggaaagtcagtgccacattatgctgctattgagcctgatggaaatggtctaatgattgtatcctacaagtctttcacatttgttcaggctggtcaagatcttgaagaaaatatggatgaagacatatcagagaaaatcaaagaacctctgtattactggcaacagactgaagatgatttgacagtaaccatacggcttccagaagacagtactaaggaggacattcaaatacagtttttgcctgatcacatcaacattgtactgaaggatcaccagtttttagaaggaaaactctattcatctattgatcatgaaagcagtacatggataattaaagagagtaatagcttggagatttccttgattaagaagaatgaaggactgacctggccagagctagtaattggagataaacaaggggaacttataagagattcagcccagtgtgctgcaatagctgaacgtttgatgcatttgacctctgaagaactgaatccaaatccagataaagaaaaaccaccttgcaatgctcaagagttagaagaatgtgatattttctttgaagagagctccagtttatgcagatttgatggcaatacattaaaaactactcatgtggtgaatcttggaagcaaccagtaccttttctctgtcatagtggatcctaaagaaatgccctgcttctgtttgcgccatgatgttgatgccctactctggcaaccacactccagcaaacaagatgatatgtgggagcacatcgcaactttcaatgctttaggctatgtccaagcatcaaagagagacaaaaaattttttgcctgtgctccaaattactcgtatgcagccctttgtgagtgccttcgtcgagtattcatctatcgtcagcctgctcccatgtccactgtactttacaacagaaaggaaggcaggcaagtaggacaggttgctaagcagcaagtagcaagcctagaaaccaatgatcctattttaggatttcaggcaacaaatgagagattatttgttcttactaccaaaaacctctttttaataaaagtaaatacagagaattaattattctaacatattggcctctttgtactggaaaagtattcagtggtacctggaggtctggacagttatactgtaacctcttaagttttaatgtgctaaatatatcttgtatgattttttattttttaataacattggaaatatattcaagagattatgattctgtaaagctgtggaatgaagctgcagatttagagaacattggcttctgaaaaaaaaaaagagtgaagatagtactagcaagtatacttattttttaaaacaggctagaatctcatgttttatatgaaagatgtacaattcagtgtttaaaaataaaaatatttattgtgtaaaaaaaaaaaaaaa

SEQ ID NO: 4590 - protein, 601 aa, Homo sapien [sequence omitted]

SEQ ID NO: 4591 - DNA, 859 bp, Homo sapien
gtcctggggagattggaggggacggcagcgttctgcatgacggaggcgctgccgggccccgggtctgtgggggccgtgctctcagggcgtgtgcgggacgccacctgtgcacacctgctcagagcacggctcctcgcaggggtgaaggggcagaccaacgaaaccagatgagaccaacgacaccatgcgagacacgcttgcagacactgttgttttggaaatgtgcttccctccatctgaaatctcatccctccacccgcccactcgggcagctgtgccgtgggcagggcatgcgctcccctggctgagcaccccagagattctcctgcaccttcctcatgccgcacgctgctcatccgtctccatgtgtgtttagatccatgccattcactgactcactaacacctgcaaaatctttaaggaaaaaagctgaagggtacgaccatgcacatatgtgacctggaaaatgcaaatttagatcttttatgatttaattattattgtttcccatagaagttccctccctttgaaattaatatataatgtataaattctgcactgagccatggcggagctgggcagcccctaggttagagtggagacggaggcccaggcgcaggggtcacacctcatctggtttccttcccatctcacagcttagcttgtgcttctcaacaccaagtctttaagagcaataaaaactacaccatgaatgtttgaattttttttttttgggggggggagggtggattttgcttttcatccagaaggaaaaggggaggagagctcctttacattttttaaattaaattcataaatcccaaaaaaaaaaaaaaaaaaaaaaaaaaaaaaaaaaaaa

SEQ ID NO: 4592 - DNA, 563 bp, Homo sapien
ggcacgaggcgcgaaaggaaagaggtcgggagcgctcgcgagatctcggaccacccaacctgaaaggtgcttaggaagttgaaaggcccagaggaggcctccgggcaaatggccggagctggaccgaccatgctgctacgagaagagaatggctgttgcagtcggcgtcagagcagctccagtgctggggattcggacggagagcgcgaggactcggcggctgagcgcgcccgacagcagctagaggcgctgctcaacaagactatgcgcattcgcatgacagatggacggacactggtcggctgcttcctctgcactgaccgtgactgcaatgtcatcctgggctcggcgcaggagttcctcaagccgtcggattccttctctgccggggagccccgtgtgctgggcctggccatggtacccggacaccacatcgtttccattgaggtgcagagggagagtctgaccgggcctccgtatctctgaccacgatggcgcttacctttcagacttcattaaacttatgaccgaaaaaaaaaaaaaaaaaaaaaaaaaaaaaaaaa

SEQ ID NO: 4593 - protein, 125 aa, Homo sapien
MAGAGPTMLLREENGCCSRRQSSSSAGDSDGEREDSAAERARQQLEALLNKTMRIRMTDGRTLVGCFLCTDRDCNVILGSAQEFLKPSDSFSAGEPRVLGLAMVPGHHIVSIEVQRESLTGPPYL

SEQ ID NO: 4594 - DNA, 1196 bp, Homo sapien
gggcccctctctacagggggacacacaggcttagtttagtatatgtctaaccagattttgcatgtcaagcatttgtccttttcctggcttatgttttcttgtagaaattatataaaccctatcaaatccactactaggtaaatttttaaaccatgcagctttattactctcctcccccaaagaatgtagtttgaaattttctcatttccatagtagaggccctaactgccattgtattactaataatgcaacatgaaattgaaggtgcctaactgctcaaaaaacaaaatcagccatcatactgtaactctgagaggaatgagaggtggcacaggcacgagtgggctcagcccgtgtgagtgaggagaactgaggaatcctagggtgcgcatcctgcatcctggctgcacgtttgctgcagagtatgtttttctttcttgcctcccttcagttttcttcagttgcgttcagtgtatcttctggaaccaatagtgccctgtgttctcaagtctctaaaatgctaagatctgagcaaagtcaagcagcttacactaggctttttttacagctgtgcttgagaacatttccgagtggaccagggccttgaggagcctgtttttcagcaaattcaacagatgtgtgcagtgattccctccgttttgtatttgacaccttcatttaaaatgctaagatgcaatatcattcacttcaaagtggggaaaatgcagaattgtgtttcctttttatctgtgtgattccttaagaaacatgtttttaaaatatgtgttctaaatggttttttattctgtattactgctttggccatgtggctctcatgactttcattgtaccagattctcagctccctgaaacatggggacgagaagctctggaattacagcaagatttttgttccatgagcgcaatactgtatcattaacatttttaatggtatggattttatagcatctgtgtatgtttgcaaatattaagttattacatgttttaaaatgagcgtttttcatcttaaattttatatgtttgcaaatatatttttttaataaaatttcaaaaccaagttttagcacctactagagaacttactgagagagctcatttcaaattcatcagaatgcattgagctaaatccggaatgaaagcttgacagatcccaggaaattagactctgggaaaga

SEQ ID NO: 4595 - protein, 15 aa, Homo sapien
APLYRGTHRLSLVYV

SEQ ID NO: 4596 - DNA, 6055 bp, Homo sapien
gggtggcggggggttgcaagtgggaagcctgctgttcagctgcccgggctctccgcctccccccaccctgtattgaggctgggtctggggaacctgtgctcagcattccaccccctggagcttgggcttggtcttccctgcgggtccctgcgctgacattcaggcggggagccaggaggcctgggcgcctccagagcccgccgggggagccgggcgagggttctgggctctgacggcggggtcgcagggtcgcccgcctcctggacacgtctgtaggcctagggaagcctgccggcccgggaggtacagagtaggagaagccagatcccagggcggacaacgagaagtcgtcaggctaagaaatggcatttcaaaaggcagtgaaagggacgattcttgttggaggaggtgctcttgcaactgttttaggactttctcagtttgctcattacagaaggaaacaaatgaacctggcctatgttaaagcagcagactgcatttcagaaccagttaacagggagcctccttccagagaagctcagctactgactttgcaaaacacatctgaatttgatatccttgttattggaggaggagcaacaggaagtggctgtgcgctagatgctgtcaccagaggactaaaaacagcccttgtagaaagagatgatttctcatcagggaccagcagcagaagcactaaattgatccatggtggtgtgagatatctgcagaaggccatcatgaagttggatattgagcagtataggatggtaaaagaagcccttcatgagcgtgccaacctgctagaaattgctccccatttatcagctccattgcctataatgcttccagtttacaagtggtggcagttaccttactactgggtaggaatcaagctgtatgatttggttgcaggaagcaattgcctaaaaagcagttatgtcctcagcaaatcaagagcccttgaacatttcccaatgctccagaaggacaaactggtaggagcaattgtctactatgacggacaacataacgatgcacggatgaaccttgccattgctctgactgctgccaggtatggggctgccacagccaattacatggaggtagtgagcttgctcaagaagacagacccccagacagggaaagtgcatgtgagcggcgcacggtgcaaggatgtcctcacagggcaggaatttgacgtgagagccaaatgtgttatcaatgccacgggacctttcacggactctgtgcgcaaaatggatgataaagacgcagcagctatctgccagccaagtgctggtgtccatattgtgatgcctggttattacagcccagagagcatgggacttcttgacccagcgaccagtgatgggcgagttattttcttcttaccctggcaaaagatgacgatcgctggcactactgatactccaactgatgttacacaccatccaattccttcagaagaagatatcaacttcattttgaatgaagtgcgtaattacctgagttgtgatgttgaagtgagaagaggggatgtcctggcagcatggagtggaatccgtcctcttgttacagaccccaaatctgcagatactcagtctatctcccgaaatcatgttgttgatatcagtgagagtggccttattactatagcaggtggaaagtggacaacttatcggtctatggcagaagataccataaatgctgctgtcaaaactcataatttaaaagcaggaccaagtagaacagttgggcttttccttcaagggggtaaagattggagccccacactctacattaggcttgtgcaggattatggacttgaaagcgaggtggcacagcatcttgccgccacctatggtgataaggcctttgaggtggccaaaatggcaagtgtgactggcaaaaggtggcctattgttggagtacgtcttgtgtcagaatttccatatattgaagcagaggtgaaatatgggattaaggagtatgcctgcactgctgtggatatgatttcacgtcgtactcgcctggcctttctaaatgtccaggcagcagaggaagccctacccaggattgttgaactgatgggcagggaactgaattgggatgattataagaagcaggaacaacttgaaacagccaggaagtttctatattatgaaatgggctataaatctcgatcagaacagttaacagatcgctctgaaattagcctactgccttcagacattgacaggtataagaagagatttcataagtttgatgcagaccagaaaggctttattaccattgttgatgttcagcgtgtattagagagtatcaatgtccaaatggatgaaaatacactccatgaaattctaaatgaagttgatttgaataaaaatggacaggttgaactcaatgaatttttgcagctgatgagtgctattcaaaaaggaagggtatctggaagccggcttgctatactaatgaaaactgcagaagagaacctcgacagaagagttccaattccagtggaccgtagttgtggaggattgtgagtctgggcagtaaatccacagccaacaaacatagaaacgacaaatcaccatgtaacaaccagagatgactgaaaccactctgaaataatgaatgtggatagctgccttttttaacactagaaaacattccaaaactttaaggtgttggtgtatttgccagctttatttgctgtactttatttgtatttgccattcagtctagcttttaagtatatttttttctttttctcattttcaatgcacattagttttgcatctgttttgtgacctgttagatgtgacacattctctttttgtttattcccttattctaaatgagttctaaaaacataatattttggcaaaaattgaaaaaagctggagacattttgtgacatgcatacagatagcatgtgttattaaaaagagttgcctattgaaatgatcgtgtttctggagaaattaagcttatagacagcatgtgttattaaaaagagttacctattgaaatgatagtgtttctggagatttctcagccccatcttcctccagcttgtctaccttcctcatgcaaacaatattccacatttttatatctagagcatgactggctaactggagagggaaggaaaagtttagatctggttactggagcaagtctcaaagagaaactctgaaagcttccagaatcacaggtataagataaggatagcattgacatttgctgggagttacagtgatagtttcatctcagcagttcatttttttcttcagtcactgctggttttctttgactattatagttgccaggaagatccttgctcttcttactttaaaaccagcatttaagtggcaatttggatgtaataggatgagaccaaatttatctaattattacagtagtaatacatttaagagttaaaaatgtgtttttatatatccacatatgataacaaaagattcaattcccaagcctaaattttgaagcatgtggtattgtcaaatctagcttaccatcttttttgggggtacttgcaaccatagtaaaggaagatggaatagactttagttaactttaattataattatatgttaaataaggcacataaccagtttccaaggtcatcatggttgcttaaagtctttccccttctgtactccatggaaatattctcagtaaaccaaaaacaaaaatggaaaaataatcaccaacccccatcccgacacacacacacagtccaaagcaaaagtcagtgtgtattgaatttaacaagtaatgcagtttgggatgcttttgctacattttggtggcattttaactagttatctgaatatttattaatcgtacttcctcttgtaaagttaactacttacttttttgttgttgtttttttaacatcaggttctgtatctaataggagatgtaacactttatttcatggcaggtttttattgcagagacttgaagtcttagttttttaaactggcacataaaacactttttgctgttatttttatttatgtcaatactgcagagtatctttatgccttattcaagtggattctgagcctgtatgtcacaatgtaaacactggaggttcactcacctacgcactcacccaccacctctgaaagaaacagaaactgcagagaaagacagcatcttagctcattttgtttttaaatgaggttttagacgcttgccacttcctaagggaaatcctaaaacagagcaagtgatgctcccaggtatcactgtgaacttttttctttcaaagtgtgaatttttacactggctttttcatttttttaaagtaattgaagcttgtggctttacaacttagtgttttttgctatccagataacaagtttcattgtttagaacccagtgacacttaataggtagataaattgtcctttaaaatatcccagatgatatacacaatatggtacatttgtgctctctctctctgtttttctctctttctctttctagttagatcaagataacgatgacttgtaccctccctgattctgttacagtagggcccgggcagatctgtgtttgttaaacaggccttgtttgtgcatgctttgctatgaatgaagttcctttaaggacaaagaaaagcacacttttcttcttttgagcatatctgcttttactttaaatctgctaatttctaaaatgtagagtccttcaccaatcccagagactcaatttggaaatgaactgatttcaagccgttactgtcaataaagcaccccagcattttgtataagctcttaattaaacctgtacagcttctttacctgatttaagaaagggagacaagcaataggggggaataagcttcttcaaaattcattccaagcacaaaagaaattttttccctttgcatataaacttgacatcagttgattctgttggggtcggggtgggtatgcagggattgccttttattatcaagtgatttatttcaagagcctttgaggggattcaggtgaaggaacccccatctgtgctggagagttggatactcctttaaatagcccccaccacagtcataacaataatgataatgctggattatttgttaagccaaggttgtctgcctcatatccatcatgctgtttgcaatattcttgctttcaatcaatttatactgagtgtaactttaggatttctgctattaaatgcatgctctctatcctgcttcagtttctggctttgctttgtctgtttcaaaatatgtagcttcctcttttgtacaacaaaaaactcattctcacttttactaaatatactgtaggagtcatcattgatgttatttttctcttatgtatctgtaaagatttttggcatatgaatgtaatattaaagtcaatgatgctataacttgcgatgtttgcatcatgtcaacctttttgaaggagtgaaaaagccctactatgtttttaaatagcaagtgtaagctcagtgctagagtggatatacacaccgcatgttttcatatgtggcacttttatgtatcatgttgggttattgttctagactggactgttaaatactatgtttgaggctgggttgtcatttttataactgtcttggtgttttatggccattatttattacttttgatacacagaatgagctgcatgcatttatagagcaataagaggatgtatttaatgtgccttgtttttaactgaataagaactggaagcatgaatcaataaaactgattaaaatggtctatttgctagcattttgatgttacttgcagtcagataactttgattactgttgaagtttaaaaaaagtttgaaaatatttttacaaactgtgtttttgatgacacaaaagtgaaatatctacagagatagatgtaattttataagactgccagaattatttgtattaatttgttgctgtagcctttagggcatgacttctgtatttgtgcaatcctattctacaattacattcatcctattacaactcaaagaaaaacaaaaagtcgacgcgg

SEQ ID NO: 4597 - protein, 727 aa, Homo sapien
MAFQKAVKGTILVGGGALATVLGLSQFAHYRRKQMNLAYVKAADCISEPVNREPPSREAQLLTLQNTSEFDILVIGGGATGSGCALDAVTRGLKTALVERDDFSSGTSSRSTKLIHGGVRYLQKAIMKLDIEQYRMVKEALHERANLLEIAPHLSAPLPIMLPVYKWWQLPYYWVGIKLYDLVAGSNCLKSSYVLSKSRALEHFPMLQKDKLVGAIVYYDGQHNDARMNLAIALTAARYGAATANYMEVVSLLKKTDPQTGKVHVSGARCKDVLTGQEFDVRAKCVINATGPFTDSVRKMDDKDAAAICQPSAGVHIVMPGYYSPESMGLLDPATSDGRVIFFLPWQKMTIAGTTDTPTDVTHHPIPSEEDINFILNEVRNYLSCDVEVRRGDVLAAWSGIRPLVTDPKSADTQSISRNHVVDISESGLITIAGGKWTTYRSMAEDTINAAVKTHNLKAGPSRTVGLFLQGGKDWSPTLYIRLVQDYGLESEVAQHLAATYGDKAFEVAKMASVTGKRWPIVGVRLVSEFPYIEAEVKYGIKEYACTAVDMISRRTRLAFLNVQAAEEALPRIVELMGRELNWDDYKKQEQLETARKFLYYEMGYKSRSEQLTDRSEISLLPSDIDRYKKRFHKFDADQKGFITIVDVQRVLESINVQMDENTLHEILNEVDLNKNGQVELNEFLQLMSAIQKGRVSGSRLAILMKTAEENLDRRVPIPVDRSCGGL

SEQ ID NO: 4598 - DNA, 1070 bp, Homo sapien
ggcacgagggagacggactcttgctatgttgcccaggctggtcttgaactcctggcctcaagcaatcctcctgcctcagcctcccaaagcacggggattacaaaccctgctgagggatgcccaagaagttccagggtgagaacaccaagtcggcagcggcccgggcacggagggcagaggccaaggcggccgctgatgccaagaagcagaaggagctggaggatgcctactggaaggacgacgacaaacacgtcatgaggaaggagcagcgcaaggaggagaaggagaagcggcgcctcgaccagctggaacgtaagaaggagacgcagcgcctactggaggaggaggactccaagctcaagggcggcaaggcgccgcgggtggccacgtccagcaaggtcacccgggcccagatcgaggacacgctgcgccgagaccatcagctcagggaggccccggacacagccgagaaagccaagagccatctggaggtgccgctggaggagaacgtgaaccgccgcgtgctggaggagggcagcgtggaggcgcgcaccatcgaggacgccattgcagtgctcagcgtggcggaggaggcggccgaccggcacccagaaagacgcatgcgggcagccttcacagcctttgaggaagcccagctgccgcggctcaaacaagagaaccccaacatgcggctgtcgcagctgaaacagctgctcaagaaggagtggctccgctctcctgacaaccccatgaaccagcgggccgtgcccttcaatgcccccaagtgagcccagaacttggggagccagttcacccacggggtggtccaggtcacgactctgcacgcccttaggccaggtcagctgcgagggtcacagagcgttccgggggccaaggcgccgggccccggggccatgctcttatcaccagccacccgtcctcccgccagagggtccctgccccgagtgacaccccatcccctcccatcccccggcgcgtgtgtgtagagcctcagggctgagtgcccaataaaggtggcggcaaggctaaaaaaaaaaaaaaaaaaaaaa

SEQ ID NO: 4599 - protein, 223 aa, Homo sapien
MPKKFQGENTKSAAARARRAEAKAAADAKKQKELEDAYWKDDDKHVMRKEQRKEEKEKRRLDQLERKKETQRLLEEEDSKLKGGKAPRVATSSKVTRAQIEDTLRRDHQLREAPDTAEKAKSHLEVPLEENVNRRVLEEGSVEARTIEDAIAVLSVAEEAADRHPERRMRAAFTAFEEAQLPRLKQENPNMRLSQLKQLLKKEWLRSPDNPMNQRAVPFNAPK

SEQ ID NO: 4600 - DNA, 1393 bp, Homo sapien
gggagtccctggtgggaaaagtccacaatttcccattgatagctttttactgttgtgaaaaagggaagcgtcagccacacaaaagcctgcatgaccgctgcttcggagaagctctcgaccctaactgcagtcactgttacttggatcagatcaagcgcagtgactttttgggattcagtggttattctccacacttcgtagccacttcgaccaactctgagcacaaaatgcagccatcctctatgcagcaagccctgcccagtcagtggccctactggacagatccaaggccagccctggttccctgctgcagccaccgtcctgacgttcatcggagcaggccggggcctggccttcccggcacaagtggctgttctgacaggcccccagtttgtcccatctgaactgctgggaggtttccgggtggccagaggagcaaagctgccttccaagtgcctgtctgtgcctgggagaacagagcaggagcgtcgtgcggtccaccgcgcagtgcatggcgattccaagcgctgaacaactcccctggacccttgggcctgcatctgactcccagctgcagagtcagaagctgagtccaggcaactgcttggccactcccgatcgctcctccctggacacccggttaccaaagtcagcaaagaagatgcggtaatcgccgcctgatctccacatggtgaacacaacactcccaccaacacctccttgactggtcggtcttcagcaccgggggtgggcaggcaggtgttctgtgttgacgagaattgcacaggctaaacacaaacacggaaccagagtgagaacacctcactcacggcagcccaggctgctccctaccaggtgacggagcgcgccggggctgtgggtgccaggggctgagtgctagggactcgtcatgagtggggatccccacgttcctgtcactgctgtcaaacagaaggtaaacagtcatatgaatgtatttccttaggaaaacttgtaaaaacttttattaggatatctatttaatactgaactttggcctactttgtgatagactataaacaaattgaggaaatcactatttctcacttctgtattttctcaaaaataattttgttacagagttcaatatactgtgtaccattgatcttctattgtgaaagcaaagaatttcatcaaaatattttaaattatgagtgaaaattgtgtatgttaattttgcagctataatattaatcaaattttgtgtaattctaatcacaaaatgacgtgccttaagtgcccctccagctgtgggttggcagtgtccagacagggagggcccatcaccgaaatcctgaacgattactagaccaattctattaaaaacatttcaaggcaaaaaaaaaaaaaaaaa

SEQ ID NO: 4601 - protein, 133 aa, Homo sapien [sequence omitted]

SEQ ID NO: 4602 - DNA, 1393 bp, Homo sapien; identical to SEQ ID NO: 4600

SEQ ID NO: 4603 - DNA, 655 bp, Homo sapien
  Unsure 567: Unknown base
ttttttttatcattgacaatgtttattatcaagaaactttaggttttttaaaagaatgctcgttttagaatacaccaagaggacactctgtgacaggacatatacaaacaaggataattaaaatattaaatactatctaaattaaaagaccataattcaaattgctaattataatatttgtgtcggtagaaataactatagttccccttcatgaaattcacccccacgttctcatgaagactatgacgtctcaccacaatttcagttatttaatttacaataatcaatgctgagttttctgtgctgaagcatgcactgttacagaaagcacaaaatcctatttacagggatttttagttttctttaaaatgtatctcaagcatcttttaaagtgcgagctacaaataggttgtatccttaatgaaaaaggcttctttctaaaagaagtatgagatagctatccaatactgcaggaacagttatataactaaccgaaggaaccagcagcactctgctaactctgttttagtgtagcaacctccttcttggtgttctactaccagccanacatgtactccattgctttggataccagactttcatctttttttggcgtttgtctgtcagaaataccctgataatcactagtagaggc

SEQ ID NO: 4604 - DNA, 3164 bp, Homo sapien
gcagccccggcggccgaacgcccgcggcgcgggactccatcgtcagagaagtcattcagaattcaaaagaagttctaagtttattgcaagaaaaaaaccctgccttcaagccggttcttgcaattatccaggcaggtgacgacaacttgatgcaggaaatcaaccagaatttggctgaggaggctggtctgaacatcactcacatttgcctccctccagatagcagtgaagccgagattatagatgaaatcttaaagatcaatgaagataccagagtacatggccttgcccttcagatctctgagaacttgtttagcaacaaagtcctcaatgccttgaaaccagaaaaagatgtggatggagtaacagacataaacctggggaagctggtgcgaggggatgcccatgaatgttttgtttcacctgttgccaaagctgtaattgaacttcttgaaaaatcaggtgtcaacctagatggaaagaagattttggtagtgggggcccatgggtctttggaagctgctctacaatgcctgttccagagaaaagggtccatgacaatgagcatccagtggaaaacacgccagcttcaaagcaagcttcacgaggctgacattgtggtcctaggctcacctaagccagaagagattccccttacttggatacaaccaggaactactgttctcaactgctcccatgacttcctgtcagggaaggttgggtgtggctctccaagaatacattttggtggactcattgaggaagatgatgtgattctccttgctgcagctctgcgaattcagaacatggtcagtagtggaaggagatggcttcgtgaacagcagcacaggcggtggagacttcactgcttgaaacttcagcctctctcccctgtgccaagtgacattgagatttcaagaggacaaactccaaaagctgtggatgtccttgccaaggagattggattgcttgcagatgaaattgaaatctatggcaaaagcaaagccaaagtacgtttgtccgtgctagaaaggttaaaggatcaagcagatggaaaatacgtcttagttgctgggatcacacccacccctcttggagaagggaagagcacagtcaccatcgggcttgtgcaggctctgaccgcacacctgaatgtcaactcctttgcctgcttgaggcagccttcccaaggaccgacgtttggagtgaaaggaggagccgcgggtggtggatatgcccaggtcatccccatggaggagttcaaccttcacttgactggagacatccacgccatcaccgctgccaataacttgctggctgccgccatcgacacgaggattcttcatgaaaacacgcaaacagataaggctctgtataatcggctggttcctttagtgaatggtgtcagagaattttcagaaattcagcttgctcggctaaaaaaactgggaataaataagactgatccgagcacactgacagaagaggaagtgagtaaatttgcccgtctcgacatcgacccatctaccatcacgtggcagagagtattggatacaaatgaccgatttctacgaaaaataaccatcgggcagggaaacacagagaagggccattaccggcaggcgcagtttgacatcgcagtggccagcgagatcatggcggtgctggccctgacggacagcctcgcagacatgaaggcacggctgggaaggatggtggtggccagtgacaaaagcgggcagcctgtgacagcagatgatttgggggtgacaggtgctttgacagttttgatgaaagatgcaataaaaccaaacctgatgcagaccctggaagggacacctgtgttcgtgcatgcgggcccttttgctaacattgctcacggcaactcttcagtgttggctgataaaattgccctgaaactggttggtgaagaaggatttgtagtgaccgaagctggctttggtgctgacatcggaatggagaaattcttcaacatcaagtgccgagcttccggcttggtgcccaacgtggttgtgttagtggcaacggtgcgagctctgaagatgcatggaggcgggccaagtgtaacggctggtgttcctcttaagaaagaatatacagaggagaacatccagctggtggcagacggctgctgtaacctccagaagcaaattcagatcactcagctctttggggttcccgttgtggtggctctgaatgtcttcaagaccgacacccgcgctgagattgacttggtgtgtgagcttgcaaagcgggctggtgcctttgatgcagtcccctgctatcactggtccgttggtggaaaaggatcggtggacttggctcgggctgtgagagaggctgcgagtaaaagaagccgattccagttcctgtatgatgttcaggttccaattgtggacaagataaggaccattgctcaggctgtctatggagccaaagatattgaactctctcctgaggcacaagccaaaatagatcgttacactcaacagggttttggaaatttgcccatctgcatggcaaagacccacctttctctatctcaccaacctgacaaaaaaggtgtgccaagggacttcatcttacctatcagtgacgtccgggccagcataggcgctgggttcatttaccctttggtcggaacgatgagcaccatgccaggactgcccacccggccctgcttttatgacatagatcttgataccgaaacagaacaagttaaaggcttgttctaagtggacaaggctctcacaggacccgatgcagactcctgaaacagactactctttgcctttttgctgcagttggagaagaaactgaatttgaaaaatgtctgttatgcaatgctggagacgtggtgaaataggccaaagatttcttcttcgttcaagatgaattctgttcacagtggagtatggtgttcggcaaaaggacctccaccaagactgaaagaaactaatttatttctgtttctgtggagtttccattatttctactgcttacactttagaatgtttattttatggggactaagggattaggagtgtgaactaaaaggtaacattttccactctcaagttttctactttgtctttgaactgaaaataaacatggatctagaaaaccaaaaaaaaaaaaaaaaa

SEQ ID NO: 4605 - DNA, 3702 bp, Homo sapien
gcggaacgggcggaggctgccggtttcgtaaccgtcgctcctcctcgctgactcgcgggctgtgaggcctgggtcggctcgggccgcaccgcgcggggccgctcggagtggaggccgcctgggggcaggcgggctagaggagcaggtacatgtgaagattttttggcagcttagcgtggaaaccattgatcaccctgctctcatttctacctgttctgtgttggcaagggagagtgcccaaatgagcaagatatcgcagcaaaacagcactccaggggtgaacggaattagtgttatccatacccaggcacatgccagcggcttacagcaggttcctcagctggtgcctgctggccctgggggaggaggcaaagctgtggctcccagcaagcagagcaaaaagagttcgcccatggatcgaaacagtgacgagtatcggcaacgccgagagaggaacaacatggctgtgaaaaagagccggttgaaaagcaagcagaaagcacaagacacactgcagagagtcaatcagctcaaagaagagaatgaacggttggaagcaaaaatcaaattgctgaccaaggaattaagtgtactcaaagatttgtttcttgagcatgcacacaaccttgcagacaacgtacagtccattagcactgaaaatacgacagcagatggcgacaatgcaggacagtagacctcaccctttccagactttagagcttgtggcttgaatgttaaaggtgtgaccaccgacaccactcatgtcaatggctgaaagttgtccatttccatgactcaaagacccattggaggctattttctgggatcagcactgaagagttgattagctaaaaatgttagccttgtaattcgaatatctggttttaaatgatagaggtttttgtgggaatcaaaatcccccaaatgttaaggtatatggtaaaaaaagaaatatctgggatcccgatgttcttaataaatcctgacttcccaagaaatgcttcttttttaagttgacaaaaggaatggggaactggcaggccgcgcagaaggttcttggttttaatggataggctgaattggattaagaaaagttgaatgccacctatggtaatctatttgtgattttcttctaaattatgtattataaattcgtagagctatagaaagcaatgagtgtgtaatttggagtgattttatatatggcataaactttgttttaacataattagtactgttttcccccaaaagtacaagtttttgagtagcaatgtcaggttaagtaaagaaacttcatcacatcttataggtagtgtgtggccaattgacttaaaaaatacaaataacatttaggaagcaaatagattaaacacaaaaataaaactaaagcataggaattatgtttttgagatacctttgggcttagattggcattgttttattctaaaaacccaactcagtggtgtagagaaacttgtgtaccaaaattttagtttctgcagatgctagtgtttttttggatacaattttgacaaccaagttagtaaacaaaatatcttaacagtttgatgacacaagctactgatgagggtttggaatattaattcagaaggtagtttctcttgtgttcaaaatagctgccatggggctgttacttttaaagtcaaaattttcttctgaaggctcattttggtatttgatcttaaccaagtgattattagagaaatgtatcaactccatgccatctcccaaaataattgtctaagaaaacttgaaagtgtaaggttttaacctttaatttatttctcttaaatacatcttttgatattgttgttgtgacatttctttttctggttagtgggctttccagactttgtaccactgcttctgtttattcatttatatgcttttgtgtcccataaattatttcagaaaatgctgataaaactcaggatattgacatttttgttgagactaaaaaatggcagtcgctaaagtagggactctagagtctggcttacgtcagtgttggtagtttagattgtctttgtcaacgttttttcttctctcttttgctttcttttctttctctttttttcttagcacagttctagctcaaatttgtgtattttttgtgtgcctgggctggagatgagagactgagtcataactgatttaaaagtttgtgttatcaggtatcttatttgaacatggtcatttttggccacattgctgtttcatactaggacttgggatgatgtagccagaataaaactcaagttgcaccctccggttggtggaagattgctgaccgtgccgtttctgggcaggagaagacatcatggtgtccagcaactcagcaaagccattcttaagagtcgtgaggtccttctgaatgtaaaactggagcccaggagaagctgtcccaggagggctgttaactccctatagagccaggagacaggataggggtttctagggtccaacaccagcttaccttggagtgtgaatctacccatgaaggatgagagatgttttgaaaaactagccaggacacacccacaggatcctactggctccttagcagctgattggtgttacataattaacttaattggagatgcattaggtcacttgaatgtataagcaagcacctatggtaggcgctacagacatttaaatctcttgggaattcgatgctcccatggaatttataccagttatatgaattgacttaagtatcttgaaaaagaaactttagagaaagcatcaggggtgtgtactcagtatttcaaatcagaacacaagattggaacttttggaaaaatgggttcaagctttcctattagccatggaaatgcaaagtttagcagaagcaagcaattaggcagagaacaaaaatgttaagcatggtgttgtctatcttattgaagtggttggaaatgaaagcttttaatttgatagatttatcagtataaaattagggaaaccacgtgtggggaatgaatcaatttagagcttcgggaattgtgaggtgacttttgtaacttttgttctgtgtgtgacctgtgaaccactaggatgtgatctgcccttgtgggcaggtccagcatagttaggagttaggctttagcataaatttctagctgcatctgagtctcctgggatgggtgctctttggctggttttggctgcggatggtgagatcagagcagctcttcctgctgctggcccctgcaatcagttgttgggatgccagtgcagatcactaagtagtaagattttaatcaaacacgaccaggtccgaaatgcaggtcatgagtgtgaaattctcaaatttacataaaaagtagaagtatagacagtttaacatttggtattaaaggagaggaaattgtagcagcttttcacgtttcccagtccccattagagggcttgagaccttgtacctgaacaacccattttgcactcagtgctttctgatgccttaggagaattgttttgtttcacaaaagctgggaaggaagaagtccattctgcagctgttagatctgcctctcaggaaaaagtactaacttgttctttttgttcctggctttcatcagtttgtgagatttctctattttttttaaatataattttatttctttcaacaaatataaaataaaaaacaactttggaacaatgaaaaaaaaaaaaaaa

SEQ ID NO: 4606 - protein, 150 aa, Homo sapien
MSKISQQNSTPGVNGISVIHTQAHASGLQQVPQLVPAGPGGGGKAVAPSKQSKKSSPMDRNSDEYRQRRERNNMAVKKSRLKSKQKAQDTLQRVNQLKEENERLEAKIKLLTKELSVLKDLFLEHAHNLADNVQSISTENTTADGDNAGQ

SEQ ID NO: 4607 - DNA, 3682 bp, Homo sapien
cggggccgctgaatgagatcctcatctgcgggaagtgtggcctgggttaccaccagcagtgccacatccccatagcgggcagtgctgaccagcccctgctcacaccttggttctgccgacgctgcatcttcgcactggctgtgcggaaaggcggcgcgctgaagaagggcgccatcgccaggacgctgcaggccgtgaagatggtgctgtcctaccagcccgaggagctcgagtgggactcgccccatcgcaccaaccagcagcaatgctactgctactgcggcgggcccggagaatggtacctgcggatgctgcaatgttaccggtgcaggcagtggttccacgaggcctgcacccagtgcctcaatgagcccatgatgtttggagaccggttttacctgttcttctgctccgtgtgtaaccagggcccagagtacatcgagaggctgcccctgcgatgggtggatgtggttcacctggccctctataatctgggggtacagagcaagaagaagtactttgactttgaggagattctggcctttgtcaaccaccactgggagctcctgcagcttggcaagctcaccagcaccccagtgacagatcgaggaccacatctcctcaacgctctgaacagttataaaagccggttcctctgcggcaaggagatcaagaagaagaagtgcatcttccgcctgcgcatccgcgtcccacccaacccgccagggaagctgctgcctgacaaaggactgctgccaaatgagaacagcgcctcctctgagctgcgtaagagaggaaagagcaagcctggtttgttgcctcacgaattccagcagcagaaaaggcgagtttatagaagaaaaagatcaaagtttttgctggaagatgctattcccagtagtgacttcacctcagcctggagcaccaaccaccacctggctagcatatttgacttcacgctggatgaaattcaaagtttaaaaagtgccagctcaggccagaccttcttctcagatgtcgactccaccgacgctgccagcacctctggctctgcctccaccagcctctcctatgactccagatggacagtgggcagccgaaagaggaagctggcagccaaggcatacatgcccctgcgggcaaagcggtgggcagctgagctggatggacgctgcccctcggacagcagtgcagagggggcttcagtccccgagcggccagacgaaggcattgacagccacacatttgagagcatcagtgaagatgactcatccctgtcccacctcaagtcatctatcaccaactactttggtgcagctgggcggttggcctgtggggagaagtaccaggtgttggctcggagggtcacacctgagggcaaggttcagtacctggtggagtgggaagggaccaccccttactgactagcccccgggggtgccaggggtcctgaaaaccaaaggaggagcagcagaagccataggctccccagctttctccaggctggggtgggagaaggaagcaggacagagctgcaagtgcctggcagaatgccctgcctgcctgcctgcctgccaggccaaggcctgcgtctctctgctgtaccagctctgttccagggcctcctcaggctcgttacccctgtgcctgtgtctctacacactccacaccccctcaaactctgtttatctgttctctgaccttgtgtcccctgcgctgggacccttcctcctgaggcccaggtctttgtccccagttgtgtgccttgacctctctcgcccctttctgggtgtgttcgcacatcctgtgtgtgcacagctgtccctccactggatccccttcacacgtgacccgtggggcagccagtcctcccagggactacataacaggcacctttgagagagcatgggagaaggtggataagaggatgctgctcagtgcttttctcttccactttcctgccactccccactaccctcggagagaggtggtgggatgggagagagcccctgtgaaagcctgtgaggatctgaagagtaaagggctgggtctgcctcagaaggcaccagcaccagggcccaggtattaaggctgagagtgaaggctgccaatgtcagctttggaggtcccagaagtcttctgttctctggcctcaccccctcagtcgccatagagctgggcctggccttgctggaatggaggcatccttccaaacctgggggacgggggtggggggtggtagtggtgggagggaaaccatgtcttgctaaacctgtttctggtgcctcccatccccagacccaccagacaccacacagcagacaatacacacccactcgcacaagcttccatccacatgtgttgtactttcagctctaggcatgcagacaaccccacacggccacaccaccacatgcccaagtgtacacacacagagccacaccgtccctctgggcctgctggctcctcccttggctttcccttggcccacttccagggcccaggtgctgcaactaaatgtgaaagctcagtggccgctccttctttcagcccatcaaccagcattggtcccatagggaagcacaggggactcaccctctttcatatcccttgccctgccctgaaatggacaatcactttttgggataggttgaaatttttaaagagcctgcatcattcggttccctcaaagggaagcccttgctagtgggggtttgaaagagaatttttggaaccaacattcaaattctgcctcatctggagggaaaccaaaattgggagggggaagaggacccctgatgttttgctgcttccagagatattagaaactgactcacttgattggaaaatggacaaaagtgccttgacgtggagggtgggcaccagatggggaccagccttgccaactgctgctgtggcctccagcttggctggttttgcaggccgccagcaggaaggcgaaggtggtagtacagcaagaggcactggcggggcagcaggcctgcaggagctgtttttccattgctaggcctgacccctctctacctgtgagcgttcagggggtccctgagatagtttagatgccccccccatcttagacctcagctcccacagtgccttttaagggggacctcacctcctgtgcacagcccacccactttcctctgcttccctggcacagcccaggcatagacgagctggcgttggacccagttcttcccccttttcagccccacagctgctgccacaggggccaactagggccaggtggaaggggagctgagaagccaacccctagcccaggggtgctgtgggaactgggatccaatttgtagcttcccgcctggcttcagagagcccagcaaccttctaggcctgctttccagacttctgagatagcctgggatgagcaatcctgttacagtacatctggaccttccctacctgggctctggggaggctgtgggcctggagagggaaaaggagggagggggtgtctgcaccacctgggaagatagcacaaggcctaatgaggtcaccctgactccccaccccagcatttcattcataccagataatagctgcattactgccaactgaccttataaccctctgcaccttcaaaaagattcatggtttttaattgctgcttttaataacatttgtaaagttaaaaaaaaaa

SEQ ID NO: 4608 - protein, 473 aa, Homo sapien
GPLNEILICGKCGLGYHQQCHIPIAGSADQPLLTPWFCRRCIFALAVRKGGALKKGAIARTLQAVKMVLSYQPEELEWDSPHRTNQQQCYCYCGGPGEWYLRMLQCYRCRQWFHEACTQCLNEPMMFGDRFYLFFCSVCNQGPEYIERLPLRWVDVVHLALYNLGVQSKKKYFDFEEILAFVNHHWELLQLGKLTSTPVTDRGPHLLNALNSYKSRFLCGKEIKKKKCIFRLRIRVPPNPPGKLLPDKGLLPNENSASSELRKRGKSKPGLLPHEFQQQKRRVYRRKRSKFLLEDAIPSSDFTSAWSTNHHLASIFDFTLDEIQSLKSASSGQTFFSDVDSTDAASTSGSASTSLSYDSRWTVGSRKRKLAAKAYMPLRAKRWAAELDGRCPSDSSAEGASVPERPDEGIDSHTFESISEDDSSLSHLKSSITNYFGAAGRLACGEKYQVLARRVTPEGKVQYLVEWEGTTPY

SEQ ID NO: 4609 - DNA, 1697 bp, Homo sapien
ctgtttatagataatgtctgcagtttctgtttgagagagataattatgacacttagcattggaaaactaagaagaacgtaagcaggtcagctatcagaagtcttcagactggagagattcctggagggggagtggccctttaatccatcagctgaagccatctggtaggacgctcgttgcagaaatggttagttctgaaatgttgtagctcagcaacatcactgaatgtcacagaattgacaggcacggagctaaaagggcctctagccacccccacaactccgctctacctctgtctccctaacacatgacttggaacaaatacactctaggtacaaagatggctacctgaagtttatgatccctactcatggagctgcttgaggacttcacattttttaaaaagctgctttgggcacccccattcctgaggagttttgtagcttggtttctctttgccacattacgtttgtaagactaacattttataaccataagcagttaggcctttttattttgagaaatttatctgtagcttccttttatttacacttggggactatttttaagtaaccgattgaaatatttttgtttctccattgcaagtgaaatccttgttgctaatcttttgccacatgtaaaattgttcacttgttatcaagcaggtagttcaatatctgtaattcttgagttcttttcaactagcatgatgctaggtgtcactcactgttttttaattgtgggagattgatgcgtcagtgcatgaagtggggggtggtcaccagcatctaactcaaagtgtgattatagctatcttaccacattttttttttctttctcactctgtcacccaggctggagtgcagtggtgtaatctcagctcactgcagcctcgacctcctgggctcaagcgatcctcctacctcagcctcccaaatagctgggaccacaggcgcatgccaccccactaagctaatttttctattttttgcagagacagggttttgccgtgttgcctaggttgttctcaaactcctgagctcaagcctgcctcagcctcccaaagtgctgggattacatgtgtgagccaccatgcctggccgtcactaatcttcaaggttaatatttggaggacccatccagagtccaaaggtggtcttcgagggatagcacgaggtggtctgacaggactaacacttaccagcctctatgcactatataataactgggagcacatgaaaggctccttgctccaacagtcactctgaagattttgccaactcatgaatggaggacacttcagtagtcatctagatccttttataagacagtttggagttattctctctcttctacctacaattagtttgaaaaattggagattttgatttgctgtgatgaaaatcctggatggctgaccaagactggcacttgttccagccattagtgagttgaagccaaagccctttggtgactcactgagtaccatggttctgttctcctctggagatcttgcacgtatctgttttcctcccccatgaactagaaaaccacttactcccagaattcaggtcgtgcttgttagtactatatcaccaagtccattcatttaatgatccaaaactgtaatgttgcactgtattccaaataaagggtaaaaacagaaccaaaggtataactccaaaaaaaaaaaaaaa

SEQ ID NO: 4610 - DNA, 514 bp, Homo sapien
gtcctctctgctctcgcggccgactcgcaagatggcgccgcagaaagacaggaagcccaagaggtcaacctggaggtttaatttggaccttactcatccagtagaagatggaatttttgattctggaaattttgagcaatttctacgggagaaggttaaagtcaatggcaaaactggaaatctcgggaatgttgttcacattgaacgcttcaagaataaaatcacagttgtttctgagaaacagttctctaaaaggtatttgaaataccttaccaagaaataccttaagaagaacaatcttcgtgattggcttcgagtggttgcatctgacaaggagacctacgaacttcgttacttccagattagtcaagatgaagatgaatcagagtcggaggactaggcaaaggctccccttacagggctttgcttattaataaaataaatgaagtatacatgagaaataccaagaaattggcttttagtttatcagtgaataaaaaatattatactcttg

SEQ ID NO: 4611 - protein, 132 aa, Homo sapien
SSLLSRPTRKMAPQKDRKPKRSTWRFNLDLTHPVEDGIFDSGNFEQFLREKVKVNGKTGNLGNVVHIERFKNKITVVSEKQFSKRYLKYLTKKYLKKNNLRDWLRVVASDKETYELRYFQISQDEDESESED

SEQ ID NO: 4612 - DNA, 3864 bp, Homo sapien
agaccctaaaatctagccaccacctgcctcccccaggtttccacacacccagttggaaggcctttccctgcccttgtccctgtctcacacccatggaggttaagctacagagctggggaaacaggagattttgagttaatggcagcctcacaaatagtgcttctgaatttctctgagggtcagcatacctcatgggagtgtgttgctcagtgcaaccttggaaaagtgggaatggcaccagacgtttttcaggtgcctcttgcaattcaaacttacatcctctataccgtcctaaaatttgcctgatcttatttggtagatttcaagttgctttcagctgtgaccgtaataactgtttcaggaactggagaaatagtggaagtgctattgccgcgctgcatgtaaagcacaggagcaaagattcgatacaattagaccctttaagctacaacgtggttgcatttggggagtctgatacccacataggtatcacattttctctgcctggggttaatttgttcttattattctaggtaagaaattgatagcttgttatgcttggtactcattctgaaatccctgtgtgtccaccaggcagacttcaagcaatctctacctactattatatctgccaaaactaccaattatttttcaatgtcagaagttattagagccactggcaaagctcatggttgaatatgacatttttctgcttttccctctaagaagtttttgagaatgttaatgttgaagtatgcaggctggacctaccagcaagtttaacacgttaattaggttaaaaagaatattaaaaggcaataattaaatatttcaattattttgtaattataatggtatcaaataagatgcaaaagaagttgatgcttattggtgcttaagagaattacaatactggttttatgagcatcttttctctgcaacagttaaactgcctcagagtttgtgaattgctgcaattcctggaatggaaacaggaattagggtcactggttgattggcacaggatctttccatcgtttctgctcctgacctctctctcttgcctttccttcccccagacaccctcttggtttccattcctttagttccctctgctttagaacacagattacatgttggaaagaaaaatggattaatggtaaaatttctaaaagctaaattgtacagtggggtctcacttcctagaagaaactattggtaatatttctttctaaaggtaatagtattaattgtatctggttttcttcaaaacttaactataatttccttgtcagggtgctcagtagctcttggtttgactttgggctaagggatgtgaaattttagctccttcccaccacctgtttcccctcactcccacccccagccaatattcttcataagcaaaaattatggttaagctaagctgaatgggttatattcaaagtaagtacagacggcaaataggcagacaaatacaggaatgtctttacaattagcccaccatggactgttttgagtctctgcatggtttccataattcattatgatgtatctttatgctctttcactgctcttctgtgcgttggagtttagcaattcagtgagactggggagtgtctcaagaatggaacctttgccttcaaggttgggtcatcaaaaatccctctaaaggatctaactgtaatgaactgtttttatttttgccattagtgcaagtatcaactggcagcctcaaacagctttagactatgtctcaggtctctcatagttatacttagaactgctctttcttgaagctaaaagaggtttttggagtaaagatctgcttcatgtctgctagcatggtatctgctgttcaacctagtatagagcatgtgaaatgcaactgtcctttaatggaattcagccaaactccaaaaatactgagttgcttctagttatctaaagtagtacagaatcactatcccgatgaagaagtggggtttttcagaagattgtaaactcatttccatggcacagatacaaatcatcgtcaggacttgttagccagtccatgtctcattgataggatgtagcctgccatctgcatagatggtttaacatggtgctgtttttgaaaacttgctgtggaaataaatttgacagaagagtagttatttgtaaagctgtcctagaaagaggttaattcttttggtatatgaatatttctcctccaatccttttaattaggtggttcagcttatcttgtattttctgagtcataactatactctagggccaagacctactataaaatctggggtcctaaccagagagttgtttagatcaatatgatatgctttgccaacatgatctaagaaggtattcattctttctgggtttgagaagagttgacgaaagtgtaagattatactctcatgctaaaataaggtataggctaagtgaaatactgtaaatgggttggttagaattaaagtttagaactctaaatcttatgcttatttttaaagtaaaaagttgcctcactgtcatgaaatcctgttactttcattaaaaaaaaaaatcctgtaaaatggtcaaattggataatgtaagagataatgatggctttgaggcatttcatactttaccagtttacatttggctagcagactggtaaggtttagggttctctccactaatggaaaattaaatgctaaacgtcctaagaattatgttgttttcaaggctttgactcagatttgtactttgatgtatgaaagtgaatatcaaacttgtttatagaaaagactatatagaaaaataagtctgtgttgtgtatagtgatacatgttttatgtttacccaatgcctgtactaaatcttgtgcttggctttgaattatatatgtgtttacctatgacttttttttgaaataaacagaacagtcatctaaaaacataaggttttggaaaggagatgctttttcaattcttaccatctgattaggtggaatgttttatagacttttggtgttgaaaaaaaaaagtttgataacaatgcattttgcttggaatatcccccaatccagaaaagttggtgacttctctccattgtatatatgtacatagttttcattactagattgtaagctcctcaagggcaggaattgttttatctttgttgttcctgcagcacctaatgtaaagtgccttgcacagggtaggtgctcatgacgtgtagaatgagtgagtaacttcctgcctcatcaggatgaaatgtggttcacttcccctgtgttcaacactacaaagctactcctgccagaagagggcagagttctttcttgggtttgaactggcttttttgggttgaaccagatcatcccacatccttagcactacttaaccttcttttcctgaagattacatatcagtgtcctgcgtttttatctaatattagagctgaggttcctaggaaaattttgaagtggggaagattatggagaaaatgaaatggaaatttggggagggtggtttgtcagtataaggccctgtggggtaatcatattttagttattacttgttaaaagggtaacagaacctctgtttctttaccaagtcgctggttggccatttctccaattgatgaactaccattggttttagctctttctcatttgggattcccctcaattgcttacatgattctggtacttagagtctaatagagttgctgtgaatatgtagtgctgtacataatggcagttttgtaaatgtgagataaccttgaatatgttgtggtttgtatacagagccattagtattgttattttggccacttttttattcaaaataaataacataattatttgtaaaaaaa

SEQ ID NO: 4613 - protein, 43 aa, Homo sapien
TLKSSHHLPPPGFHTPSWKAFPCPCPCLTPMEVKLQSWGNRRF

SEQ ID NO: 4614 - DNA, 1747 bp, Homo sapien
gggccctcataataagcattgttactattggaagttgttttcacattctttccaatattaaatatgtatttttttaagtaatgataatattttccagtggctcatttggatgagaactaccctctatttttaatattaaaactacatccaactcatcatttagcctttggttgtacagttgtgtaatgggctatggactgttacacaccttaccacctctaggcctatgttttttctttccccatatattctgatggggataaatactgttttgcctctcccataggaatggaatacatttattctaaaatgatctttcacagaagtaagagagagggaaacctaaatatacctctaaattgtttgaagttggtcccagcagcataaaatgggttggccccaaagggttggagggtgggcttggttatcagtatttgttttcagaatgagatgggagcatctttcctttgccacgtgctttgtgcttgataacatcatgcttggttcaaacgacaactcagcacaaagccttgagtataaattgttggaatcaaaacatctcattctgatgacgtggtttaattttttaattttttttttaataggggtgggagggagggtactttgccccaaaagggagggtgtctgcactaaggatttagaaacactttggaagctcataacctcatcagaaactgcctttagccacactcctgaccttctagatgagtaacaaaaaaatgaaataagttcttggaaattaagccatttattttaatttgctatttttttcaatgttctaggtatctttaaatttgttattgtggaatcattttcctgccagatacctttatcaaaattattggcctcatgagagctgaagtaagtcagctttttggtgaactttagtggacttctgtgagattgtagttgtactttgtatctctaaatctaaagatagttttttaaaactcccaaagaaaatctgctctcctttctgatctaaaaactcatctttggggtaaagagttaagtgtccaaaggttgtcacagttcatgaggtcagagggagctagcctggcacctggactctgcccatccacagctgacagattccaacagaagtgtatttaaattctccagtagacaatgctgggtaagggagggggtagggctgggttattaagatacaggctgctgtattttacattggttgtgggggaaggggagcctggagaaaacaaagtcactattcccttttttgaaacaggaaaaaaaattattttttgttcagtaaaaatggtagagaattccaatgtccctagccacaagggaccagttccactgagaagtgaacagtgggaactcaaaatttcagaaacattgggggaagggaaaattggctttctcttaattggcagatgttccagtggggcgggggggctctgtttttgttgggatgtgttatgttgtatgtacgcatatatggaccggagtctgctgagtttataaggttccaaaaatatggtaaaatcttggtttttgttaatttatctcaataaaagcccactggaactccaaaaaaagagaataaatataaataacattagataataaaccgacaataaatggcacagctttttttagagtgaaaatataaaatattgtatttttattggtgaaaaaataaataaaccagtaatttcaatgttagtatgaacctgattcagtaaggccagaatattaa

SEQ ID NO: 4615 - protein, 24 aa, Homo sapien
ALIISIVTIGSCFHILSNIKYVFF

SEQ ID NO: 4616 - DNA, 2859 bp, Homo sapien
ctaactttgagtcaacgctgactacagcaccaggactgctcacttccagcttctgctgacacctgccctcgtttagtctttcttggtggctgcaggttcagtagaaactctatgccaggctttgtctccgggacataggagagtgctggtgctcagtcatgtttgttgaatgagtaataaatggtaaaggttgttgctgccccgagacgcttcaagaggaagcagccccctaaccccagctgggaggaggaggaagaatcctgggctggtcagttggggaaggagctgagcaggccgggccacctgggctgacacagcacgagcaccacgtggatgggatgcctgcagtcagctgcaggagggcctcgtcgggaggccacagggcccctcttttgtcttgaatggagacctccaaggctccaggacataaagggccttggccaagctgttcctggccacctggccacatctccagctgcaccagttctcacctccattccccacggccccagctgtcaggttttagggtggcagagagctccatgcaccccctggccttggcctcttctggggcttagagctccaggacttttgggcctgtgcaccctcagcgtcccctcttacgactccggcgaggacggccaggtgcctggtggactcttgcacgtgctcagccacgagacctcatgtgcgctgtcctgagcccacctgtgtcctcagatgttccaggtcatccagccagagcgtgcgctgtacatccaggccaacaactgcgtggaggccaaggactggatcgacattctcaccaaagtgagccagtgcaaccagaagcgcctcaccgtctaccacccgtccgcctacctgagcggccactggctgtgctgtagggcgccatccgactcggctccgggctgctcgccctgcactggcggcctcccagccaacatccagctggacattgatggggaccgtgagacggagcgtatctactccctcttcaacttgtacatgagcaagctggagaagatgcaggaggcctgtgggagcaaatctgtgtatgacggcccggagcaggaggagtattcgacgttcgtcattgacgacccccaggagacctacaagacgctaaagcaagtcatcgctggggttggggctttggagcaggagcacgcccagtataagagggacaagttcaagaagacgaaatatggaagccaggagcaccccatcggagacaagagcttccagaactacatccggcagcagtccgagacctccactcattccatttaaagtctgcgggacgcgcccagtggcgccagcaagctgcccatgcaaagccgcagcctttgggagggagaagagaaggaagagcgcagagccggcaaagtgagatgcacgccgtcccggcccatagacaagtggcgctggggtttccctctcccagaaccgctgccaccaccgccacgccctccgcagaaagcccacctggccctgtggaacgtgtcgtcatttgattctgtgctttttgctccttgtttgtggggatctggggatcagctgaaggatcaggaagtgtgggctgtgccctagccacaccacagccagcctcagggagccacggcccgtctagtcgactgtgacatgcacctccggccgtgtgtgcgtcagtctcgtgcacgtctgtcttgcgttgcacggtgcgtgtgacgctgggctctgtggctctgtgcccgggaggcctgctggccccgcctcggctttcggcttcatcacattgggaggttcagagcattactctcccactgtgcctgccatccaggcagccatgggaggcggcctccctgttccactttcgaggttcgtttgattcctggctgaggggtcagttttatggctgggaggtgcagaattacacagaagtcccagtctgaggatgtccttggtgcttgggggatacgggttctgtccacagagtcccttggagggaaaggtgtgggctccagcttctccaggcgtctgcggagcccacagttgaagcccacatcgttttgctgttgaatggggtttaaaatcagaattaacatttgccaccccccgtggaagtttgaagattttaaaaatagaaatgtacatttttcaagctgtttttctttatgtttttgaaggaccatttttaattagctctttgatacaaagtaactcagaacgtcaaaacctatacccactaaagggaaggctgccgggaaggcaaatggaacaggaatggagcctgtctcaggaaggccagctgcaggtcctccagaaaatcaaagaagggaagaaactctgagtttgaggtacaggggcttcggggtgcagacgtccctccagggcccatggtcagtattgcacctgtgttatgaacccccagatgctgtgcagggcaggggcgggggctgctgttttattggggaggggagcatcctaaaaatggggtccaggcagacccctccagacctcacactgccgaggaggcctttcccaaagggcgtcctcccgggatgcagacggcaggtgtgtgggaagcgccgtttaaatacacagcacgacgtatccttgtaccgacttctcccggttcttgtttgaaaatactgtagttcaggctcttgatctagatggcagataggaactttcttgtcacaaaaatactggaggaaaatgttgtaaaaatagacttttggacacacagctgttggggctgcactgagctgcaatttttaacatggatttataacttaatgtttctgtttataaaatactaatgatttgcaatgtattttactggccaattaaaacagatgttttattctttctgaa

SEQ ID NO: 4617 - protein, 190 aa, Homo sapien [sequence omitted]

SEQ ID NO: 4618 - DNA, 1027 bp, Homo sapien
aggcccgtggatctcatcgaagatggcggcgcgatctgtgtcgggcattaccagaagagtcttcatgtggacagtctcagggacaccatgtagagaattttggtctcgattcagaaaagagaaagagccagtggttgttgagacagtagaagagaaaaaggaacctatcctagtgtgtccacctttacgaagccgagcatacacaccacctgaagatctccagagtcgtttggaatcttacgttaaagaagtttttggttcatctcttcctagtaattggcaagacatctccctggaagatagtcgtctaaagttcaatcttctggctcatttagctgatgacttgggtcatgtagtccctaactccagactccaccagatgtgcagggttagagatgttcttgatttctataatgtccctattcaagatagatctaaatttgatgaactcagtgccagtaatctgccccccaatttgaaaatcacttggagttactaagcaattcggaagagaaacacattgaaatcactgtctttccctgagcaagggggctgctcattagatcttttgatactttaccatgtgaaatactaccagaactgttctctaaacccactttttctgtagaggaatgtatcatctttttttttctcatattacaaatggacaaataacggactttctattttcatatttgctgaaaccattttttaaatgaaattaggtcattatttatgaaaagttttgagagggcactgtcaacttgggtttaagacaggaggacattgcaagttcacacctttcataagcataaagtagttgcaagaaagtattttcatcctgttaggattcatatctaagatagagttatgcattgcacatacacaaataaacttttattagatagatacctataaaagaaacataaaagtatgttgtgtattactgacagttctagattaatttcttttagaattaaagcagatttgttaaagtgaaaaaaaaaaaaaaaaaaaaaaaaaaaaa

SEQ ID NO: 4619 - protein, 158 aa, Homo sapien
MAARSVSGITRRVFMWTVSGTPCREFWSRFRKEKEPVVVETVEEKKEPILVCPPLRSRAYTPPEDLQSRLESYVKEVFGSSLPSNWQDISLEDSRLKFNLLAHLADDLGHVVPNSRLHQMCRVRDVLDFYNVPIQDRSKFDELSASNLPPNLKITWSY

SEQ ID NO: 4620 - DNA, 1979 bp, Homo sapien
aggcccgtggatctcatcgaagatggcggcgcgatctgtgtcgggcattaccagaagagtcttcatgtggacagtctcagggacaccatgtagagaattttggtctcgattcagaaaagagaaagagccagtggttgttgagacagtagaagagaaaaaggaacctatcctagtgtgtccacctttacgaagccgagcatacacaccacctgaagatctccagagtcgtttggaatcttacgttaaagaagtttttggttcatctcttcctagtaattggcaagacatctccctggaagatagtcgtctaaagttcaatcttctggctcatttagctgatgacttgggtcatgtagtccctaactccagactccaccagatgtgcagggttagagatgttcttgatttctataatgtccctattcaagatagatctaaatttgatgaactcagtgccagtaatctgccccccaatttgaaaatcacttggagttactaagcaattcggaagagaaacacattgaaatcactgtctttccctgagcaagggggctgctcattagatcttttgatactttaccatgtgaaatactaccagaactgttctctaaacccactttttctgtagaggaatgtatcatctttttttttctcatattacaaatggacaaataacggactttctattttcatatttgctgaaaccattttttaaatgaaattaggtcattatttatgaaaagttttgagagggcactgtcaacttgggtttaagacaggaggacattgcaagttcacacctttcataagcataaagtagttgcaagaaagtattttcatcctgttaggattcatatctaagatagagttatgcattgcacatacacaaataaacttttattagatagatacctacaaaagaagcataaaagtatgttgtgtattactgacagttctagattaatttcttttagaattaaagtagatttgttaaagtgtattgtgtgttgtaaattttttgagtgaaatttgcttgcgctctgccttgccatttctttccagtaagtataattttgaaaaaattagaatatatgccaaatattgagtgctgtgactcttcctcataagagatgtgccagattctatgtctaattgcatattctcttcagaggagatgatgcttattttaaacctttttctctataacttttaaaaagtggtgctgagtattcactagagtggcaagtctttgtgctttaatgcactcaatttgtggaaattacttaaatagcaggttatcagatggttctgaatgacaaaggtgttaaatttgggatttttttttcaagctttagatatggctggagagtaatgagacagaaggaatgtcttatattgttctgactgctgacaattcctaaagaaaagtgatagaagggtttttaacaaaactttttccctgccgccgccgagtcgcgcggaggcggaggcttgggtgcgttcaagattcagcttcacccgtaacccaccgccatggccgaggaaggcattgctgctggaggtgtaatggacgttaatactgctttacaagaggttctgaagactgccctcatccacgatggcctagcacgtggaattcgcgaagctgccaaagccttagacaagcgccaagcccatctttgtgtgcttgcatccaactgtgatgagcctatgtatgtcaagttggtggaggccctttgtgctgaacaccaaatcaacctaattaaggttgatgacaacaagaaactaggagaatgggtaggcctttgtaaaattgacagagaggggaaaccccgtaaagtggttggttgcagttgtgtagtagttaaggactatggcaaggagtctcaggccaaggatgtcattgaagagtatttcaaatgcaagaaatgaagaaataaatctttggctcacaaaaaaaaaaaaaaaaaaaaaaaaaa

SEQ ID NO: 4621 - protein, 158 aa, Homo sapien; identical to SEQ ID NO: 4619

SEQ ID NO: 4622 - DNA, 1835 bp, Homo sapien
gtgcagttgcggctccagggccatggcggaggagcagggccgggaacgggactcggttcccaagccgtcggtgctgttcctccacccagacctgggcgtgggcggcgctgagcggctggtgttggacgcggcgctggcgctgcaggcgcgcgggtgtagcgtgaagatctggacagcgcactacgacccgggccactgtttcgccgagagccgcgagctaccggtgcgctgtgccggggactggctgccgcgaggcctgggctggggcggccgcggcgccgccgtctgcgcctacgtgcgcatggttttcctggcgctctacgtgctgttcctcgccgacgaggagttcgacgtggtagtgtgcgaccaggtgtctgcctgtatcccagtgttcaggctggctagacggcggaagaagatcctattttactgtcacttcccagatctgcttctcaccaagagagattcttttcttaaacgactatacagggccccaattgactggatagaggaatacaccacaggcatggcagactgcatcttagtcaacagccagttcacagctgctgtttttaaggaaacattcaagtccctgtctcacatagaccctgatgtcctctatccatctctaaatgtcaccagctttgactcagttgttcctgaaaagctggatgacctagtccccaaggggaaaaaattcctgctgctctccatcaacagatacgaaaggaagaaaaatctgactttggcactggaagccctagtacagctgcgtggaagattgacatcccaagattgggagagggttcatctgatcgtggcaggtggttatgacgagagagtcctggagaatgtggaacattatcaggaattgaagaaaatggtccaacagtccgaccttggccagtatgtgaccttcttgaggtctttctcagacaaacagaaaatctccctcctccacagctgcacgtgtgtgctttacacaccaagcaatgagcactttggcattgtccctctggaagccatgtacatgcagtgcccagtcattgctgttaattcgggtggacccttggagtccattgaccacagtgtcacagggtttctgtgtgagcctgacccggtgcacttctcagaagcaatagaaaagttcatccgtgaaccttccttaaaagccaccatgggcctggctggaagagccagagtgaaggaaaaattttcccctgaagcatttacagaacagctctaccgatatgttaccaaactgctggtataatcagattgtttttaagatctccattaatgtcatttttatggattgtagacccagttttgaaaccaaaaaagaaacctagaatctaatgcagaagagatcttttaaaaaataaacttgagtcttgaatgtgagccactttcctatataccacacctccctgtccacttttcagaaaaaccatgtcttttatgctataatcattccaaattttgccagtgttaagttacaaatgtggtgtcattccatgttcagcagagtattttaattatattttctcgggattattgctcttctgtctataaattttgaatgatactgtgccttaattggttttcatagtttaagtgtgtatcattatcaaagttgattaatttggcttcatagtataatgagagcagggctattgtagttcccagattcaatccaccgaagtgttcactgtcatctgttagggaatttttgtttgtcctgtctttgcctggatccatagcgagagtgctctgtattttttttaagataatttgtatttttgcacactgagatataataaaaggtgtttatc

SEQ ID NO: 4623 - protein, 416 aa, Homo sapien
MAEEQGRERDSVPKPSVLFLHPDLGVGGAERLVLDAALALQARGCSVKIWTAHYDPGHCFAESRELPVRCAGDWLPRGLGWGGRGAAVCAYVRMVFLALYVLFLADEEFDVVVCDQVSACIPVFRLARRRKKILFYCHFPDLLLTKRDSFLKRLYRAPIDWIEEYTTGMADCILVNSQFTAAVFKETFKSLSHIDPDVLYPSLNVTSFDSVVPEKLDDLVPKGKKFLLLSINRYERKKNLTLALEALVQLRGRLTSQDWERVHLIVAGGYDERVLENVEHYQELKKMVQQSDLGQYVTFLRSFSDKQKISLLHSCTCVLYTPSNEHFGIVPLEAMYMQCPVIAVNSGGPLESIDHSVTGFLCEPDPVHFSEAIEKFIREPSLKATMGLAGRARVKEKFSPEAFTEQLYRYVTKLLV

SEQ ID NO: 4624 - DNA, 1544 bp, Homo sapien
  Unsure 1: Unknown base
  Unsure 8: Unknown base
natgcttncaactatttataatgcatcaatttgaacttagarggtrggagatcrgatcatatgtgggaaaatgtaaaagcagggatatcagtgggcattagaataaaaactagggatacaataacttctttgcatatgacaatacttatttgtatataagagaaagaacgaaataacctttattgaaataaagatactatgcaagaaaatgtacagttgtcgaagtggagaaaatgaggatatattcttgcagacgagctataggtcatacatgaatgtctagtgagacattcaaaattcgtatagggtgcagagtaatttcttattgtgaggaactgtccaatgtattgcaagatgttctgcatacttggctctcacatactaaatgctagtagcgcccccacccccacgcccagtcacggtgacaaccacaaaccctatcagatctattcacctttttcagagcagatattttgtaacattctctttgctgacctgaaatgactcatagataatacaatctacttacacacatgaatttcttaaaaaaatcaatttaatgccctaactctcttattaaggagaaatagaaaagaagaaatttataatgaaaagaagatgaatttcattatgtaaacgctcaggcatgactacgctgtttgaaacagacagatgtttactcttccttgtaatgagtaggtttggatttaagagccgattagaggctacttcctgtaaacaagtacaggaaaatgaaactagacgggtgggggacactagaatgaaaaccagtgttagggtaaagacaaaacagactatgtacataatctgtatatgggaaaagaaagagcgaaattaccttacttaaggataataggacaagacaaattacagattgtctcagagaaaacaaatgagttactctctcggacaagctgtaggtcctacctaaatgtccagcaggacattagacagtcgtacagggtacagaataattcttcgttgtgtggcactaacccacacactgcaggacatcgttctccctggctgcatccactcagtgctgggagtagtccccagttattatgaaaccaccaataacccactgaccacagtgagaaccactgattttttccactgacctactgaatatctagcatccttagattggctcaactgttactttcctaaggagtccttctacagaataggtcagatcttggcctcccaaaccccttatttttaaaatactttgcgccttgctttgataatttgtattatgtatccaaactgaaattatctgctttctgcattagaatgtaagccccctgagggttgagtcagtctgtcttgtttgctgtgccacgcctgatgcccagcccagcagcatgctttgtacactgatatattgggtaaattttgttgaataaattaagctcaactatttgtatttcaatagttgagttgtattgcttcctgttcttcaagcttaatttgaactgtctaataaaaagaagtaattaaaaaaaaaaaaaaaaactcga

SEQ ID NO: 4625 - protein, 73 aa, Homo sapien [sequence omitted]

SEQ ID NO: 4626 - DNA, 1429 bp, Homo sapien
cggctctgtaacactccgtccagctctcgcactctcagatgcaaacttccacacaaactcctcggctcgccttgtcccgcgggactagcatatcaagccttccgggacacaccgtgcgatgatatatacgtatatacccctcttgcccttgaaggccggaagtcggtcttacagataaaagcgaaacaggaagtcccgcccctctatggaaagtaaatggtagctcggaagggtcaaaagagtccgcggtttcgccgcgtgagtagctaaatgcggctggggaggtctacgcttctagagcttgagccagcggggcgaccctgccagtggcaggactcggcaccgcgccctccaccgccggcaggagggctgcgtgaacaggttactcccgtcgacatcgaaaggaagccggacgtgggcgggcagagaggtcggcttgctgatgggtccgggtggggcgcgcgtggactatgggcccgggaggtcccttactgtccccgagccgcgggttcctcttgtgcaaaacggggtggcactccaatcgcctgcttggtgattgtggcccccacacacctgtttctacagcgcttaggttcgaacagtaaccctgtaaactaggcactgctgtccccgctttactggtgggaaacgggctcggagagaataaatgagctgccctaagcgactgggacagaaccacagttctcagccgggctttctgagcccacgctgccgccccagcagggatcaaatcacacagtgtgagataagcctcaagagcgggtggccttatgctgccactgagaactgattgggttcagttgcctcatcaaaatccctaagcatggtttggtttggttgttatttttttttttaagttttaaagggaaggaagaggagattgacggttttcctctttccttatcttctcttcagattacaaagttcattgttaatctcaaatattattttggccaacagcttcatcgcagtaggaatggcagccccatctatgaaggaaagacaggtctgctggggggcccgggatgagtactggaagtgtttagatgagaacttagaggatgcttctcaatgcaagaagttaagaagctctttcgaatcaagttgtccccaacagtggataaaatattttgataaaagaagagactacttaaaattcaaagaaaaatttgaagcaggacaatttgagccttcagaaacaactgcaaaatcctaggctgttcataaagattgaaagtattctttctggacattgaaaaagctccactgactatggaacagtaatagtttgaatcatagtgaacatcaatacttgttccctatatacgacacttgataattaagatgatcaagaaccagaagatctgtgaagaaatgaaataaaatggtatttagtaagaaatctcta

SEQ ID NO: 4627 - protein, 71 aa, Homo sapien
RLCNTPSSSRTLRCKLPHKLLGSPCPAGLAYQAFRDTPCDDIYVYTPLALEGRKSVLQIKAKQEVPPLYGK

SEQ ID NO: 4628 - DNA, 1904 bp, Homo sapien; identical to SEQ ID NO: 473

SEQ ID NO: 4629 - protein, 137 aa, Homo sapien
MGAGPSLLLAALLLLLSGDGAVRCDTPANCTYLDLLGTWVFQVGSSGSQRDVNCSVMGPQEKKVVVYLQKLDTAYDDLGNSGHFTIIYNQGFEIVLNDYKWFAFFKDVTDFISHLFMQLGTVGIYDLPHLRNKLVIK

SEQ ID NO: 4630 - DNA, 3828 bp, Homo sapien
cgactccttagagcatggcatggctcagaggtgctggtaaaactgatgggggtttttgctgtccctcccctcagcgccgacaccatgtggatccaggttcggaccatggacgggaggcagacccacacggtggactcgctgtccaggctgaccaaggtggaggagctgaggcggaagatccaggagctgttccacgtggagccaggcctgcagaggctgttctacaggggcaaacagatggaggacggccataccctcttcgactacgaggtccgcctgaatgacaccatccagctcctggtccgccagagcctcgtgctcccccacagcaccaaggagcgggactccgagctctccgacaccgactccggctgctgcctgggccagagtgagtcagacaagtcctccacccacggcgaggcggccgccgagactgacagcaggccagccgatgaggacatgtgggatgagacggaattggggctgtacaaggtcaatgagtacgtcgatgctcgggacacgaacatgggggcgtggtttgaggcgcaggtggtcagggtgacgcggaaggccccctcccgggacgagccctgcagctccacgtccaggccggcgctggaggaggacgtcatttaccacgtgaaatacgacgactacccggagaacggcgtggtccagatgaactccagggacgtccgagcgcgcgcccgcaccatcatcaagtggcaggacctggaggtgggccaggtggtcatgctcaactacaaccccgacaaccccaaggagcggggcttctggtacgacgcggagatctccaggaagcgcgagaccaggacggcgcgggaactctacgccaacgtggtgctgggggatgattctctgaacgactgtcggatcatcttcgtggacgaagtcttcaagattgagcggccgggtgaagggagccccatggttgacaaccccatgagacggaagagcgggccgtcctgcaagcactgcaaggacgacgtgaacagactctgccgggtctgcgcctgccacctgtgcgggggccggcaggaccccgacaagcagctcatgtgcgatgagtgcgacatggccttccacatctactgcctggacccgcccctcagcagtgttcccagcgaggacgagtggtactgccctgagtgccggaatgatgccagcgaggtggtactggcgggagagcggctgagagagagcaagaagaaggcgaagatggcctcggccacatcgtcctcacagcgggactggggcaagggcatggcctgtgtgggccgcaccaaggaatgtaccatcgtcccgtccaaccactacggacccatcccggggatccccgtgggcaccatgtggcggttccgagtccaggtcagcgagtcgggtgtccatcggccccacgtggctggcatacacggccggagcaacgacggagcgtactccctagtcctggcggggggctatgaggatgacgtggaccatgggaattttttcacatacacgggtagtggtggtcgagatctttccggcaacaagaggaccgcggaacagtcttgtgatcagaaactcaccaacaccaacagggcgctggctctcaactgctttgctcccatcaatgaccaagaaggggccgaggccaaggactggcggtcggggaagccggtcagggtggtgcgcaatgtcaagggtggcaagaatagcaagtacgcccccgctgagggcaaccgctacgatggcatctacaaggttgtgaaatactggcccgagaaggggaagtccgggtttctcgtgtggcgctaccttctgcggagggacgatgatgagcctggcccttggacgaaggaggggaaggaccggatcaagaagctggggctgaccatgcagtatccagaaggctacctggaagccctggccaaccgagagcgagagaaggagaacagcaagagggaggaggaggagcagcaggaggggggcttcgcgtcccccaggacgggcaagggcaagtggaagcggaagtcggcaggaggtggcccgagcagggccgggtccccgcgccggacatccaagaaaaccaaggtggagccctacagtctcacggcccagcagagcagcctcatcagagaggacaagagcaacgccaagctgtggaatgaggtcctggcgtcactcaaggaccggccggcgagcggcagcccgttccagttgttcctgagtaaagtggaggagacgttccagtgtatctgctgtcaggagctggtgttccggcccatcacgaccgtgtgccagcacaacgtgtgcaaggactgcctggacagatcctttcgggcacaggtgttcagctgccctgcctgccgctacgacctgggccgcagctatgccatgcaggtgaaccagcctctgcagaccgtcctcaaccagctcttccccggctacggcaatggccggtgatctccaagcacttctcgacaggcgttttgctgaaaacgtgtcggagggctcgttcatcggcactgattttgttcttagtgggcttaacttaaacaggtagtgtttcctccgttccctaaaaaggtttgtcttcctttttttttatttttatttttcaaatctatacattttcaggaatttatgtattctggctaaaagttggacttctcagtattgtgtttagttctttgaaaacataaaagcctgcaatttctcgacaaaacaacacaagattttttaaagatggaatcagaaactacgtggtgtggaggctgttgatgtttctggtgtcaagttctcagaagttgctgccaccaactctttaagaaggcgacaggatcagtccttctctagggttctggcccccaaggtcagagcaagcatcttcctgacagcattttgtcatctaaagtccagtgacatggttccccgtggtggcccgtggcagcccgtggcatggcgtggctcagctgtctgttgaagttgttgcaaggaaaagaggaaacatctcgggcctagttcaaacctttgcctcaaagccatcccccaccagactgcttagcgtctgagatccgcgtgaaaagtcctctgcccacgagagcagggagttggggccacgcagaaatggcctcaaggggactctgctccacgtggggccaggcgtgtgactgacgctgtccgacgaaggcggccacggacggacgccagcacacgaagtcacgtgcaagtgcctttgattcgttccttctttctaaagacgacagtctttgttgttagcactgaattattgaaaatgtcaaccagattctagaaactgcggtcatccagttcttcctgacaccggatgggtgcttgggaaccgtttgagccttatagatcatttacattcaatttttttaactcagcaagtgagaacttacaagagggtttttttttaatttttttttctcttaatgaacacattttctaaatgaattttttttgtagttactgtatatgtaccaagaaagatataacgttagggtttggttgtttttgtttttgtattttttttcttttgaaagggtttgttaatttttctaattttaccaaagtttgcagcctatacctcaataaaacagggatattttaaatcacatacctgcagacaaactggagcaatgttatttttaaagggtttttttcacctccttattcttagattattaatgtattagggaagaatgagacaattttgtgtaggctttttctaaagtccagtactttgtccagattttagattctcagaataaatgtttttcacagattgaaaaaaaaaaaaaa

SEQ ID NO: 4631 - protein, 793 aa, Homo sapien
MWIQVRTMDGRQTHTVDSLSRLTKVEELRRKIQELFHVEPGLQRLFYRGKQMEDGHTLFDYEVRLNDTIQLLVRQSLVLPHSTKERDSELSDTDSGCCLGQSESDKSSTHGEAAAETDSRPADEDMWDETELGLYKVNEYVDARDTNMGAWFEAQVVRVTRKAPSRDEPCSSTSRPALEEDVIYHVKYDDYPENGVVQMNSRDVRARARTIIKWQDLEVGQVVMLNYNPDNPKERGFWYDAEISRKRETRTARELYANVVLGDDSLNDCRIIFVDEVFKIERPGEGSPMVDNPMRRKSGPSCKHCKDDVNRLCRVCACHLCGGRQDPDKQLMCDECDMAFHIYCLDPPLSSVPSEDEWYCPECRNDASEVVLAGERLRESKKKAKMASATSSSQRDWGKGMACVGRTKECTIVPSNHYGPIPGIPVGTMWRFRVQVSESGVHRPHVAGIHGRSNDGAYSLVLAGGYEDDVDHGNFFTYTGSGGRDLSGNKRTAEQSCDQKLTNTNRALALNCFAPINDQEGAEAKDWRSGKPVRVVRNVKGGKNSKYAPAEGNRYDGIYKVVKYWPEKGKSGFLVWRYLLRRDDDEPGPWTKEGKDRIKKLGLTMQYPEGYLEALANREREKENSKREEEEQQEGGFASPRTGKGKWKRKSAGGGPSRAGSPRRTSKKTKVEPYSLTAQQSSLIREDKSNAKLWNEVLASLKDRPASGSPFQLFLSKVEETFQCICCQELVFRPITTVCQHNVCKDCLDRSFRAQVFSCPACRYDLGRSYAMQVNQPLQTVLNQLFPGYGNGR

SEQ ID NO: 4632 - DNA, 1338 bp, Homo sapien
atgaaggtgaagatgctgagccggaatccggacaattatgtccgcgaaaccaagttggacttacagagagttccaagaaactatgatcctgctttacatccttttgaggtcccacgagaatatgtaagagctttaaatgctaccaaactggaacgagtatttgcaaaaccattccttgcttcgctggatggtcaccgtgatggagtcaattgcttggcaaagcatccagagaagctggctactgtcctttctggggcgtgtgatggagaggttagaatttggaatctaactcagcggaattgtatccgtacaatacaagcacatgaaggctttgtacgaggaatatgtactcgcttttgtgggacttcttttttcactgttggtgatgacaaaactgtgaagcagtggaaaatggatgggccaggctatggagacgaggaagagccattacatacaatattaggaaagacagtgtatactgggattgatcatcactggaaagaagctgtttttgccacatgtggacagcaagtagacatttgggatgaacaaagaactaatcctatatgttcaatgacctggggatttgacagtataagtagtgttaaatttaacccaattgagacatttctcttgggaagttgtgcatctgacaggaatatagtactgtacgatatgaggcaagctactcctttgaaaaaggttatcttagatatgagaacaaatacaatctgttggaaccctatggaagctttcatttttacagcagcaaatgaagattataacttatatacttttgatatgcgtgcactggacactcctgtaatggtccatatggatcatgtatctgcagtgcttgatgtggattactctcccactgggaaggagtttgtgtctgctagtttcgataaatctattcgaatctttcctgtagacaaaagtcgaagcagggaggtatatcatacaaagagaatgcaacatgttatctgtgtaaaatggacttctgacagcaagtatattatgtgtggatctgatgaaatgaacattcgcctgtggaaagctaatgcttctgaaaaattgggtgtgcttacatcacgagaaaaagcagccaaggattataaccagaaattgaaggagaaatttcagcattatcctcatataaaacgtatagctcgtcatcgacatctaccaaaatctatctatagccagattcaggaacagcgcatcatgaaagaagctcgtcgacgaaaggaagtgaatcgtattaaacacagcaagcctggatctgtgccacttgtgtcagagaagaagaaacacgtagtggcagttgtaaaataa

SEQ ID NO: 4633 - protein, 445 aa, Homo sapien
MKVKMLSRNPDNYVRETKLDLQRVPRNYDPALHPFEVPREYVRALNATKLERVFAKPFLASLDGHRDGVNCLAKHPEKLATVLSGACDGEVRIWNLTQRNCIRTIQAHEGFVRGICTRFCGTSFFTVGDDKTVKQWKMDGPGYGDEEEPLHTILGKTVYTGIDHHWKEAVFATCGQQVDIWDEQRTNPICSMTWGFDSISSVKFNPIETFLLGSCASDRNIVLYDMRQATPLKKVILDMRTNTICWNPMEAFIFTAANEDYNLYTFDMRALDTPVMVHMDHVSAVLDVDYSPTGKEFVSASFDKSIRIFPVDKSRSREVYHTKRMQHVICVKWTSDSKYIMCGSDEMNIRLWKANASEKLGVLTSREKAAKDYNQKLKEKFQHYPHIKRIARHRHLPKSIYSQIQEQRIMKEARRRKEVNRIKHSKPGSVPLVSEKKKHVVAVVK

SEQ ID NO: 4634 - DNA, 4824 bp, Homo sapien
agcgctttacggcgacggcggctgagtgagaaccttggcggctgtggaggctgccgcggctgcgaaggaggcggcggcggggcggaggaagaggagtggcggcagcggcggcggggacccgtgcggggatggcggaggtaccgcctgggcctagcagcctcctcccaccaccagcacctccggccccggcggcggtcgagccccgctgtcccttcccggcgggggccgccctcgcctgctgcagcgaggacgaggaggacgacgaagagcacgaaggcggcggcagcaggagcccggcgggcggagagtcggcgacggtggcggccaaggggcatccgtgcctccgctgccctcagccgccgagtgagcaagcaagcaagctcaacggattgattagccccgaactgcggcacctccgggcggccgcctccctcaagagcaaggtcctgagcgtagcagaggtggccgcgaccacagccacccctgacggaggccccagagcgactgcaacaaaaggagccggggtacactcgggcgagaggccccctcactccctctctagtaatgcaagaactgcggtccccagcccggtggaggcagcggcggcgagcgatcccgcggcggcccgcaatggactggccgagggcaccgagcaggaggagggaggaggaatgacgagcaggtgcggctgctgtcttcgtccctgaccgccgactgcagcttaagaagcccttcgggcagggaggttgagcctggggaggatcggacgatacgatatgtccgatatgaatccgagctacaaatgcccgatatcatgagactgatcaccaaagatctgtccgaaccctactccatttatacctatagatattttatccacaactggccacagctgtgcttcttggccatggtaggggaggagtgtgtaggtgccatcgtttgcaagttggatatgcacaaaaagatgttccgcagaggttatatagccatgttagccgtggattccaaatacaggagaaatggcattggtactaacttggttaagaaagctatatatgccatggttgagggagactgtgatgaggttgttttggaaaccgaaataacaaataagtccgctttgaaactttatgaaaatcttggttttgttcgagataagaggctgttcagatactatttaaatggagttgatgcactgcgacttaaactgtggctgcgttgagaaactgacatcaaggaacaactatcatccacacagaatcgacctttgcatgcaatgcaatttgtacagaattgctttgcaggtggatttagtaatttccatgcagctcttacctgtcagtgtctcattgagtgtcgcacaatatttgttgcactttggcatggcacatttgttctgaattaaaagattgttttaaacttcaggagttcttttggtaccaacaagatgtgccagttgatagccaagatttatgtgttcatttgcaaagtctgctgacaatgttatttacacagtgatcattttatcacagaaccagtaagtggaacataatttttgttccctaaaaaagccaatgtggattgtaaaagtctttaagtatactaacatttcacacaaaacctgccctagttttctgaagtgggtgagggagacgcttcagttttaggttttattttttcaatattaaattttccattcttgaatattggtacctcagtgattagtgaatgaaaaaaatgtagggtgggtatgtcttacaatgagtaaaggtaacaattaaattttgtctgccagtgcctgtgtagataagtatatttgtcttcatctccagtttttgaatgcatgctatcttttccttttctttaaggcctttgcaagcaaacttttgtttttatttaaattctaaatttgataaattatttcagatttttataatttggatacttttttcaggtgaatgaaagaatggtttactttagaagtccctttttccttacagtaacaagttgaatctacttggaaaattgagaaatggctcaaaagagataagaaaagttgatggagccgggaattgctggggtttagatgcactttttcttttgagagtaagggaagttttggaaaagaatagaaaattagtgtaagttgatatgattttatttaatcaaaattactgctacgctgcgaagaacagcttttacaaagtagctgaatttgtttttcccacttgatttggattcacattgctttcatttcttaaaatgcttcacttcaggttcttggtcttggaaataaatttcaaggtgcattgtatccattttaagctgctttattttattttcacttgtatgagcaaattcttgggggagctttgcttttcttctgccagaaaaacaaaagggggaaatgaaaatcttttttggaatgagttctgtgggttttcttaacagccaccatgtttattagttacattgtgttttggccaatcagtgcaatgtaacaaattttacagttaattgctttcaattgagtcagtaaacctgtgatagataatttatttaactggaaaacctaggtacccataagaaaaaagattcattctctgtgaaaactgtaggaatctgttgttgttttcatttgaatatgctctacttctgctctagtatttggtttggaatatattttgtggctctaattactgtatttttaaaaaccctacctccattaacagttggtaaaggccccttttcaggaaagtttgttgctttttttttttttttaaagggaaagctgctctttgctcagtatagtgttttgaaagtgaacatagtaacaaatactttaaaaataaagatacacaatttatatttgaaaataaaaactttctgctggtgggattatttatagttctttatttttaaagaaaatgttttcctttttatattgctcttgaaagtttaatgagcagaatacaatactggttataataaaaatatggtaaccacacagtactcagcctttcaatatgtttttggtcaaacttcatttaggcactagcatttagaagaataccaatcacagtgatgcttttgttatttaatatgaaggaaatggaactaaaacatttatgtcatcaaattttatttcacttctttatatttgacttgctggttgatacataatggttgatgaacatatatttgcttaaatcactaatagggatggttgtaaagtagatagatcattggttcaaccattttagtgtttttgccagattgtcaatgaaaccatcatactgaccttttcctccaaaattgccaaattgactgaactggttgggtgtttgtaaagatgacgttaactgtgtgactaaaaagtcagatggttgccatattgtttggaatatgttgaatgtcagtgtatgccttatgtctttaattgggtatgcaaaaaaatttttacttaagtagattaaaattttaacctctagcatgaaaacccagcaccaacactgaaagactccattcaggttgaagtagcctcaaacagtaatttactttttgataataggctgttgtttttcttaaataagcttaaaacaattctatctgaaattggtagcatgggttcacttggctacaactgagcaaaatagatgcaactttcttttaatggggtgctgcctctttaggactgactgtactatccactgacactggtttggcagttggtactgctgaacatttttatacatgctaccatgaagctatatatgttagtattgaagaagctaacgggtatactatcatttttgatgtgtgggctgattataatttcctgtatttcctgtacattgggatgaaactactttagcaaagtccacagatcagaaaccagacggtagtttttgaagttgaaaccagcaaaataagaaaaaataaaaaatcgattttaatattttctgcctctttcccaaattacccttcccacttgctcgacaaatctatgtaaagcagtttgttttttcatgttttaactttaccttgccctgtgttatggtactggctgacatgtctaagactggatgtgtatatttattatggtgtctaaaaatcatgaagttcatcacttttcaggagtatagataaaatcaaattggtagtacatcagagttacttttcagtgcaccatgacatcactaaaatgagtgctgtaatgttacagggctttcaggtttgtaaaaacataaccataaattatattgacgtcagatatgagttgagtatctataaaatatcacgtgtatctcaaaatattggactgctgtttgactggatattgctgcataattttcttctattgtcccatatccttttggagagagatttaatgggatttgaaatgtgcaagctgtctaaataagatgcagtcaaataaagtatggttaagttgtgtttgcatttttcttttagatacagctgtgtgcattttatgattgggttgttttgcttttacctactaagtaaaacagcaacaaacaatatattgtttcccgcttcctgcctttcatctaagagttacggggaagaagtattacataattgtcatcactgttgtgtgttctgacaaagtaaatttgaaaataacatgaacttgatttttctaaaagtactcagtcaactcatatgtcagttatcggtacattttccatgtgttcagtcaaaagtttatctttttagtctgtttcatagcagtttatttctaagacagtttttattttaatttacttttttgtctgtacactgccactctgtaatgttccc

SEQ ID NO: 4635 - protein, 192 aa, Homo sapien
MAEVPPGPSSLLPPPAPPAPAAVEPRCPFPAGAALACCSEDEEDDEEHEGGGSRSPAGGESATVAAKGHPCLRCPQPPSEQASKLNGLISPELRHLRAAASLKSKVLSVAEVAATTATPDGGPRATATKGAGVHSGERPPHSLSSNARTAVPSPVEAAAASDPAAARNGLAEGTEQEEGGGMTSRCGCCLRP

SEQ ID NO: 4636 - DNA, 1285 bp, Homo sapien
ggcacgagggtggcgtggagtggcgtggcgtggcggggtctcgcggcgcgggcgcgcacccggagctgtggacggagagtgcctccctctggcctcagtttcctcatgttgtagtagcggagcatggcccggaccgggcccccgagaccgccccgtgcaacctcaccgccagcctgggggcctcagcgactgggacgggaccaaggggctcggggattctccctgcccccggccctggtgcgtgactgaccctcctgttcccagagcccccagcgcaggccgggatgttcgtcctggtggaaatggtggacaccgtccggatccccccttggcagtttgagaggaagctcaacgactccattgccgaggagctgaacaagaagttggccaacaaggtcgtgtacaacgtgggactctgcatttgtctgtttgatatcaccaaactggaggatgcctatgtattccctggggatggcgcatcacacaccaaagtctctctaggcttcttcgatgacattctcatccccccagagtcactgcagcagccagccaagttcgacgaagcggagcaggtgtgggtgtgggagtacgagacggaggaaggagcacacgacctctacatggacaccggcgaggagatccgcttccgggtggtggacgagagctttgttgacacgtcccccacagggcccagctcagcagatgccaccacttccagtgaggagctgccaaagaaggaggctccgtacacgcttgtgggatccatcagtgagccaggcctgggccttctctcctggtggaccagcaactagccctggggctggacagtggaccctaccagcctgcgggaaggtggtatggccggctgtgaagacaacagcagctgaggccgatgctaaggagatagtgtctcgagctggacagtgaggcaaggccaggagtgcccaccagcttgccccgctcctccaccatctaggccctgctcctccttcactgcagtgatggatccatctgtggctgtggctgttgggcctccactgaccttgactgaaaagacccttcctggaccctggacttgacaacaaacggcacagacaccaatcactcacagaacagtcactggttttggattcttgttttccttgcaagaacaaaaggttctctagaatccttcagccaccaatgaaatgatcaggcaggagaaaaactttagatgggagtcttgtcatcaaaaataaatacagttgcatggaaaaaaaaaaaaaaaaaaaaaaaaaaaaaaaaa

SEQ ID NO: 4637 - protein, 175 aa, Homo sapien
MFVLVEMVDTVRIPPWQFERKLNDSIAEELNKKLANKVVYNVGLCICLFDITKLEDAYVFPGDGASHTKVSLGFFDDILIPPESLQQPAKFDEAEQVWVWEYETEEGAHDLYMDTGEEIRFRVVDESFVDTSPTGPSSADATTSSEELPKKEAPYTLVGSISEPGLGLLSWWTSN

SEQ ID NO: 4638 - DNA, 615 bp, Homo sapien
ggggactccgggaggaggaacatggccgtggcggacctcgctctcattcctgatgtggacatcgactccgacggcgtcttcaagtatgtgctgatccgagtccactcggctccccgctccgggctccggctgcagagagcaaggagatcgtgcgcggctacaagtgggctgagtaccatgcggacatctacgacaaagtgtcgggcgacatgcagaagcaaggctgcgactgtgagtgtctgggcggcgggcgcatctcccaccagagtcaggacaagaagattcacgtgtacggctattccatggcctatggtcctgcccagcacgccatttcaactgagaaaatcaaagccaagtaccccgactacgaggtcacctgggctaacgacggctactgagcactcccagcccggggcctgctgcctccagcagccacttcagagccccgcctttgcctgcactcctcttgcagggctggccctgcctgctcctgcggcagcctctggtgacgtgctgtccaccaggccttggagacaggctagcctggccacagaattaaacgtgttgccacacctgccggcttcttaaaaaaaaaaaaaaaaaaaaaaaaaaaaa

SEQ ID NO: 4639 - protein, 188 aa, Homo sapien
MAVADLALIPDVDIDSDGVFKYVLIRVHSAPRSGLRLQRARRSCAATSGLSTMRTSTTKCRATCRSKAATVSVWAAGASPTRVRTRRFTCTAIPWPMVLPSTPFQLRKSKPSTPTTRSPGLTTATEHSQPGACCLQQPLQSPAFACTPLAGLALPAPAAASGDVLSTRPWRQASLATELNVLPHLPAS

SEQ ID NO: 4640 - DNA, 1113 bp, Homo sapien
agcgccgccgcggtctgcggaatgtcaactattcaacatggaggcggaggtcgataagctggaactgatgttccagaaagctgagtctgatctggattacattcaatacaggctggaatatgaaatcaagactaatcatcctgattcagcaagtgagaaaaatccagttacactcttaaaggaattgtcagtgataaagtctcgatatcaaactttgtatgcccgctttaaaccagttgctgttgagcagaaagagagtaagagccgcatttgtgctactgtgaaaaagactatgaatatgatacaaaaactacagaagcaaacagacctggagctgtcaccactgactaaagaagagaaaactgcggcagagcaattcaaatttcacatgccagatttatgaagaaatggacttggaaaggaaattctaacagagaagagcttaattccggagaaatttaggaagatgtcttgttaacccttgatgtctagagattgggggctggtgaagggggtttggcttcaatgactggataatgatatctttcatgagagagattataagaagaagggcagataatatatgaataaagttcagccaaaaggatcaaatgagaataaaacgatttaaatatatgtacacacgcatgcacacacacacttagtcttgtaatttcaggccagaaattctcaacactattttgcatctgttttctttttctaagtcatgataatatagatgttctggtctatcataaaagaatgtttatgtacatttcagtcattcggtatgtggctttgtaaattaaagtataggcaaaacatttgtgttatacatgatatataatttcattttgtaaatgttgattgcacatgtggtcacattattgttgagactgcttttatgtgacctgtagtctcccacagaacctaaagtaataagctggcttttctgtgatagccacgtttgcgtatttctttccctatttcccttgcctgctaatgttgaacagcatgaacttgctttctgatgctgttttagactgtccctgttgtatctcaataatatctttgttttcctacaaaaaaaaaaaaaaaaagaaaaaaaaaaaa

SEQ ID NO: 4641 - protein, 121 aa, Homo sapien
MEAEVDKLELMFQKAESDLDYIQYRLEYEIKTNHPDSASEKNPVTLLKELSVIKSRYQTLYARFKPVAVEQKESKSRICATVKKTMNMIQKLQKQTDLELSPLTKEEKTAAEQFKFHMPDL

SEQ ID NO: 4642 - DNA, 2333 bp, Homo sapien
ggcacgaggcgagtccgagcgccgccatggctctgctgtccgagggcctggacgagctgcccgccgcctgcctgtcgccgtgcgggccgcccaacccgaccgagctgttcagcgagtcacggcgcctggctctggaggagctggtggcgggcggccccgaagccttcgcggccttcctgcgacgcgagcgcctggctcgtttcctgaaccccgatgaggtgcacgccattctgcgcgcggcggagaggccgggagaggagggcgcggcggcggcggcggcggccgaggactcgttcggctcctcgcacgactgctcttcgggcacctacttccccgagcagtcggacctggagccaccgctgttggagcttggctggcccgccttctaccagggcgcctaccgcggcgccacgcgtgtcgagacgcacttccagccccgcggcgctggcgaaggtggcccctacggctgcaaggacgctctgcgccagcagctccgctcggcgcgagaggtgattgcagtggtcatggacgtgttcacagacatcgacatcttcagagacctgcaagaaatatgcaggaaacagggagttgctgtgtatatccttctggaccaggctctcctctctcaatttttggatatgtgcatggatctgaaagttcatcctgaacaggaaaagttaatgacagttcggactatcacaggaaatatctactatgcaaggtcaggaactaagattattgggaaggttcacgaaaagttcacgttgattgatggcatccgcgtggcaacaggctcctacagttttacatggacggatggcaaattaaacagcagtaacttggtaattctgtctggccaagtggttgaacactttgatctggagttccgaatcctgtatgcccagtccaagcccatcagccccaaactcctgtctcacttccagagcagcaacaagtttgatcacctcaccaaccgaaaaccacagtccaaggagctcaccctgggcaacctgctgcggatgcggctggctaggctgtcaagtactcccaggaaggcggacctggacccagagatgcccgcagagggcaaggcagagcgcaagccccatgactgtgagtcctctactgttagtgaggaagactacttcagcagccacagggacgagctccagagcagaaaggccattgacgctgccactcaaacagagccaggagaggagatgccagggctgagtgtgagtgaggtgggaacacaaaccagcatcaccacagcatgtgctggtacccagactgcagtcatcaccaggatagcaagctctcaaaccacgatttggtccagatcgaccactactcagactgacatggatgagaacattctctttcctcgaggaactcaatctacagaagggtcaccagtctcaaaaatgtctgtatcgagatcttccagtttgaagtcttcctcctctgtgtcttcccaaggctctgtggcaagctccactggttctcccgcttccatcagaaccactgacttccacaatcctggctatcccaagtacctgggcaccccccacctggaactgtacttgagtgactcacttagaaacttgaacaaagagcggcaattccacttcgctggtatcaggtcccggctcaaccacatgctggctatgctgtcaaggagaacactctttactgaaaaccaccttggccttcattctggcaatttcagcagagttaatttgcttgctgttagagatgtagcactttatccttcctatcagtaactgctccgtgttcagactcctggtttcttccaggcttacagtggacatcatcagcttcctgctttaaaaaatatcttatgtccctaattgcctttcttttacctgactttgtcacctttgttgtctttgaattctttaggctgcatattattttacatgctttgttttgtcatgtatataccaggtattggttttatggtttaaacactatggatacaggggtttgttttgcacaattttaatagtcatgcactacataatgatgttttggtcgatgacagaccacgtatatgttggcagtctcataagattataatactgtatttttactataccttttctatgtttagatacaaataccattatgttacagttgcctacagtattcagtgcagtaacatgatgtacaggtttgtagcctgttttgcatttttcttaggttgtatgctcttctgttttaaaggtttgaatcaccagcatttttgtgatcaaaatcctatttagaaaaaataaaactactttctgtttaaaaaaaaaaaaaaaaaaaaa

SEQ ID NO: 4643 - protein, 593 aa, Homo sapien
HEASPSAAMALLSEGLDELPAACLSPCGPPNPTELFSESRRLALEELVAGGPEAFAAFLRRERLARFLNPDEVHAILRAAERPGEEGAAAAAAAEDSFGSSHDCSSGTYFPEQSDLEPPLLELGWPAFYQGAYRGATRVETHFQPRGAGEGGPYGCKDALRQQLRSAREVIAVVMDVFTDIDIFRDLQEICRKQGVAVYILLDQALLSQFLDMCMDLKVHPEQEKLMTVRTITGNIYYARSGTKIIGKVHEKFTLIDGIRVATGSYSFTWTDGKLNSSNLVILSGQVVEHFDLEFRILYAQSKPISPKLLSHFQSSNKFDHLTNRKPQSKELTLGNLLRMRLARLSSTPRKADLDPEMPAEGKAERKPHDCESSTVSEEDYFSSHRDELQSRKAIDAATQTEPGEEMPGLSVSEVGTQTSITTACAGTQTAVITRIASSQTTIWSRSTTTQTDMDENILFPRGTQSTEGSPVSKMSVSRSSSLKSSSSVSSQGSVASSTGSPASIRTTDFHNPGYPKYLGTPHLELYLSDSLRNLNKERQFHFAGIRSRLNHMLAMLSRRTLFTENHLGLHSGNFSRVNLLAVRDVALYPSYQ

SEQ ID NO: 4644 - DNA, 8484 bp, Homo sapien
cggtttaatctagtgtgtgactgggtctgtgtgagggagagagtgtgtgtggtgtggaggtgaaacggaggcaagaaagggggctacctcaggagcgagggacaaagggggcgtgaggcacctaggccgcggcaccccggcgacaggaagccgtcctgaaccgggctaccgggtaggggaagggcccgcgtagtcctcgcagggccccagagctggagtcggctccacagccccgggccgtcggcttctcacttcctggacctccccggcgcccgggcctgaggactggctcggcggagggagaagaggaaacagacttgagcagctccccgttgtctcgcaactccactgccgaggaactctcatttcttccctcgctccttcaccccccacctcatgtagaagggtgctgaggcgtcgggagggaggaggagcctgggctaccgtccctgccctccccacccccttcccggggcgctttggtgggcgtggagttggggttgggggggtgggtgggggttgctttttggagtgctggggaacttttttcccttcttcaggtcaggggaaagggaatgcccaattcagagagacatgggggcaagaaggacgggagtggaggagcttctggaactttgcagccgtcatcgggaggcggcagctctaacagcagagagcgtcaccgcttggtatcgaagcacaagcggcataagtccaaacactccaaagacatggggttggtgacccccgaagcagcatccctgggcacagttatcaaacctttggtggagtatgatgatatcagctctgattccgacaccttctccgatgacatggccttcaaactagaccgaagggagaacgacgaacgtcgtggatcagatcggagcgaccgcctgcacaaacatcgtcaccaccagcacaggcgttcccgggacttactaaaagctaaacagaccgaaaaagaaaaaagccaagaagtctccagcaagtcgggatcgatgaaggaccggatatcgggaagttcaaagcgttcgaatgaggagactgatgactatgggaaggcgcaggtagccaaaagcagcagcaaggaatccaggtcatccaagctccacaaggagaagaccaggaaagaacgggagctgaagtctgggcacaaagaccggagtaaaagtcatcgaaaaagggaaacacccaaaagttacaaaacagtggacagcccaaaacggagatccaggagcccccacaggaagtggtctgacagctccaaacaagatgatagcccctcgggagcttcttatggccaagattatgaccttagtccctcacgatctcatacctcgagcaattatgactcctacaagaaaagtcctggaagtacctcgagaaggcagtcggtcagtcccccttacaaggagccttcggcctaccagtccagcacccggtcaccgagcccctacagtaggcgacagagatctgtcagtccctatagcaggagacggtcgtccagctacgaaagaagtggctcttacagcgggcgatcgcccagtccctatggtcgaaggcggtccagcagccctttcctgagcaagcggtctctgagtcggagtccactccccagtaggaaatccatgaagtccagaagtagaagtcctgcatattcaagacattcatcttctcatagtaaaaagaagagatccagttcacgcagtcgtcattccagtatctcacctgtcaggcttccacttaattccagtctgggagctgaactcagtaggaaaaagaaggaaagagcagctgctgctgctgcagcaaagatggatggaaaggagtccaagggttcacctgtatttttgcctagaaaagagaacagttcagtagaggctaaggattcaggtttggagtctaaaaagttacccagaagtgtaaaattggaaaaatctgccccagatactgaactggtgaatgtaacacatctaaacacagaggtaaaaaattcttcagatacagggaaagtaaagttggatgagaactccgagaagcatcttgttaaagatttgaaagcacagggaacaagagactctaaacccatagcactgaaagaggagattgttactccaaaggagacagaaacatcagaaaaggagacccctccacctcttcccacaattgcttctcccccaccccctctaccaactactacccctccacctcagacaccccctttgccacctttgcctccaataccagctcttccacagcaaccacctctgcctccttctcagccagcatttagtcaggttcctgcttccagtacttcaactttgcccccttctactcactcaaagacatctgctgtgtcctctcaggcaaattctcagccccctgtacaggtttctgtgaagactcaagtatctgtaacagctgctattccacacctgaaaacttcaacgttgcctcctttgcccctcccacccttattacctggagatgatgacatggatagtccaaaagaaactcttccttcaaaacctgtgaagaaagagaaggaacagaggacacgtcacttactcacagaccttcctctccctccagagctccctggtggagatctgtctcccccagactctccagaaccaaaggcaatcacaccacctcagcaaccatataaaaagagaccaaaaatttgttgtcctcgttatggagaaagaagacaaacagaaagcgactgggggaaacgctgtgtggacaagtttgacattattgggattattggagaaggaacctatggccaagtatataaagccaaggacaaagacacaggagaactagtggctctgaagaaggtgagactagacaatgagaaagagggcttcccaatcacagccattcgtgaaatcaaaatccttcgtcagttaatccaccgaagtgttgttaacatgaaggaaattgtcacagataaacaagatgcactggatttcaagaaggacaaaggtgccttttaccttgtatttgagtatatggaccatgacttaatgggactgctagaatctggtttggtgcacttttctgaggaccatatcaagtcgttcatgaaacagctaatggaaggattggaatactgtcacaaaaagaatttcctgcatcgggatattaagtgttctaacattttgctgaataacagtgggcaaatcaaactagcagattttggacttgctcggctctataactctgaagagagtcgcccttacacaaacaaagtcattactttgtggtaccgacctccagaactactgctaggagaggaacgttacacaccagccatagatgtttggagctgtggatgtattcttggggaactattcacaaagaagcctatttttcaagccaatctggaactggctcagctagaactgatcagccgactttgtggtagcccttgtccagctgtgtggcctgatgttatcaaactgccctacttcaacaccatgaaaccgaagaagcaatatcgaaggcgtctacgagaagaattctctttcattccttctgcagcacttgatttattggaccacatgctgacactagatcctagtaagcggtgcacagctgaacagaccctacagagcgacttccttaaagatgtcgaactcagcaaaatggctcctccagacctcccccactggcaggattgccatgagttgtggagtaagaaacggcgacgtcagcgacaaagtggtgttgtagtcgaagagccacctccatccaaaacttctcgaaaagaaactacctcagggacaagtactgagcctgtgaagaacagcagcccagcaccacctcagcctgctcctggcaaggtggagtctggggctggggatgcaataggccttgctgacatcacacaacagctgaatcaaagtgaattggcagtgttattaaacctgctgcagagccaaaccgacctgagcatccctcaaatggcacagctgcttaacatccactccaacccagagatgcagcagcagctggaagccctgaaccaatccatcagtgccctgacggaagctacttcccagcagcaggactcagagaccatggccccagaggagtctttgaaggaagcaccctctgccccagtgatcctgccttcagcagaacagacgacccttgaagcttcaagcacaccagctgacatgcagaatatattggcagttctcttgagtcagctgatgaaaacccaagagccagcaggcagtctggaggaaaacaacagtgacaagaacagtgggccacaggggccccgaagaactcccacaatgccacaggaggaggcagcagcatgtcctcctcacattcttccaccagagaagaggccccctgagccccccggacctccaccgccgccacctccaccccctctggttgaaggcgatctttccagcgccccccaggagttgaacccagccgtgacagccgccttgctgcaacttttatcccagcctgaagcagagcctcctggccacctgccacatgagcaccaggccttgagaccaatggagtactccacccgaccccgtccaaacaggacttatggaaacactgatgggcctgaaacagggttcagtgccattgacactgatgaacgaaactctggtccagccttgacagaatccttggtccagaccctggtgaagaacaggaccttctcaggctctctgagccaccttggggagtccagcagttaccagggcacagggtcagtgcagtttccaggggaccaggacctccgttttgccagggtccccttagcgttacacccggtggtcgggcaaccattcctgaaggctgagggaagcagcaattctgtggtacatgcagagaccaaattgcaaaactatggggagctggggccaggaaccactggggccagcagctcaggagcaggccttcactgggggggcccaactcagtcttctgcttatggaaaactctatcgggggcctacaagagtcccaccaagagggggaagagggagaggagttccttactaacccagagacttcagtgtcctgaaagattcctttcctatccatccttccatccagttctctgaatctttaatgaaatcatttgccagagcgaggtaatcatctgcatttggctactgcaaagctgtccgttgtattccttgctcacttgctactagcaggcgacttacgaaataatgatgttggcaccagttccccctggatgggctatagccagaacatttacttcaactctaccttagtagatacaagtagagaatatggagaggatcattacattgaaaagtaaatgttttattagttcattgcctgcacttactgatcggaagagagaaagaacagtttcagtattgagatggctcaggagaggctctttgatttttaaagttttggggtggggggttgtgtgtggtttctttcttttgaattttaatttaggtgttttgggtttttttcctttaaagagaatagtgttcacaaaatttgagctgctctttggcttttgctataagggaaacagagtggcctggctgatttgaataaatgtttctttcctctccaccatctcacattttgcttttaagtgaacactttttccccattgagcatcttgaacatactttttttccaaataaattactcatccttaaagtttactccactttgacaaaagatacgcccttctccctgcacataaagcaggttgtagaacgtggcattcttgggcaagtaggtagactttacccagtctctttccttttttgctgatgtgtgctctctctctctctttctctctctctctctctctctctctctctctgtctgtctcgcttgctcgctctcgctgtttctctctctttgaggcatttgtttggaaaaaatcgttgagatgcccaagaacctgggataattctttactttttttgaaataaaggaaaggaaattcagactcttacattgttctctgtaactcttcaattctaaaatgttttgttttttaaaccatgttctgatggggaagttgatttgtaagtgtggacagcttggacattgctgctgagctgtggttagagatgatgcctccattcctagagggctaataacagcatttagcatattgtttacacatatatttttatgtcaaaaaaaaaacaaaaacctttcaaacagagcattgtgatattgtcaaagagaaaaacaaatcctgaagatacatggaaatgtaacctagtttagggtgggtatttttctgaagatacatcaatacctgaccttttttaaaaaaataattttaaaacagcatactgtgaggaagaacagtattgacatacccacatcccagcatgtgtaccctgccagttcttttagggatttttcctccaaagagatttggatttggttttggtaaaaggggttaaattgtgcttccaggcaagaactttgccttatcataaacaggaaatgaaaaagggaagggctgtcaggatgggataatttgggaggcttctcattctggcttctatttctatgtgagtaccagcatatagagtgttttaaaaacagatacatgtcatataatttatctgcacagacttagaccttcaggaaacataggttaagcccccttttacaaagaaaaagtaaacatacttcagcatcttggagggtagttttcaaaactcaagtttcatgtttcaatgccaagttcttattttaaaaaataaaatctacttataagagaaaggtgcattacttaaaaaaaaaaaactttaaagaaatgaaagaagaaccctcttcagatacttacttgaagactgttttcccctgttaatgagatatagctagatatcggtgtgtgtatttctttattattctctggtttttgatctggccttgcctccagggccaaacactgatttagaaagagagccttctagctattttggcattgatggctttttataccagtgtgtccagttagatttactaggcttactgacatgctattggtaaatcgcattaaagttcatctgaaccttctgtctgttgacttcttagtcctcagacatgggcctttgtgttttagaatatttgaatttgagttattgggccccactccctgttttttattaaagaacgtgagcctgggatactttcagaagtatctgttcaatgaaaaaaagttggtttcccatcaaatatgaataaaattctctatatatttcattgtattttggttatcagcagtcatcaataatgtttttccctcccctctcccacctcttatttttaattatgccaaatatcctaaataatatacttaagcctccattccctcatccctactagggaagggggtgagtgtatgtgtgagtgtatgtgtatgtatgatcccatctcacccccacccccattttgggagtcttttaaaatgaaaacaaagtttggtagttttgactatttctaaaagcagaggagaaaaaaaaacttatttaaatatcctggaatctgtatggaggaagaaaaggtatttgttaatttttcagttacgttatctataaacatgatggaagtaaaggtttggcagaatttcaccttgactatttgaaaattacagacccaattaattccattcaaaagtggttttcgttttgttttaattattgtacaatgagagatattgtctattaaatacattattttgaacagatgagaaatctgattctgttcatgagtgggaggcaaaactggtttgaccgtgatcatttttgtggttttgaaaacaaatatacttgacccagtttccttagttttttcttcaactgtccataggaacgataagtatttgaaagcaacatcaaatctatacgtttaaagcagggcagttagcacaaatttgcaagtagaacttctattagcttatgccatagacatcacccaaccacttgtatgtgtgtgtgtatatataatatgcatatatagttaccgtgctaaaatggttaccagcaggttttgagagagaatgctgcatcagaaaagtgtcagttgccacctcattctccctgatttaggttcctgacactgattcctttctctctcgtttttgacccccattgggtgtatcttgtctatgtacagatattttgtaatatattaaatttttttctttcagtttataaaaatggaaagtggagattggaaaattaaatatttcctgttactataccacttttgctccattgcatttacttcttaatctgtaccccctgagcatatctaatcatgtataaaggacgtttttcctccactttatcttaggggttctctgtctcagaatcattatagactcattaactccccctcccagcaaaaggttatcaggatttgaagaggtgcttgaaaacgctagactaggaactagagaataaaaaagttggga

SEQ ID NO: 4645 - protein, 1490 aa, Homo sapien
MPNSERHGGKKDGSGGASGTLQPSSGGGSSNSRERHRLVSKHKRHKSKHSKDMGLVTPEAASLGTVIKPLVEYDDISSDSDTFSDDMAFKLDRRENDERRGSDRSDRLHKHRHHQHRRSRDLLKAKQTEKEKSQEVSSKSGSMKDRISGSSKRSNEETDDYGKAQVAKSSSKESRSSKLHKEKTRKERELKSGHKDRSKSHRKRETPKSYKTVDSPKRRSRSPHRKWSDSSKQDDSPSGASYGQDYDLSPSRSHTSSNYDSYKKSPGSTSRRQSVSPPYKEPSAYQSSTRSPSPYSRRQRSVSPYSRRRSSSYERSGSYSGRSPSPYGRRRSSSPFLSKRSLSRSPLPSRKSMKSRSRSPAYSRHSSSHSKKKRSSSRSRHSSISPVRLPLNSSLGAELSRKKKERAAAAAAAKMDGKESKGSPVFLPRKENSSVEAKDSGLESKKLPRSVKLEKSAPDTELVNVTHLNTEVKNSSDTGKVKLDENSEKHLVKDLKAQGTRDSKPIALKEEIVTPKETETSEKETPPPLPTIASPPPPLPTTTPPPQTPPLPPLPPIPALPQQPPLPPSQPAFSQVPASSTSTLPPSTHSKTSAVSSQANSQPPVQVSVKTQVSVTAAIPHLKTSTLPPLPLPPLLPGDDDMDSPKETLPSKPVKKEKEQRTRHLLTDLPLPPELPGGDLSPPDSPEPKAITPPQQPYKKRPKICCPRYGERRQTESDWGKRCVDKFDIIGIIGEGTYGQVYKAKDKDTGELVALKKVRLDNEKEGFPITAIREIKILRQLIHRSVVNMKEIVTDKQDALDFKKDKGAFYLVFEYMDHDLMGLLESGLVHFSEDHIKSFMKQLMEGLEYCHKKNFLHRDIKCSNILLNNSGQIKLADFGLARLYNSEESRPYTNKVITLWYRPPELLLGEERYTPAIDVWSCGCILGELFTKKPIFQANLELAQLELISRLCGSPCPAVWPDVIKLPYFNTMKPKKQYRRRLREEFSFIPSAALDLLDHMLTLDPSKRCTAEQTLQSDFLKDVELSKMAPPDLPHWQDCHELWSKKRRRQRQSGVVVEEPPPSKTSRKETTSGTSTEPVKNSSPAPPQPAPGKVESGAGDAIGLADITQQLNQSELAVLLNLLQSQTDLSIPQMAQLLNIHSNPEMQQQLEALNQSISALTEATSQQQDSETMAPEESLKEAPSAPVILPSAEQTTLEASSTPADMQNILAVLLSQLMKTQEPAGSLEENNSDKNSGPQGPRRTPTMPQEEAAACPPHILPPEKRPPEPPGPPPPPPPPPLVEGDLSSAPQELNPAVTAALLQLLSQPEAEPPGHLPHEHQALRPMEYSTRPRPNRTYGNTDGPETGFSAIDTDERNSGPALTESLVQTLVKNRTFSGSLSHLGESSSYQGTGSVQFPGDQDLRFARVPLALHPVVGQPFLKAEGSSNSVVHAETKLQNYGELGPGTTGASSSGAGLHWGGPTQSSAYGKLYRGPTRVPPRGGRGRGVPY

SEQ ID NO: 4646 - DNA, 6582 bp, Homo sapien
gacgctcctcccggagagtagtgagacccctggtgcggggcgattggcggcgggagcgatgagtggcagccgcacggcccaacgggagctgtgcgtgggccgcggggcggggccagggcgggtgcgcggcggcggcggggtggctgggccggcggcggcggcggtacgaggcgcgcgctcggggtcccggtcgcgaggaggaggaggatgtggcgcgcggaggggaaatggctgccgaaaacaagccggaagagcgtttcccaaagtgtattctgcggaactagcacctactgtgttctcaacaccgtgccacctatagaagatgatcatgggaacagcaatagtagtcatgtaaaaatctttttaccgaaaaagctgcttgaatgtctgccgaaatgttcaagtttaccaaaagagaggcaccgctggaacactaatgaggaaattgcagcttatttaataacatttgagaaacacgaagaatggctaaccacctcccctaagacaagaccacagaatggctcaatgatactctacaacaggaagaaagtgaaatacaggaaagatgggtattgctggaaaaagaggaaagatgggaaaacgaccagagaggaccacatgaaactcaaggtccagggagtggagtgcttgtacggctgctatgtccattcctccatcatccccaccttccaccggaggtgctactggctccttcagaaccccgacatcgtcctggtgcactacctgaacgtgccggccatcgaggactgcggcaagccttgcggccccatcctctgctccatcaacaccgacaagaaggagtgggcgaaatggacgaaagaagagctcatcgggcagctgaaacccatgttccatggcatcaagtggacctgcagcaatgggaacagcagctcaggcttctcggtggaacagctggtgcagcagatcctcgacagccaccagaccaagccccagccgcggacccacaactgcctctgcaccggcagcctgggagctggcggcagcgtgcatcacaagtgtaacagcgccaaacaccgcatcatctcgcccaaggtggagccacggacaggggggtacgggagccactcggaggtgcagcacaatgacgtgtcggagggcaagcacgagcacagccacagcaagggctccagccgtgagaagaggaacggcaaggtggccaagcccgtgctcctgcaccagagcagcaccgaggtctcctccaccaaccaggtggaagtccccgacaccacccagagctcccctgtgtccatcagcagcgggctcaacagcgacccggacatggtggacagcccggtggtcacaggtgtgtccggtatggcggtggcctctgtgatggggagcttgtcccagagcgccacggtgttcatgtcagaggtcaccaatgaggccgtgtacaccatgtcccccaccgctggccccaaccaccacctcctctcacctgacgcctctcagggcctcgtcctggccgtgagctctgatggccacaagttcgcctttcccaccacgggcagctcagagagcctgtccatgctgcccaccaacgtgtccgaagagctggtcctctccaccaccctcgacggtggccggaagattccagaaaccaccatgaactttgaccccgactgtttccttaataacccaaagcagggccagacgtacgggggtggaggcctgaaagccgagatggtcagctccaacatccggcactcgccacccggggagcggagcttcagctttaccaccgtcctcaccaaggagatcaagaccgaggacacctccttcgagcagcagatggccaaagaagcgtactcctcctccgcggcggctgtggcagccagctccctcaccctgaccgccggctccagcctcctgccgtcgggcggcggcctgagtcccagcaccaccctggagcagatggacttcagcgccatcgactccaacaaggactacacgtccagcttcagccagacgggccacagcccccacatccaccagaccccctccccgagcttcttcctgcaggacgccagcaaacccctccccgtcgagcagaacacccacagcagcctgagtgactctgggggcaccttcgtgatgcccacggtgaaaacggaggcctcgtcccaaaccagctcctgcagcggtcacgtggagacgcggatcgagtccacttcctccctccacctcatgcagttccaggccaacttccaggccatgacggcagaaggggaggtcaccatggagacctcgcaggcggcggaagggagcgaggtcctgctcaagtctggggagctgcaggcttgcagctctgagcactacctgcagccggagaccaacggggtaatccgaagcgccggcggcgtccccatcctcccgggcaacgtggtgcagggactctaccccgtggcccagcccagcctcggcaacgcctccaacatggagctcagcctggaccactttgacatctccttcagcaaccagttctccgacctgatcaacgacttcatctccgtggaggggggcagcagcaccatctatgggcaccagctggtgtcgggggacagcacggcgctctcacagtcagaggacggggcgcgggcccccttcacccaggcagagatgtgcctcccctgctgtagcccccagcagggtagcctgcagctgagcagctcggagggcggggccagcaccatggcctacatgcacgtcgccgaggtggtctcggccgcctcggcccagggcaccctaggcatgctgcagcagagcggacgggtgttcatggtgaccgactactccccagagtggtcttacccagagggaggagtgaaggtcctcatcacaggcccgtggcaagaagccagcaataactacagctgcctgtttgaccagatctcagtgcctgcatccctgattcagcctggggtgctgcgctgctactgcccagcccatgacactggtcttgtgaccctacaagttgccttcaacaaccagatcatctccaactcggtggtgtttgagtacaaagcccgggctctgcccacgctcccttcctcccagcacgactggctgtcgttggacgataaccagttcaggatgtccatcctggaacgactggagcagatggagaggaggatggccgagatgacggggtcccagcagcacaaacaggcgagcggaggcggcagcagtggaggcggcagcgggagcgggaatggagggagccaggcacagtgtgcttctgggactggggccttggggagctgctttgagagccgtgtggtcgtggtatgcgagaagatgatgagccgagcctgctgggcgaagtccaagcacttgatccactcaaagactttccgcggaatgaccctactccacctggccgctgcccagggctatgccaccctaatccagaccctcatcaaatggcgtacaaagcacgcggatagcattgacctggaactggaagttgaccccttgaatgtggaccacttctcctgtactcctctgatgtgggcgtgtgccctagggcacttggaagctgccgtcgtgctgtacaagtgggaccgtcgggccatctcgattcccgactctctaggaaggctgcctttgggaattgccaggtcacggggtcatgtgaaattagcagagtgtctggagcacctgcagagagatgagcaggctcagctgggacagaaccccagaatccactgtcctgcaagcgaagagcccagcacagagagctggatggcccagtggcacagcgaagccatcagctctccagaaatacccaagggagtcactgttattgcaagcaccaacccagagctgagaagacctcgttctgaaccctctaattactacagcagtgagagccacaaagattatccggctcccaaaaagcataaattgaaccctgagtacttccagacaaggcaggagaagctgcttcccactgcactgagtctggaagagccaaatatcaggaagcaaagccctagttctaagcagtctgtccccgagacactcagccccagtgaaggagtgagggacttcagccgggaactctcccctcccactccagagactgcagcatttcaagcctctggatctcagcctgtaggaaagtggaattccaaagatctttacattggtgtgtctacagtacaggtgactggaaatccgaaggggaccagtgtaggaaaggaggcagcaccttcacaggtgcgtccacgggaaccaatgagtgtcctgatgatggctaacagagaggtggtgaatacagagctggggtcctaccgtgatagtgcagaaaatgaagaatgcggccagcccatggatgacatacaggtgaacatgatgaccttggcagaacacattattgaagccacacctgaccgaatcaagcaggagaattttgtgcccatggagtcctcaggattggaaagaacagaccctgccaccattagcagtacaatgagctggctggccagttatctagcggatgctgactgccttcccagtgctgcccagatccgaagtgcatataacgagcctctaaccccttcttctaataccagcttgagccctgttggctctcccgtcagtgaaatcgctttcgagaaacctaaccttccctccgccgcggattggtcagaattcctgagtgcatctaccagtgagaaggtagagaatgagtttgctcagctcactctgtctgatcatgaacagagagaactctatgaggctgccaggcttgtccagacagctttccggaaatacaagggccgacccttgcgggaacagcaagaagtagctgctgctgttattcagcgttgttacagaaaatataaacagtacgcactttataaaaagatgacacaggctgccatccttatccagagcaaattccgaagttactatgaacaaaaaaaattccagcagagccgacgggctgctgtgctcatccaaaagtactaccgaagttataagaaatgtggcaaaagacggcaggctcgccggacggctgtgattgtacaacagaaactcaggagcagtttgctaaccaaaaagcaggatcaagctgctcgaaaaataatgaggtttcttcgccgctgtcgccacagccccctggtggaccataggctgtacaaaaggagtgaaagaattgaaaaaggccaaggaacttgaagacatacagcagcatcccttagcaatgtgacattgcttttcagactgttttcatttctgtttttagcagagacatgcaacaacaacacacacgcacacacgcacacacacacacgtacacacacatacaaaatccctctgcagttttggggagatcagctgcaggattttaacaggaatgttttggtcattgcatttgcactttcatggacaacttttaatttgatcagcaagacatcttggaactcaatcttctgttggatcacgggaaatcaagacacccaggaggaattgaaagaggcttcctcttctcaggaagaagccatttccttctcatatagggctgtattcaaacatcgtgtggaactgtacaaatatttataccaaaaatatagataagaaaaggtggggctatactagcaacaaaaaaaagaatgctgttcctgcacctgccggttatttccaagaagctgaatctttgggactgattctcagtggagggcttagatcatacaaaaatctttattgggtccgtgtgttctcatttccttcactgtttatttttgtttgtttgtttgtttgttttaatctctacagcacatttaatgcaacttttgaaatctgcaggtttttaatgtcttgtggaaatttgcagaggggcaggtgtgtggtaaacgggtaatgcatgggaaataatgagaagcagctcacagagtttaaactattttcttgtccccaccaccttccaagaacctgcgagggtagtaatcatcttgtcccctttttcatgttcagcactttaatttttttgccttactttcatgtgcaatgagaattacttaagaattggtaacgcatgtagccttttttagtaaccttggaagctgtagtaattctaaggaatcatgaaccttgcctggacatttgccacctaaacgatcagtgtggtgctgcgttctggccagtaaattccatgtttttggctatatctcatccaaactgagcagtttctgtgtatatatagaaggtagaaatgaaaagtgagaaaatatttgaaagggattatattaattgctaaatattttattcacaaaggtcaataacatggcaagataaaattatttgtatagttttgtctgaatgagcgagaaaaatgtggatgtactgtttgtatatattgtatatattaaaacagagatatgtgcatgaaatcaagaaaaaagaaatgaacaaaagcaaagcattagtggctatggtctgtaaaatgaaacaaaaaaactttatttcactataagagtactttattttaaatgttctttaggagaacattttgctaaagcatgactaaactgc

SEQ ID NO: 4647 - protein, 1671 aa, Homo sapien
RAEGKWLPKTSRKSVSQSVFCGTSTYCVLNTVPPIEDDHGNSNSSHVKIFLPKKLLECLPKCSSLPKERHRWNTNEEIAAYLITFEKHEEWLTTSPKTRPQNGSMILYNRKKVKYRKDGYCWKKRKDGKTTREDHMKLKVQGVECLYGCYVHSSIIPTFHRRCYWLLQNPDIVLVHYLNVPAIEDCGKPCGPILCSINTDKKEWAKWTKEELIGQLKPMFHGIKWTCSNGNSSSGFSVEQLVQQILDSHQTKPQPRTHNCLCTGSLGAGGSVHHKCNSAKHRIISPKVEPRTGGYGSHSEVQHNDVSEGKHEHSHSKGSSREKRNGKVAKPVLLHQSSTEVSSTNQVEVPDTTQSSPVSISSGLNSDPDMVDSPVVTGVSGMAVASVMGSLSQSATVFMSEVTNEAVYTMSPTAGPNHHLLSPDASQGLVLAVSSDGHKFAFPTTGSSESLSMLPTNVSEELVLSTTLDGGRKIPETTMNFDPDCFLNNPKQGQTYGGGGLKAEMVSSNIRHSPPGERSFSFTTVLTKEIKTEDTSFEQQMAKEAYSSSAAAVAASSLTLTAGSSLLPSGGGLSPSTTLEQMDFSAIDSNKDYTSSFSQTGHSPHIHQTPSPSFFLQDASKPLPVEQNTHSSLSDSGGTFVMPTVKTEASSQTSSCSGHVETRIESTSSLHLMQFQANFQAMTAEGEVTMETSQAAEGSEVLLKSGELQACSSEHYLQPETNGVIRSAGGVPILPGNVVQGLYPVAQPSLGNASNMELSLDHFDISFSNQFSDLINDFISVEGGSSTIYGHQLVSGDSTALSQSEDGARAPFTQAEMCLPCCSPQQGSLQLSSSEGGASTMAYMHVAEVVSAASAQGTLGMLQQSGRVFMVTDYSPEWSYPEGGVKVLITGPWQEASNNYSCLFDQISVPASLIQPGVLRCYCPAHDTGLVTLQVAFNNQIISNSVVFEYKARALPTLPSSQHDWLSLDDNQFRMSILERLEQMERRMAEMTGSQQHKQASGGGSSGGGSGSGNGGSQAQCASGTGALGSCFESRVVVVCEKMMSRACWAKSKHLIHSKTFRGMTLLHLAAAQGYATLIQTLIKWRTKHADSIDLELEVDPLNVDHFSCTPLMWACALGHLEAAVVLYKWDRRAISIPDSLGRLPLGIARSRGHVKLAECLEHLQRDEQAQLGQNPRIHCPASEEPSTESWMAQWHSEAISSPEIPKGVTVIASTNPELRRPRSEPSNYYSSESHKDYPAPKKHKLNPEYFQTRQEKLLPTALSLEEPNIRKQSPSSKQSVPETLSPSEGVRDFSRELSPPTPETAAFQASGSQPVGKWNSKDLYIGVSTVQVTGNPKGTSVGKEAAPSQVRPREPMSVLMMANREVVNTELGSYRDSAENEECGQPMDDIQVNMMTLAEHIIEATPDRIKQENFVPMESSGLERTDPATISSTMSWLASYLADADCLPSAAQIRSAYNEPLTPSSNTSLSPVGSPVSEIAFEKPNLPSAADWSEFLSASTSEKVENEFAQLTLSDHEQRELYEAARLVQTAFRKYKGRPLREQQEVAAAVIQRCYRKYKQYALYKKMTQAAILIQSKFRSYYEQKKFQQSRRAAVLIQKYYRSYKKCGKRRQARRTAVIVQQKLRSSLLTKKQDQAARKIMRFLRRCRHSPLVDHRLYKRSERIEKGQGT

SEQ ID NO: 4648 - DNA, 563 bp, Homo sapien
  Unsure 8: Unknown base
ttttggtntccggaccccccgggatccggtcgcgaggaggaggaggatgtggcgcgcggaggggaaatggctgccgaaaacaagccggaagagcgtttcccaaagtgtattctgcggaactagcacctactgtgttctcaacaccgtgccacctatagaagatgatcatgggaacagcaatagtagtcatgtaaaaatctttttaccgaaaaagctgcttgaatgtctgccgaaatgttcaagtttaccaaaagagaggcaccgctggaacactaatgagagatcatgatgcagccgtccttttggatttctttttaataatgtgtgacccttcacctttgatcccctgacctgcattaccttggtaaccatttcattttttaatttaatttcattttttaattttggtgtacaagctgtaacatttcatctttcaaagtgtaacacgctgatttcctgaaatagagatacccctttgagtgataaatttgcaaaatgctgtcttcattttctgtattaaaattcatttcagttttaaaataaaaaaaaaaaaaaaaaaaaaa

SEQ ID NO: 4649 - protein, 80 aa, Homo sapien
MWRAEGKWLPKTSRKSVSQSVFCGTSTYCVLNTVPPIEDDHGNSNSSHVKIFLPKKLLECLPKCSSLPKERHRWNTNERS

SEQ ID NO: 4650 - DNA, 1017 bp, Homo sapien
tgtcgggtcccaaaatacgtggtctaaagtcctttgggctcctgccgctgccagcactgatcatatgctcttgaccctggtcgggtggggggatgtctggatacctcctctgtggaaagaactggccacacatccgcagaggtgactcgggctgagaacccaggctcctcctccctttggtgacacgcccctcggtccctcactggcacttctccctccggccacacggcggcgtctcgccatagcgcagcggccgatggtacagcccgctcccccctcgcgctctcggacagtgggtccttccacttgtagaaaagcattgtgggacggaagcctgtcctttcttccttttggtgcgagcttgctgtggtttttgctctgggtcctctgggatggcgcctggctgtggccgcgtggtctctcacgcaggggcgccgggcgggggaacgcggccaccctgagtctggtgagtcgactgcggcggcctgtgtccgaagtgtccggggccgtgaacaagggcagcggcctggcctcaggcctgcgttcccacgtttggaaacggggagcttcgtcgatttgtgtttacatcatcgactatgccagggagttctccagataagcctggttttattttcgtcagtgaaaaggccttaccgtataactgactttatgcttgccctgcccccgtataaaataacttaaaagcagcgtgcctggttacagctgtttccacgtgcggtgctcgtcgggagtgatcacctaccctacaggtggaagatggatgcctgaagtgtagactgctgctagctgaataccatctgggagcataaaggtgacctgaaggatgtccttggtgaggattttgaaaatttgatcttcacaagagttgcctggatcatttgaaatttctgggagtctgaggagtactgacataattacctgctggagtctgtaaatacacatttaagacagtgaggatgtgaataaatatattaatgcaaaaaaaaaaaaaaaaaa

SEQ ID NO: 4651 - protein, 120 aa, Homo sapien
MVQPAPPSRSRTVGPSTCRKALWDGSLSFLPFGASLLWFLLWVLWDGAWLWPRGLSRRGAGRGNAATLSLVSRLRRPVSEVSGAVNKGSGLASGLRSHVWKRGASSICVYIIDYAREFSR

SEQ ID NO: 4652 - DNA, 4307 bp, Homo sapien
aggaggaggaggtcatcgacggcttcgccatcgccagcttcagcaccctggaggccctggagaaggatatggccctgaagccacatgagcggaaggagaagtgggagcgtcgtctcatcaagaagccccgggagtcggaaacctgcccccctgcggagcccagtgagaacaggcggcccctggaggcaggcagccccgggcaggacctcgaacccgcctgcgatggggcgagaaaggtcccactgcagccctccaagcagatgaaggtcaccgtgtccaaagggggcgaccgggacagtgacgacgacagcgtcctcgaagccaccagctcccgggacccgctcagcgatagctctgcgcatgcggtctcggggagaggctactcttgtgacagcgagagcggcccggacgacaaggcatccgtgggctctgagaagctctttgcgccgggaaccgataaaggcccagcgcttgagaagtcggaggccaaggccgggccggtgcccaaggtgtcaggcctggagcgcagccgcgagctcagcgccgagagcttcctgcccactgccagccccgcgccccatgccgcgccctgcccggggcccccgcccggctcccgcgccaatcccttggtgaagaaggaaccccccgccccgcaccgccacaccccgcagccgccacccccgcagccccgcggcctgctcccgacacacgtgcctgcatccctgggcgccttcgcgggccacagccaggcggcagccaacggcctgcacggcctcagcaggagcagcagcgcccccctgggcctggggaagcacgtgtcgctgtcgccacacgggccgggcccccacctgtctacctcacacctggcgctccggtcccaggcgcagcaccagctccacgcggccatgtttgccgcacccccgacactgcccccgcccccggcgctgccggccagcagcctggtcctcccaggacacccggccgatcacgagctgctcaggcaagagctgaacacgcggtttctggtgcagagcgccgagcggcctggcgcctccctgggcccgggggctctgctgcgggcggagttccatcagcaccagcacacacaccagcacacgcaccaacacacacaccagcaccaacacacattcgcccccttccccgcagggctgcccccgacgccgcccgccgcacccccgccgtttgacaagtatgcgcccaagctggacagcccctacttccgacattccagcgtgagtttcttcccgtccttccctcctgccatcccgggactgcccaccctgctcccacaccccggccccttcgggtccctgcagggcgcttttcagcctaaggtgtctgacccgtaccgggcggtggtcaaggtgagcacgtgttgggaaggcccgtggcaagggaggactctggtgcccccggggcggcctcggggggcccgtgacagcaggagtctgcagaaaacatgggtgggggtggcaccagccccactgagcgcttccatcctgtcgcagaagccggggaggtggtgtgccgtgcacgtgcagatcgcctggcagatctaccgtcaccagcagaagataaaggagatgcagctggacccccacaagctggaggtgggtgcaaagctggacctgttcggcagaccccctgccccgggcgtgtttgcaggcttccactacccacaggacctggcccggcccctcttccccagcacaggtgccgcccatcctgcctccaacccatttggaccctcagcccatcctggcagcttcctgcccactggccccctgacagaccctttcagcagaccgagcacctttgggggcctgggcagcctgagcagccacgcctttgggggcctgggcagccatgcactggctcccggtggcagcatctttgcccccaaggagggctcctccgtgcacggcctgcccagcccccatgaggcctggaaccgactgcaccgggcaccgccctccttcccggctccgcccccgtggcccaagtccgtggacgcggagcgggtgtcagccctgaccaaccatgaccgagagccggacaatggcaaggaggagcaggaacgggacctcctggagaagacgcgcctgctgagccgggcctcgcccgccacccccgctggccaccccgtcagcggcctcctgctccgggcccagagcgagctgggccggtccggggcccccgcggagcgcgaggccgaacctcgggtcaaggagagccgctccccggccaaggaggaggtcgccaagatgcccgcgcgcgcatccccgccccacagcaaggcggcccctggagacgtgaaggtcaaggaggagcgcggggaggacgaggcctccgagcccccggcgggcggcctgcaccccgcgcccctgcagctcggcctgggccgcgagcgcctgggcgcgccgggcttcgcgtgggagcctttccgcggcctggagctgccacgtcgcgccttccccgctgccgcccccgccccgggctccgccgccctcttggagcccccggagcgcccctaccgcgaccgcgagccccacggctacagccccgagcgcctgcgcggggagctggagcgcgcgcgggccccgcacctgccgcccgccgcccccgccttggacggcgcgctgctgccctcgctgggagccctgcacttcccgcgcctctcgcccgccgcgctgcacaatgggctcctggcgcggaccccgcccgccgccgccgccctcggcgcaccgccccccctggtgacggcggccgggccccccacgccccccgggccgccgcggagccggactactccgctggggggcctcgggccgggcgaggcgcgcgactactccccgtcccgaaatcccccggaggtggaggcgcggtagccccggggccgcagacgcctctccgagcggagcgcaccgctgtccgtctctccatcagttcctagaactcaagcacagctcccgccgatcctggggcggcgccgcctctccacccgcagcctgcggaggcggggacttgggtgtcggcttttctgagggtgatcttttgttttccgagtttgggattcggctgttgggaaaaaaaaatcgcgtttgtaccttttccccccacagatgagaagtgtttgtaatggatttgtatttttcttaattttatgctctttagacgtttaaaagaaccaaaaaagaaacttttgcttcttcgttttcggttgggatttgcagtttaatggcctcagatccttctccagatccccagggtttctttgtcttatttatggagaaaaaccggtcactttgtccagcgcactgtgaggcccccactcaggccagccctggcccccccttggtacttggaaccgaagttacagattatattaaaataataatgtacaaaactttgtttttttgccttattatgcagaagtgtaatttcttttttggtttgtttttttaaaagcaaacgaaacgtgtaaatagtctgttgatataaatatatgacgttactaaattcttaatctagatagactttataaaaaccgtttccagaaacccctctggttgtttgtctaacatggtcacaaaaacccaggcgctgctggctgtaaacattatcagaagtttaatggcagcaactttccttcaactatgcaagcgcttcccggcggctctgctggttgggggaggaaggttccgccagcgacctcccagcccctgggtccgtggaggggttgggtccccccagcagagcccctgggccagcagaacagcactcctgggcggctcctgtgggcttcaggactggccggctccagccgcaagggcgatgctgtggacgtttgtgtggatggtgcagtgttcttggaatctgtagaccagatcggtggaggtatagaagtgcaagagtctaaaggctgattacacacacacacacacacacacacaaaatcactgctgtgtgttttcttccgcctgaggcatcagcgtcacctcggtgtggtcgtcgcctcccaggcccttggcctggcctcctctcagtttgggttttgccctcacccacatgagcccccccatgccctgccccccttgcggccttttgtgttccccgatgtctgggctgtgtccctgccgggattcccagccttcggggtcagccgtcgagccacttgctttgctcagttctgtgtttcagccacatttccacggtggaccctgtttgttttaaatattctgttcccatgtcaatcagtgacgataaatacagccttgatttggatg

SEQ ID NO: 4653 - protein, 814 aa, Homo sapien
PALEKSEAKAGPVPKVSGLERSRELSAESFLPTASPAPHAAPCPGPPPGSRANPLVKKEPPAPHRHTPQPPPPQPRGLLPTHVPASLGAFAGHSQAAANGLHGLSRSSSAPLGLGKHVSLSPHGPGPHLSTSHLALRSQAQHQLHAAMFAAPPTLPPPPALPASSLVLPGHPADHELLRQELNTRFLVQSAERPGASLGPGALLRAEFHQHQHTHQHTHQHTHQHQHTFAPFPAGLPPTPPAAPPPFDKYAPKLDSPYFRHSSVSFFPSFPPAIPGLPTLLPHPGPFGSLQGAFQPKVSDPYRAVVKVSTCWEGPWQGRTLVPPGRPRGARDSRSLQKTWVGVAPAPLSASILSQKPGRWCAVHVQIAWQIYRHQQKIKEMQLDPHKLEVGAKLDLFGRPPAPGVFAGFHYPQDLARPLFPSTGAAHPASNPFGPSAHPGSFLPTGPLTDPFSRPSTFGGLGSLSSHAFGGLGSHALAPGGSIFAPKEGSSVHGLPSPHEAWNRLHRAPPSFPAPPPWPKSVDAERVSALTNHDREPDNGKEEQERDLLEKTRLLSRASPATPAGHPVSGLLLRAQSELGRSGAPAEREAEPRVKESRSPAKEEVAKMPARASPPHSKAAPGDVKVKEERGEDEASEPPAGGLHPAPLQLGLGRERLGAPGFAWEPFRGLELPRRAFPAAAPAPGSAALLEPPERPYRDREPHGYSPERLRGELERARAPHLPPAAPALDGALLPSLGALHFPRLSPAALHNGLLARTPPAAAALGAPPPLVTAAGPPTPPGPPRSRTTPLGGLGPGEARDYSPSRNPPEVEAR

SEQ ID NO: 4654 - DNA, 1835 bp, Homo sapien
cgctgtaattttcacaatattttaattctgttctgagatctacaaatatctctacataacaccaaagccagtgatttaataaataagaggaatgtatatatcgctttgcaaaaaaatgcctgatacatttatctctatataagatatttgtagaatcagtttcccaaggctcacgaaactaaagtgcacacacacacactttccaataccagtcggcattacccgccctttggtttcttttgctttggatttcagcccccatatcatttctggtaacagagcacagcaatagaatttctgggaagcagaccttgtgaatcgtgcctgtgtcttaattcacaaagggtaagtgaatgccgttgaaaggtgtttcatacacttaccccagaaatgagagcctgtctcatgcaggagtcgggaggcagcgatgtcagggaactgggactatgtctttatgactgtgatggtggtaaccaagtggggtggtcccctctggggagctgagtaagaacgcaaaggtttgggtcagtgattaggaagactataatatgactttgtgcatgcccgggagggctgccttgtagagaggatgtgagcagcttagtcgctcatctggccctgtgattcaggcttatggagcgttaagaataacagctgtcaaatggcctagacatggttaatgcaatttgttgctagtggaaatcctgaattgcttcctttctgtgatcactgctacttcttaagatgcttttgatgaatgtcatctgccttacaagttgacacctgataacttctccctgatgggtttccgaactggctgacttaaccaaaaagccagctcttgccatctatcttgcattaaaaggaattcctgaggctcctaaggggtcagctgccccactcctgacttttttatttttaatggtctataccttctgcaacatttttgtttatggccatttgaatagttggactttgactcctcacttgtgaataataggaatatattttgcagaatctaacataatacccttaaaattcatactggacaaccatcagtgtgatgtatagtatctggtgtaaacaaattttattcagcatattaaattattctgtgttttgcttttccttgatatgtaggaggtgcaccagtaccagtttttctcttgtggtggcttaaaacgctgattgccatttgcattgtctactgaaaagctgtggcagcgagtggtattattgaccatgtgttctcatgtctttttgcagatttaaaggttttattgtagtgtccatttaatatctgcatgtgtgtttaatctctgaataccatgtaattaaactgattaacttgtgatggtgatggtgattagcacacactaaaaacccaatgaagcaattgtctccctcttcttaactggaaatcacacttgtgaggtatggtatccattatcaacagtggattcatgattgacttcatattttgtgtatctggttataaattttgtatagcatttaatttggcacttaatataaatccatttgatttgaatagtgtgtgtgtgtacatggtgtgtgtgtgtgtgcactttagtttcgtgagccttgggaaactgattctacaaatatcttatatagagataaatgtatcaggcatttttttgcaaagcgatatatacattcctcttatttattaaatcactggctttggtgttatgtagagatatttgtagatctcagaacagaattaaaatattgtgaaaattacagcttaataaatgtttattgtaattttgttgtatggacttttaaaatatatctcatcacttctaaccaaa

SEQ ID NO: 4655 - protein, 19 aa, Homo sapien
MFIVILLYGLLKYISSLLT

SEQ ID NO: 4656 - DNA, 570 bp, Homo sapien
agtaacatgactaaaaagaagcgggagaatctgggcgtcgctctagagatcgatgggctagaggagaagctgtcccagtgtcggagagacctggaggccgtgaactccagactccacagccgggagctgagcccagaggccaggaggtccctggagaaggagaaaaacagcctaatgaacaaagcctccaactacgagaaggaactgaagtttcttcggcaagagaaccggaagaacatgctgctctctgtggccatctttatcctcctgacgctcgtctatgcctactggaccatgtgagcctggcacttccccacaaccagcacaggcttccacttggccccttgatcaggatcaagcaggcacttcaagcctcaataggaccaaggtgctggggtgttcccctcccaacctagtgttcaagcatggcttcctggcggcccaggccttgcctccctggcctgctggggggttccgggtctccagaaggacatggtgctggtccctcccttagcccaagggagaggcaataaagaacacaaagctgaaaaaaaaaaaaaaaaaaaaaaa

SEQ ID NO: 4657 - DNA, 5730 bp, Homo sapien
  Unsure 305: Unknown base
  Unsure 313: Unknown base
aacttctattttttcttgataattctgtaggcaaaaaaattggggaaggcaaattacaatcattcttcttctgtaatactttgggacaatttttaaacaactcagacccatgtttaaaaacgagttttgtgtgattaacccttgtatagtatccagttactgtcttctcttgaagtggtggttctttgagaagtagaattattttgtaacttttcttctcccagaaacagaagaatcaaatactattctgttaggattctatctagacctgtgactcttagtataataacccttttattattatnattatttnttttttttcagtaatctataaagtagagttgcttagttttgagcaatttagggcttttcttattggccagtaggttattcattttgctgctaaatataattttttggttaattttaacattatagtgctggccgctgggttctatgattacctaaaaatctagtttttttcctccataggtagatgtgtgtgtatgcatacccccacacacacacgtacatatatgttgtcatagagaggtatttcaacccttatttcaaataacagtagaagatacgaacatgaatttatatttggtaaaaatgtcattcatccacttggtttcccattggaaatagttttataagaagggttccccctgtgctctctccacttaacaatttcattatatacgtagaaaaagcagccgacttaagggcttgatgttttttcaggccttgtggattcaggtttccagtttcccagtgcccttaatggatgttatgaatgcataagcacattttcttttaaagaaagaagttagatttatagtgttatttcttacttgctatatttctttgcactaaaaaagagctatgtgtttgttttataggacactttagtaccgtattgcctacaataactcagtttgctccttaaattccaaactctgggaagttgataaataacttccatgatcacttgtaaaagttacatgcacatctgaaaaaaaatcacaaatctctatgacagtaggttatgttttgagcttgttaccttgcagtattcttctctgttccataggtgaaaacaaagggtgacagaggttatcaggcaggaaatgcctaaatacatacatctctgcatggtacaatttctcatattcatgtattccataaacagtgttttttctctgtttaagcagactgttgtttcttctgagtcagtgatatgtgatcttcgttggtttcattttgtgaagctcagtctgtctctgtaacatactttaggatttgcaccttgtgctccccaggaattatgttagtgtccttttctatgctgtcttcaaggatggacagaggcctaaaccacaacaacaacaaaaattagaaaaaaaaatacttagatttcggtaatcatccataggaactcatagcatcagtctcttttctctgtgaataatatctttgtgtaagttgtcataaaaaatcaacgttagaagatgacaattagaattcttcttaggtattgagggtaagaagttgtaaagaaagaaaattcgtgtttcaactaaaagattggattgcatatacctttgaagtggttttgtaaaaaaagttcagttactaaactgagtgtgccctgtaatccttttgagtgcactgaagatgctttgaaaatactttgttggtcttcacattgtgcatcatgtcctgcaacttgtaaatatgtgcatgttgtttatgtttgtctgcctgtctcttattgcactaaattctgcaaggtgaataatttttttataccatttatttggaaaaagttcctcctccaactcttcttcactgaccttttaattagttggtaaacttagaaaaccaggtaggatttttgaagccctgagtttaaaagaagaatcgtggctatttgacatcatccttacattcccctgacttaaaaagctaacaagaagcacgagatcttccacctcattttagaaagcttttctacagaactatatgcttgcttatagctacctatctacagtttgaacagggagaaagggagatatgtatgtctggttacatcttccttcactcttgaattggctgggacagcaagcaacaacagtttgaggtccagtgacctacgtaaaatgagtgtcgtttgtgtcaggggacacatgtaactgtgcaacatggtattttctacagggagggctaggaagggtggttttggaacctaacctactttgtgtcttcattgtcagaactaaggttggaaatgccctttaaaggacttggtgaggcatatgctaggacaatagagctgctttagaaagaaattgagacatgttttgtcaggacagataaaagtttaatgcaggcttttgaacagatgttttaaaacaaatttgaccttaccaactatttttttcttctagccaaatcattgtacaggagtttcatatatgataaaaagtgttttgttattgtttttgctttcttggcaggggagaacccctaccattgtgagcagttactgtcactctggctgaatggacaaatagctgtgtaaatagcttctcataaaacgcttctactgatagctgtttgactttttcttcccgttatgaatgggaggaacatttgtaaacttcctttctgggtagctaccaaaaaacgtactggcttatggtcccatgtgaccttgtctccgttaagcccagaatctgagtgcctttagcaagtgttagcatttcacagagagaagagagacagaattattgctattaatcaccattcataaataggagcttggaataacaaaggtctgtgtgaattctgttctacgtcttttttttcccttttttaaataaatgtcaatttgatatcaagtaaaactattgtcattattgatcagaaaccatacattctgaaaatgaatccagttttcccaagctggcagaagtcagagatcatttttcaccttgatctgtgttgcgtttgtacttagtgaatggcagtgtggttgattggaagagcttgacactgatgtttggaaaaattctttattctagtggtcattttcaaacttgtcttctgtagagaggggaaaaattatgtatttgcagctaaagcgaagagactggcacaataattattaattgtgttagttcatttctatattaaatgaagcatcttcacaaatcaggtttgaagccattaaaagcaaaattttccctagtttaattaatttaaaattctaaattgcctgactacttagaatcttagaaacgccctgctagactgattttattatagaaatgttaacatgttcctcaacattttctcaagaaaattttcagacatatatcaaagttgaaaaaactttgcagtataaccactgctagattctgccatcaacatttgactatacttgtattgccatgtatctgttcatattctctatccctcttttcatccatcgatccatcagattttttttttaaagaacattccaaagtaaattttaggcaatacactgccctaaattcttagcatgggtgtcattaattaaggtttagtattcgtttaaatatctattttgaaagtggtgtatgaagttgataatctgagccaattaacatacttttttttttttcctcctgtggacttttgtcttccagtttctctttttgtgtgtacttagggtgagggaggacaattcctttcaaacacaagtttattttagaattggtcatttttaagtgcttgtcataaattttaaagtttcaatataatttttcttttccccacttctgataatgtatttttgccaaactatgcagcttcttcaaaaaactgtaaattactgattggggtttatgaaatcagcgaatacctcatttcaatctgttgctgcttttctccctcttgtcacttctcctttcactactttcagctgctctaccagaaggtagaggggagtaaagggtcaaacccctatataattagctgttttaaacaactctaggagagcagattaagtagcttagtaagttgaaactattaatttttctaaagaatttgatttgaattccttgagaattgtaattatccacacttcctccagctataattagcagaattaaaaatgattgtactgtacaatgagttgttgaaattgtaagccttagtaaccatctttagctttattgtagtcatgtttagaaaaaattatttttacatatgcctttatttttatgcccactttttgtggataagattctttagataaaatctaaagaattttaagtgactttctccaggtcatgaagattcaatgggtagaattgaatcagaattgaaatgttccagattcatattcttgtgtgtgtttgataaaattcatggcttccaaagtaactgaacacttcctttgggcccttggagggaaaatccatatttttactaattacacttttttttttagacatctggcagttctttgaacttaaacatattctcatggccatagttccaaattaagcccgacgcagttgctaaaaatcttgctgcactgttgaatactaataatgcaacatttattggatgtttttgcattttgatgaccttcatgattcatttataagtctttgtaagtgcttaagtgaccccctcactagtgaaaataataaatgttctatatcatttattattatttgtgtattctctacatgatatatttttttaaggaagagtaactccacatgtcagaatgagtgatattatcctagggcaaagcgcaaatagggcagtttgtttctactctgcaaatatggcatgtataggaacaaaactcttttggagtggctggtcattgttttgccctcttttggtacctgagtacctttctggggttttgtaaatcgtgtgtcatttgtaagaatttcacgttaactctgcgttacttggtgttcacctgtggtatccttgactgaccataatgatttagtttgggtatgatgtgtctgctttgaaatgccttactggagtatgtcagatcctgctttaaagcattccatatatctgctgggacaataagttgcttctccttggaaatatgctctagattcagaagcaaaaccgattttgctttcaccattaaggttgcattttaatgcagttattgttttaaattagagaataaaatgtaaaaccaagggaggctttagaaccctttattgaatggcatggcaaacttttaaaactgcttttgctatttcactagaactatctttgataaaggatatagctaaaaaatgtcagcccaaactgtgtgtaattagggttgtttattaaaattttctctaaatgtcatacagaggcttaagatctgtgtatgctgttgggtcggagtgccagtcactgctttggaagtctgtgttctggggctgcagaatgacaaacgtgtcatgggattaaaaccaatcaactgtgaattgtgaaattgaaactactctttcggttttattttctttagcatattgagtatagaaatctgaaacttatttaaaatttatactgcttttgttgatggctcattttggctgtgtatcctcacttatgtactgatttctgataaaggcttgacattattataacacgcattttgtgttccagtttaataaaacggtttctgagtcttgtctgaaaaaa

SEQ ID NO: 4658 - protein, 43 aa, Homo sapien
LLFFLDNSVGKKIGEGKLQSFFFCNTLGQFLNNSDPCLKTSFV

SEQ ID NO: 4659 - DNA, 3826 bp, Homo sapien
tatctctaaaaaaataaaatcaccctccattattatatttttaatatacatctttcagaatttgacagctgaagtcggggggaagagatgttaatgtaaacaatagcagaaggcttcgtttagtggatatctttgtgtatattaataaaattataacattccttttaaggaagtcagaaaggtaaggaaactgtactttctaataaccggatatgggtttcagaaatcgttatggatgtgcattgcccctttgtatttgtgactgaaaaaaatggtggcttctcttgatctgccttgtgcattttttatgtattaattttgatttttgaccctattttactcacctatgagggtgagcctcagattaaccataggctgctaaaggcagcagcctcccgtcagtgaatcaggaggattttgcttctatacttaaaaattttaatgtttcatgagatattgccacttttctaaattttccaggaaccctctggatattgatgcctcgggtgtggttggactgtcatttagtggacaccgaatccagagtgccactgtgctcctcaacgaggacgtcagtgatgagaagactgctgaggctgcgatgcagcgcctcaaagcggccaacattccagagcataacaccattggcttcatgtttgcatgcgttggcaggggctttcagtattacagagccaaggggaatgttgaggctgatgcatttagaaagttttttcctagtgttcccttattcggcttctttggaaatggagaaattggatgtgatcggatagtcactgggaactttatattgaggaaatgtaatgaggtaaaagatgatgatctgtttcatagctatacaacaataatggcactcatacatctggggtcatctaaataataattaaagtggctttcataatatgtaacttttgggttctgcctttttcagaaaatggaaacttgggccatgtgtatttcaaacaaaaataactttagatatatcttttttgtagctttgattgatgctctaagatcacatgagggtagtatttaatatattagatgaaggacaactttggacataacactgactaggagttgagagcttttgcatcaggcagaagcaaactgattatagttgtgttgcaccagatcatgtagctgctgtgtaacatgaccttaaatagtcttcctgcataggaagagcaaaagggtattcatcaataggatatagatttaagacattccctgactaccccttgcgttgttaggtgatgtcttttagcagaatcatgaagaccttttttctcccttaataaaggagaaaaatatactgatggctggagaaatttttctctgcctttcagttttatgaattttttcagaagtaacaatattattattgactttttacttatttgataaaaattaaagaactatttttgttttggtcagataaattgacaagactaatcagtattttattataagtaaaagatttttcttctttccttaaaaatatttttttttcacctaggtctaaatagctaactaactggtagaccagagtattacatcatcttattttggttttataccaataaaacatagcgtggaactcattcaggtaatgttttgcatttcattgcttttggatgaacaaaggaagtaaactaatcctttataaatgaaaacccagaatagttggtatgtcagctagtcattcctgtcatattcccagtagaatgattttcaagtttgaatttctgtacaaatatctaaataagagatgtgcagagagcaccaattttccttcaatatccattctttacttttcacataatgatagaacctttgatttttcaagtgggtatgcctcctagaataaagactacatttcccagtctcctgtgcaggtatgactgtgttctggacaatggaatgtgaggggaaacgattttttgtgtccttaaaatggcatgaccatttatttgcccctttctccatcctgttgcttggaatgtggatctggtagtgagccatcttggaccctgaagaggaggcaacacaccattgtagaagaaaaacaacagaaggatcctggtccctgtacgacctcattgaagaaacaccataagtggcgtggactatctacctccagactgttttacaagagagaaattagcatattccatctaatacagtatgatgtaactaatgttacttttgtaacagtcagtggtttgttctaacaggacagtagaacacttgcaaggtaagtaaaaccaaatgtattagcattattcctgcttttccttttttgtcacttttatcctttttttaaaactgaaaatatttttctcttgctatttatatatatatgataaaaatgcttggaagagtcctttaatttatggttattctaaatcctagttcctgaggcaagtccaaagaaaaatgtgtcaaaacttttcatctatgaatatttatatttagctcttgctatttagctattatcaaaatacctcaaaattttagtccttgaatgtgctcatatagcccataaggcaaatattttttaaactttattgtccctgatattaaccagaattggttgaatagtagaggaaaagggatttttaaaactgaaaatatgaacaaaatgagccttagaattgaatggattattttaaacaaattaatactcatataaaatgttttgctgcttctcaaagagtctgatacagggtaatttcatacaatatttgatgttgttaaagcattcctttttatagctgagcctttggagcttgttatgaacagtaaaatcatttagtcacatggttgtaaccttagtgcaaagtaaaaagggaaaagttgacctaatagaaacaatagtagtattgataagaacaaaagtcatcctccctgcctctcagaggccctgaagtcctgtgaggaagggaaatagtaatttaaccaaagttaaatctgtgtaactcatttattacaattttgaaaggcttgtcttagaagcattaaaggagtattagctaaaaacaaactaaattcctagagatgacaatcattgtagtcctctgtgaaactgaaaatgatcacatgaaaaaaatgtgagcataaaaaagagaagtaaaggtgtaccattagcctacatactgagctgacgatcagatcatagaatactttatttaatcaagacatttaaaaatacttatttcatctacatactttcaaagcaaaataatttctggggctagtttcctttgtataaggcttaagcaaggaatatatttccatgccctttgatccaagtaaaatctaaggaagagggaaagtaaaccttgaaattaagacctagaaatagatccacccttgcagactgataaaagtgggcaatctagtaggccagttcacattacagttatctcagttttgcttaaagcaaaccctaaccctcaacctacgaggccagatagcaaaagacgtgcaactggtttatattgcaaatttaacaaagtgaacatgcaaagaattacaatagaaataaacttttacaaatctgagaactttctatgcaatctgcagaaatttttaagaatataaatatgcttttgtcattttatacccagtctggcccaggtttgcactgccataaattcagttttaatgggaacagaagactccagatcctcttgatgggaagaaatcatgaaattttagatgattgacttggttttcatttgtagaaactgggtataagttggcttaatgaaaatcctaaaataataaaataagcattagtaat

SEQ ID NO: 4660 - protein, 149 aa, Homo sapien [sequence omitted]

SEQ ID NO: 4661 - DNA, 2897 bp, Homo sapien
gcggcttccggcggcgtgacctgaccgcaagaggccaatggagtgtgggagctgaaagggtcttcgctggcggccggtaactggcggcggttgggaacggccgagtgtggctcttctggtgtttcagcttggggagagaggggtggccttcctcttgcagttgaggccggcgccgagccggacttcaggcggatctcgtggcggagcccatcttgctccctctcccaggcctttacccgctccctaggattcccgggccctgtaggtgggagttgggagacgacagtactgcttttaaagagacagtgttagggatcttggaagcacagccaacatgtgtgacattgaagaagccactaaccaactcctagatgtgaaccttcatgagaaccagaagtctgtacaagtgacagaaagtgacctcggaagtgaatctgagcttctagtcactattggagccactgtacctactggctttgagcaaacagctgcagatgaagtcagagagaaacttgggtcatcatgcaaaatcagcagagaccgtggcaagatatattttgtcatttcagtggaaagtctggcacaggttcattgtctgagatcagttgataacttatttgtggtggttcaggagtttcaagattaccagttcaaacaaacaaaggaagaagttctaaaggattttgaagacttggctggaaaactcccatggtcaaaccccttaaaagtgtggaaaattaatgccagttttaaaaagaaaaaagcaaagcgcaaaaagataaatcagaattcaagtaaagagaagattaataatggacaagaagtcaaaatcgatcagagaaatgttaaaaaagagttcactagccatgctttagattctcatatcttagattattatgaaaatccagccatcaaagaggatgtatcaacattaataggtgatgatttggcatcttgcaaagatgagactgatgaaagctcaaaagaagaaactgagcctcaagtgctgaagtttagagtcacatgcaacagggcaggagagaaacattgctttacctcaaatgaggctgcaagagattttgggggtgctgttcaagattattttaagtggaaggccgacatgaccaactttgatgtggaggttcttttgaacatccatgataatgaagtcattgtgggcattgcattgactgaagagagtctccaccgaagaaatataacacattttggacctacaactcttagatcaactcttgcctatgggatgctcaggctctgtgatcctctaccttatgatataatagtcgatccaatgtgtggaactggggcaataccaatagagggggccactgaatggtctgactgtttccatattgctggtgataataatccactggctgtgaatagagcagcaaataacattgcatctttattgaccaagagccaaattaaagaaggcaaaccctcctggggcttgcccatagatgctgttcagtgggatatctgcaatctgccgttgagaactggctctgtggatattattgtaacagatttgccatttggaaaaaggatgggatccaagaagagaaactggaacctttatccagcttgcctacgcgagatgagccgtgtctgcacacctaccacaggccgagctgtactacttactcaagacacaaaatgctttaccaaggcgttatctggaatgcaacacgtatggcgaaaggtggatacagtctgggtgaacgttggtggtcttcgtgctgcagtttacgttctgatacgtacacctcaagcttttgttcatccttcagaacaagacggagaaagaggaactctttggcaatgcaaagaatgaagatgactaatagtacttgtacttcccaccactggaaatgttagcataaaagaacttggagaggaaaaaagtattaacaaaactgcagtctgcactctttaaacctgtttaaggctcttcatcctggttagcaaaaggtgtgaatgtaatgtgatggaatttaaaagttttatgagaccaggcacagtggctcacgactgtaattccagcagtttaggaagccgaagtgtgcagatcacctgaggtccggagaccagcctggccaacatggtgaaaccctgtctctactagaaatacaaaaattagccaggtgtggtggcgggcgcctgtaatcccaactactcaggaggctgaggctagagaatcacttgaacccagcaggcggaggttgcggtgagtcgagatcacgccattgcactccagcctgtgcgacaagagcgaaactctgtctcaaaaagattttataagaaagcagagcttttccttgaagctcttttgaagtggtagcttaattagtattttgttgaaaatactttaaagatgcctagtgaaaagcctactaaagtgctgtgagattggggtttagaacattttattttcaggctttatggcctattttccattgtgtcaagtgcaaaactaccctggcccaaaggaagggcagagaacataattacatcttaggccacatttcattctttgcagctttgctaatccagttgctcaagttctttacctcaacctgaaggaatgaagcattattacattttgtgaatggtgttcagcctataagacgaagtctcacaagacctataggaaagtttaccatctgcctaaatattaaaatatccatctgttattcacattaatacacagaatgaaaatagaggtctaggaattatcaaaggtactgcaaaaatactgtatagaacttatttgtaaatagcacatacattgatagatggggtgtgggaccaacaaaccaaattaaaagaaattgtttttctttcagtacactaaggtgtgtgttttcaaaacc

SEQ ID NO: 4662 - protein, 507 aa, Homo sapien
MCDIEEATNQLLDVNLHENQKSVQVTESDLGSESELLVTIGATVPTGFEQTAADEVREKLGSSCKISRDRGKIYFVISVESLAQVHCLRSVDNLFVVVQEFQDYQFKQTKEEVLKDFEDLAGKLPWSNPLKVWKINASFKKKKAKRKKINQNSSKEKINNGQEVKIDQRNVKKEFTSHALDSHILDYYENPAIKEDVSTLIGDDLASCKDETDESSKEETEPQVLKFRVTCNRAGEKHCFTSNEAARDFGGAVQDYFKWKADMTNFDVEVLLNIHDNEVIVGIALTEESLHRRNITHFGPTTLRSTLAYGMLRLCDPLPYDIIVDPMCGTGAIPIEGATEWSDCFHIAGDNNPLAVNRAANNIASLLTKSQIKEGKPSWGLPIDAVQWDICNLPLRTGSVDIIVTDLPFGKRMGSKKRNWNLYPACLREMSRVCTPTTGRAVLLTQDTKCFTKALSGMQHVWRKVDTVWVNVGGLRAAVYVLIRTPQAFVHPSEQDGERGTLWQCKE

SEQ ID NO: 4663 - DNA, 2061 bp, Homo sapien
agaggaagccaagaacggtgaaaaggccaggcggagttcagaggaggtggacggccagcacccggcccaagaggaggtcccggaatcgccccagacctctggcccagaggcagaaaataggtgtgggagccccagggaggaaaagccagctggagaggaagcagagatggaaaaggctacagaggtgaagggggagagggtgcaaaatgaagaggtgggacctgaacatgacagccaagaaacaaagaagctggaggagggagctgcagtgaaggagaccccccacagtccccctggaggagtgaagggcggagatgtccccaagcaggaaaaaggcaaggaaaaacaacaggagggggcagtgctcgagccaggctgcagcccccagaccggccctgcccagctggagaccagcagtgaggtccagagcgagccagcagtccccaagccggaggatgacactcctgtccaggacactaaaatgtgaagaacagctcattgtgccccagtgatgaagttgctggacacatctctttgcaggtagcagcaacagttgtagcagcagcagacgaagccattgcagaggcagaatatgctgagtgtctggagtcagcctgaagacacagggtggattatttcctggcctccacaccaaacgttcccttgcagatggagactgaatctgagggcagcagacttttatcagcttgagtttatgtcatttgatggacttggttcaacaacaagaacttacttaaaacaatgtactgtggtgatgagtcccaggggcactggtcagcctgtggagccctggatgctatccacacccacctatccctgcagctaatttagctgatctctaatttaactgagctctaatttagctgatcagattttgcttgggtaaagttcctttttaatgttctaaagtgtttacggttctcaaatatcagttaaaaactaattttaggtggccataaacataaaatagaaaccctgtaagttacagaagaccctaaattgtatcaaaaccctagagacaacttttcaatttgatccaaatttgaactggccaaccagtctttaaaacactggactagaagagataatgattgaaacatttaaaaaaaaaaagtgctccattcgcaggagcttttcctgtcctgtggttttccagttggtgaccaccatgggaggtcgctggctcggctcactcccttctcccacccttgagaatgtggagaactcccatggagaggcagaatggcaggaggtttcatgtcccgcgttgcatctcctcctgaaagaaaagcagtgatacctgaataatgctggctctccgattgatcctgtgaggatgaatttgcatttccagaatccttgagcatggattagatgtttcctgggaggtgccttgagtaccattatgtgcaagctacataattaaaacatttttcttagtttccctgggaagcttttcttgactcacagcccaggttcttctgcccaacacaaaaggagtgagttggggtctttagtctcttcttattgggtagctcttgctttaatattctgtttggtgagtgtaagggattctgcaagggacagggggcctgactacccagtctttgacttgtatcctctcccctcttcatacactcctgctgaaaaatgttaatccaaatacacatttaaacttagggtcggtccttattctgatttgagtattttaatgtctcagtgtgctgatttggtagttggaagaattattcttctggaggtctgttagactacatcctacactgacttcagaaaacagtctgtcagacaaaaaggccttatgtcaccactggtacctcagtttcctcatcccatttacagtttttctaactccagggtagtgtttagtgttaatatttgggatatattttttttcaaaactgtttttaagtagtttgtaatttgtaacaaacttgtaacctggttgggactgatattgtcatagctatgataaactttggatattagcagaatttgggaaaaaaaaaaaaaaaaaaaaaa

SEQ ID NO: 4664 - protein, 106 aa, Homo sapien
MEKATEVKGERVQNEEVGPEHDSQETKKLEEGAAVKETPHSPPGGVKGGDVPKQEKGKEKQQEGAVLEPGCSPQTGPAQLETSSEVQSEPAVPKPEDDTPVQDTKM

SEQ ID NO: 4665 - DNA, 2222 bp, Homo sapien
  Unsure 299-321: Unknown base
tctaatttttggttaatttatagccacaccctaaagtgaaaaagtgccaacacaggccaattggaatcccacaatttccacgagcccaaaaaaaaaaaacatgtattttagagttcatctttggcaaaatctttggttcagggtactagttgtttaaaagttgattcatattcttaccttgtgctgagaaaggttgcattgctgccccttatacacatgctgcagcttgatgttaaagaatttttattctttctgaagaactaattaatgtttaaagcaactgtttaatatgatggcannnnnnnnnnnnnnnnnnnnnnnatgttctgagtccacttcttttttcctaaataacactacagggattttgtcatattagatttaatttataatttgaaaaatcatctagtgtgtgacctacaggcttagaaatggtatagtcaaagacattttatccacatttctaatagtggacttgattaagtagataagatcagcatctgtttatggtagtaggagaaatagccaaagttgaggattttatgtatgttttcctgtttacctggaaaatagcaattaattggattttttggtaaagattgccttctgtataatgtttggattatataaaattgcaaaaatgataacagcccgctttactgtactaagcctgttactttcatgacgtgtgagcagaatgccttattttgtaatcttgtttaacttgttgctactgggacttgatttactgtggcactagttaagtaagttaaaaaaaagttaaaccctctcattattaaagaggaaaggcgatggtgatgtctgtagtacaatataaaccataattgtgatttaccttaagtaggtataactcttatgggatatacagtatagtttttgtgaatctttacatgatagcattatctttttataattttttttcctaagataaacaaatgcatagttttcttctatgggtgatagaaacagctttttgaagtaatgaaaacctcaaaagatcatgttgattcttaatttttgccttttgcataagcctctttataacatgtatctttaaaacaattaagtctttaggaatgtgtaaccagaactatgttagtattgcttataaaactttagttaggttcaatatatacatatatacatctctatataggtatatagatttgcattttgtcttgtaaaattttatttgaataaattcttcctgtaggtaatgggaaacaaaattaatagttcatatgtcactcatagcatttctatatttgaaagtagcccaatataaaacttttgattctaaaattaaaccagcagcctattacaagcacattctttgattgagtcattggttataaacttactaaatgcagagaaagcagccaatttaggaaacttctgagttggtgggacactgttgattaataatgtactgtatgaattaagtgatgctttaactttgattttacattttaaagttaaaatgtgggcattatgtcagcaaacttaagggcattatgtcagcaagctaaaacattttttttcctgtgcttttaatgtatctctttacatgatctgagagaggattcaagttgatagaaatagctgaggggaaaagggggaacatcttgggatgaagcttgtccttatggtgatggtttaattacagattaaaaaattagaaggaaatttcagtggattaagtgtatagctttcatatctacatttcaagaaattaccattgtaacttgataagagatgatttattttatgtaaacatctttgcaaagcaaggtgtagcagctcagctagatttattactgtgcacgaaagtaaatacctatctcaattattctttttcttttccaatataaagtttgctgaatgtacaagaagagtttatcacttaggatatagaatttttttaggggttgggggaggggatctgttaggaaactgttacctataaacaaagattgactggattcgatccaaaagataaaacttgaagctattctggaactaacatggaaaaatgaaatggctattgtttaaaaaaatgatagaaatacattgttgatgggatatgagttaagtttattttctacaaactgtaattgatgaggacatggataatatcttcatgtttctgagaagtaatctgtatgtggggggaggggataataaatatttctaaccaaaaa

SEQ ID NO: 4666 - protein, 12 aa, Homo sapien
MWGEGIINISNQ

SEQ ID NO: 4667 - DNA, 1586 bp, Homo sapien
agcgggctttcttcccgagggcggcacgagggctgggcggtggggtgcgggtgcccgggtgaggggcggagctgggggcatggcgtccggagcggctcgctggctagtattggcacccgtcaggtccggggctctccggagcgggcctagcttgaggaaagatggcgatgtctccgccgcatggagcggctcaggccggagcctggtaccgtcggggtcagtcatcgttacccgcagcggcgccattttgcccaaaccggtgaaaatgtccttcggccttctgcgtgtgttctccattgtgatcccctttctctatgtcgggacactcattagcaagaactttgctgctctacttgaggaacatgacatttttgttccagaggatgatgatgatgatgactaacaggaattacagaaaggagaaagcactaactgaagaaatggtgatgctctcagtttctctgccttccctatcagcagaaaggctcggggaaggccctcagcctcccagtctggtgaagcttcctgtatggtccatgaccgtattccaccccaggctctgggaggctccctgagatgtgctgtccactaagcactgcacaaacaagcaatcaaattatgaataaacataataaatatcagccgtgcgtgactgagtgatggctgcagtttctcagtatccctaggttctagttggtgcagttgtctctgctgtcctttatttatgggagaaacataggcccaggctatccaggctgcagtggagcctggtgaactattctgggggccctgggaactattttcattgtttacaaaagcccaacagaaactgtgcattttcccttaagaaagcttcatgggctaactaaagcctcatgccattctgtgttcagtgccagtcatgacagctctgcttgttagcatactacttaaatataactagaatgattcaaaactcgggttctgtgatatgaggatatagataggttttcatctatttcctggcttataactcccaaaacccttgttttaggcttttgttataatgttgggcacttcgggcctcagaaaacagcaggctgtttctcagatcttctcctgacctcctttcacctgctgctttttctccccaaggcaggccatagaaactaaaagtataatcttcctttgcccatcttccagttggccataaaaagaatcctctgacctaccttgtctgattttaggtcatgagacccccatttcagaagggattctgccccatacctgagaggaagaaatgtagacaggccttgttggacttccccactccatctgtattagattatgcctcttttgtccaatcccatttctccagtgttgtccatgcttcaatcatccctatccaatgaggtctccataaaaggcccaagaagacaggtttagagagctttcggagaacagaacacttggctttgcaaagtggcacgcctggagagaacttggaagctccacgccccttctatacctcaccctatgcatctcttcagctgtatcttttgtgatatcctttataataaaccagtaaacggaaaaaaaaaaaaaaa

SEQ ID NO: 4668 - protein, 107 aa, Homo sapien
MASGAARWLVLAPVRSGALRSGPSLRKDGDVSAAWSGSGRSLVPSGSVIVTRSGAILPKPVKMSFGLLRVFSIVIPFLYVGTLISKNFAALLEEHDIFVPEDDDDDD

SEQ ID NO: 4669 - DNA, 1586 bp, Homo sapien; identical to SEQ ID NO: 4667

SEQ ID NO: 4670 - protein, 107 aa, Homo sapien; identical to SEQ ID NO: 4668

SEQ ID NO: 4671 - DNA, 1607 bp, Homo sapien
cacaataatttaaacagctttcttatttcttaacttctctgggtattttgtgtgctactgtatcttgtgaatgaatctcaagaggaaggatgaagcttttccaaaatcacatgccttcatctcattttacagaaaaatttgtgcctaatgttaaccaaaggaaatggggagcggcagggccagtgggttttcatggtgaactgagggttgcatcttggacaggttgcatgtggaagggacagcagggttcccaaggaagctttgcacggtcatgggtagagccatcccttcttcatccatagtgaatatggctggaaatagcgggtagtcttggatttgacctccctcccatggaagtgctgtctccagctcgctcctggaaaaactgctttctccccaaagtgtgtctgagcagcagatttaagcatgaagttggttttgtggggctacagtatggactttgggaagatggtgccatctgtatttctgattctaccgtccctctgtctgtctttggaagtatcctttcacttgtttgggagactgagaatgattttctgcaaacagtgagccagaccatgctggtctcaagcggcagagcagttattaacagaatcacagtctttctggagctgctgtcagtcctgtgctgtcctcagggcctttgcttggtcaggggccccacttcttatccacccttccctctacctcaccgaggctgctaggcccaggtgtattgtgattatttgatgtacctgggaggccatgtctcccggggaggctcaggacctcattgggctggaattccacagggatctctcattgggtctctttgggcctttggagaggggagtgcagggcaccacctgggcgaacacctgtgccatcctgtaagtccttgtgtgactcttcatccaagtcaacaggggcatgtaggggaagagcctcagggcccatcaggagtcagaccctgaccaggaagtcagaactgaatcaacttttcaataaacacacaggctggccccaaacaaagcagcaggcttttgggaacatctgccttttcagtctcttctgaattctgtttatgtggacaccccatgtcccgcaccaccattgccgccagcaatgtttgttgcttgccaatatttgaatagatgctgataaatttgattctctggcttattgtggcattcatgatatgtctttcccttttcagtttccatgtactagagcgactgtcagtgtggttggcagtgacctgtgtttttcatgcatgtttttgtttcagaataactgggagatgaaacaggaagctctatgacacacttgatcgaatatgacagacaccgaaaatcacgactcagccccctccagcacctctacctgttgcccgccgatcacagccggaatgcagctgaaagattccctggggcctggttccaaccgcccactgtggactctgaggcctctgcatttgcgggtggtctgcctgtgatattttggtcatgggctggtctggtcggtttcccatttgtctggccagtctctatgtgtcttaatcccttgtccttcattaaaagcaaaactaaagaaaaaaaaaaaaaaaa

SEQ ID NO: 4672 - protein, 52 aa, Homo sapien
MTDTENHDSAPSSTSTCCPPITAGMQLKDSLGPGSNRPLWTLRPLHLRVVCL

SEQ ID NO: 4673 - DNA, 1530 bp, Homo sapien
agcactcccggagcctgcaacgcttgagatcctctccgcgcccgccaccccgcagggtgccccgcgccgttcccgccgccccgccgcccccgtcgcgggcccctgcaccccgagcatccgccccgggtggcacgtccccgagcccaccaggccggccccgtctccccatccgtctagtccgctcgcggtgccatgccattcctcgggcaggactggcggtcccccgggcagaactgggtgaagacggccgacggctggaagcgcttcctggatgagaagagcggcagtttcgtgagcgacctcagcagttactgcaacaaggaggtatacaataaggagaatcttttcaacagcctgaactatgatgttgcagccaagaagagaaagaaggacatgctgaatagcaaaaccaaaactcagtatttccaccaagaaaaatggatctatgttcacaaaggaagtactaaagagcgccatggatattgcaccctgggggaagctttcaacagactggacttctcaactgccattctggattccagaagatttaactacgtggtccggctgttggagctgatagcaaagtcacagctcacatccctgagtggcatcgcccaaaagaacttcatgaatattttggaaaaagtggtactgaaagtccttgaagaccagcaaaacattagactaataagggaactactccagaccctctacacatccttatgtacactggtccaaagagtcggcaagtctgtgctggtcgggaacattaacatgtgggtgtatcggatggagacgattctccactggcagcagcagctgaacaacattcagatcaccaggcctgccttcaaaggcctcaccttcactgacctgcctttgtgcctacaactgaacatcatgcagaggctgagcgacgggcgggacctggtcagcctgggccaggctgcccccgacctgcacgtgctcagcgaagaccggctgctgtggaagaaactctgccagtaccacttctccgagcggcagatccgcaaacgattaattctgtcagacaaagggcagctggattggaagaagatgtatttcaaacttgtccgatgttacccaaggaaagagcagtatggagatacccttcagctctgcaaacactgtcacatcctttcctggaagggcactgaccatccgtgcactgccaataacccagagagctgctccgtttcactttcaccccaggactttatcaacttgttcaagttctgaatcccagcacatgacaacacttcagaagggtccccctgctgactggagagctgggaatatggcatttggacacttcatttgtaaatagtgtacattttaaacattggctcgaaacttcagagataagtcatggagaggacattggaggggagaaatgcagttgctgactgggaatttaagaatgtgaacttctcactagaattggtatggaaaagcaaaatactgtaaataaactttttttctaacaatttgccaaaaaaaaaaaaaaaa

SEQ ID NO: 4674 - protein, 355 aa, Homo sapien
MPFLGQDWRSPGQNWVKTADGWKRFLDEKSGSFVSDLSSYCNKEVYNKENLFNSLNYDVAAKKRKKDMLNSKTKTQYFHQEKWIYVHKGSTKERHGYCTLGEAFNRLDFSTAILDSRRFNYVVRLLELIAKSQLTSLSGIAQKNFMNILEKVVLKVLEDQQNIRLIRELLQTLYTSLCTLVQRVGKSVLVGNINMWVYRMETILHWQQQLNNIQITRPAFKGLTFTDLPLCLQLNIMQRLSDGRDLVSLGQAAPDLHVLSEDRLLWKKLCQYHFSERQIRKRLILSDKGQLDWKKMYFKLVRCYPRKEQYGDTLQLCKHCHILSWKGTDHPCTANNPESCSVSLSPQDFINLFKF

SEQ ID NO: 4675 - DNA, 8281 bp, Homo sapien
gaccaatgaagactcaccaattatagaatattacccacctgattttaaaactgacctaaatgggaaacaacaggaatgggaagctgtggtgttaatcccttttattgatgagcgattattggaagccatggagacatgtaaccactccctcaaaaaggaagagaggaaaagaaaccaacatagtgagtgcctaatgtgctggtatgatagagacacagagtttatctatccttctccatggccagaaaagttccctgccatagaacgatgttgtacaaggtataaaataatatccttagatgcttggcgtgtagacataaacaaaaacaaaataaccagaattgaccagaaagcattatatttctgtggatttcctactctgaaacacatcagacacaaattttttttgaagaaaagtggtgttcaagtattccagcaaagcagtcgtggagaaaacatgatgttggaaatcttagtggatgcagaatcagatgaacttaccgtagaaaatgtagcttcatcagtgcttggaaaatctgtctttgttaattggcctcaccttgaggaagctagagtcgtggctgtatcagatggagaaactaagttttacttggaagaacctccaggaacacagaagctttattcaggaagaactgccccaccatctaaagtggttcatcttggagataaagaacaatctaactgggcaaaagaagtacaaggaatttcagaacactacctgagaagaaaaggaataataataaatgaaacatctgcagttgtgtatgctcagttactcacaggtcgtaaatatcaaataaatcaaaatggtgaagttcgtctagagaaacagtggtcaaaacaagttgttccttttgtttatcaaactattgtcaaggacatccgagctttcgactcccgtttctccaatatcaaaacattggatgatttgtttcctctgagaagtatggtctttatgctgggaactccctattatggctgcactggagaagttcaggattcaggtgatgtgattacagaaggtaggattcgtgtgattttcagcattccatgtgaacccaatcttgatgctttaatacagaaccagcataaatattctataaagtacaacccaggatatgtgttggccagtcgccttggagtgagtggataccttgtttcaaggtttacaggaagtatttttattggaagaggatctaggagaaaccctcatggagaccataaagcaaatgtgggtttaaatctcaaattcaacaagaaaaatgaggaggtacctggatatactaagaaagttggaagtgaatggatgtattcatctgcagcagaacaacttctggcagagtacttagagagagctccagaactatttagttatatagccaaaaatagccaagaggatgtgttctatgaagatgacatttggcctggagaaaatgagaatggtgctgaaaaagttcaagaaattattacttggctaaaaggacatcctgtcagtactttatctcgttcttcttgtgatttacaaattctggatgcagctattgttgagaaaattgaggaagaagtcgaaaagtgcaagcaaagaaagaataataagaaggtgcgagtaacagtgaaaccccatttgctatacagacctttagaacagcaacatggagtcattcctgatcgggatgcagaattttgtctttttgaccgtgttgtaaatgtgagagaaaacttctcagttccagttggccttcgaggcaccatcataggaataaaaggagctaatagagaagccgatgtactatttgaagtattatttgatgaagaatttcctggagggttaacaataagatgctcacctggtagaggttatcgactgccaacaagtgccttggtgaacctttctcatgggagtcgctctgaaactggaaatcagaagttgacagccatcgtaaaaccacaaccagctgtacatcaacatagctcaagttcatcagtttcctctgggcatttgggagccctcaaccattcccctcaatcactttttgttcctactcaagtacctactaaagatgatgatgaattctgcaacatttggcagtccttacagggatctggaaagatgcaatactttcagccaactatacaagagaagggtgcagttctacctcaagaaataagccaagtaaatcaacatcataaatctggctttaatgacaacagtgttaaatatcagcaaagaaaacatgaccctcacagaaaatttaaagaagagtgtaagagtcctaaagctgagtgttggtcccaaaaaatgtccaataagcagcctaactctggaattgagaactttttagcatctttgaatatctccaaagaaaatgaagtacagtcatctcatcatggggagcctccaagtgaagagcatttgtcaccacagtcatttgccatgaagggaacacggatgcttaaagaaattctaaaaattgatggctctaacactgtggaccataagaatgaaatcaaacagattgctaatgaaatccctgtttcctctaacagaagagatgaatatggattaccctctcagcctaaacaaaataagaaattagcatcttatatgaacaagcctcacagtgctaatgagtaccataatgttcagtctatggacaatatgtgttggcctgcccccagccagatccctcctgtatccacaccagtaactgaactttctcgaatttgttcccttgttggaatgccacaacctgatttctcctttcttaggatgccacagacaatgaccgtttgccaagtaaaattatctaatggcttactggtacatgggccacagtgccactctgaaaatgaagccaaagagaaagctgcactttttgctttacaacagttgggctccttaggcatgaatttccctttgccttcacaagtatttgcaaattatccttcagctgtaccacctggaaccattcctccagcctttcccccacctactgctaatataatgccttcgtcgtctcatctctttggctcaatgccatggggaccatcggtgccagttcctgggaagcccttccatcatactttatattctgggaccatgcccatggctgggggaataccagggggtgtgcacaatcagtttatacctctgcaggttactaaaaaaagggttgcaaacaaaaagaactttgagaataaggaagcccagagttctcaagccactccagttcagactagccagccagattcttccaacattgtcaaagtaagtccacgggagagctcatcagcttctttgaagtcctctccgattgctcaacctgcatcttcttttcaagttgaaactgcctctcaaggccatagtatatctcaccataagtcaacaccaatctcttcttcaagaagaaaatcaagaaaactggctgttaattttggtgtttctaaaccttctgagtaaatttggctcttagaattaagttaatttcttctctttccatctacctttttataaatacatatctatgtctcataaaaattagaatgtactattttaaaataatatgtgtaaattgaaatttttttcatttttaagttatcaggcacttttcatgctgtttaaaagactgtgtatcaaattgtgcactttaagtatgtgcagtttgttgtatgtcaattatacctcaataaatctgtaataaaaaactaaattaaaccttgcattaaaataatatcacagtatcagtggactaaacattaaaatgtaccactctaatcattggcctcatgattgaagcatcctgaactatgaattagacatcagttagcaataataagcattttttacactatcattgaggaataattacatggagcatgaaatttgggcctccagtataacttactgaatgtggattttatttctctttttaatgatgtaagaaaattgtcaggagaatggctcttatttatgtgtgttttaacttatgctttgttgcctctgagggtctttagacctgctgtgaaaggatcacatttgttgtggtgctgccagttttgctttattctaaattttgtaccaaagcaactttagaataatcagaatatttcatctaactgcttagaactataaatagcattctaaatttgagtaaatacaattttttaggttactcaagaaccagcattagtaatttctagtaaaattgtttcaaaatctacagggtacaatgattacaaattaatcttctaacaaaataaaatatgaaatattagtcatgttaattaataaactgtattattttgtatagctttttatttgcttacctgacattttatgagagcttcatagttggtcggtatgtagtgcttcttgggactgaagaaattctaattgttgtttaagttccaaggtgtgctacaatataggaggcacagtcatcagtttgtgacatacattatttactgcctatttcattctgattctatatttttagctttatgctgaactgttcaatgatgctgggattctctctttgcatgtcatatgtgaatgtgtggttcaagctgtaactgttgaaattattttagaatttatgacgatttctcagcagggcctatgtttatatatatatatatatttattctttagtttttgtgatatgcttatatttttaaggaagtaagttatagcatacttttttaaaagtaggaaccacaatctttatatggagcagcttgttatatctgattttcatgtaactcattggaaactctgccatgactcttaaagtagtcttacttgttttttaaaatgctggtattaaactaaatggactcctttcactaactgctgatttcagagtttaaatgttagcaggatatttgtgtattagcagtgccttcagtataagagagaaatattcattatctgtcatttatcatagtcgtataagtttccatgattttattttctgttattttcataagttcagatgtttatcagttcccaacattgtttctttatctgtagtgggatcttgagtaatgaggctcaagtaaatcctcaatgtgtataattattgcctcataaactctctctttgtttttaaaggaaacatctattatggtaatacaaagaaaagttaaattgtgacagtaatgttatattaacctcttcctactttaaagtgtgaaatgtttcacctcagctgtacaaactccagcattgagaatttgcctcactcattactcctgtgtgacagttatataaatagcatgcagctcacatctgttttagagcatagaagaagcggcacctgccatcttctgaaaactccaaagggaaatttcagtagacatagtgcactaaacccataaggatacttgaccaatatttgagcacagcaagctgacagttctatacagataggcagtgaaagagttttattttccagccaggcgcagtggctcaaatcccagcacttcgggaggctaaggcaggcggatcacttgaggtccggagttccagacaagcctggccaacatgatgaagccctgtctctactaaaaatacaaaaaaaaaaaagaaaaaagttttattatccttactttttttttaacattattattctaaaggtcaaaactgagaagagattaagataggagagagctccataatggctggatagtggtcaggcattctctattcttttccccctgtagacccattctaaatgtgggcctgaggtcaatgggagatgtgccctccctatggaggatgtaagaagcagaggccatttctgccccatgttgaggaaacaatctgttgatagacctggaatttagagtacatctgaaaagcagttggacttcaagaaatttaaaattctctctttgagatggggtggactaagaccacccccaaagtttaaaaatatgctcattcaacttgaatcttctgaggactttttgtgaaaatggtggactgtttagggcataggacagattccccaaattgctttatgcttccacataactagagcacttcaatctatttaagcctttgtctcctaactgaaacattatttctaaatatttctattcaataagttttttcttttttgagcaacttaagtgaattttgaagattgctccttccagtctcgttccttttcacattttcctgcattacctaataattacctcagcgttagaatttgaatgtattaattgatttaaacatcatgtagactaaagtcttaaacatctaagactcagttgtagttgcagaaaaaaattaaagtcacctctactgaaccttggtttcaatttaagatttttcttgcttttcaaaggggtaactaataaagattgaagggtttttttcccgattggtggaggaatgaagaactattgatgcaagtttttttattgtttctttctatgatcaggtacctgctttcattttagactgctacttccaaactaagctagattcttggttttaatgagaggaggcagagagagggaggcagatggaagaagaaaaacagttaaataagacatacccagtcactgcatttttggactataccgtatctttctagcacaaggaaatagataaactgtaaggtcttttttactcactttttatttatgtgttctatttgtgttagtcataactgtttatagtggttgtctaatttttacttttattatatgagatagagctgtgcagatcttcactcaagttctgtcacgcttcttcccattatttagagcacagttttttaaagcaactgtacaatttctcagccttatgagcttgctgtatttcttggtatcatgttgcttccaaattttgtttttactgtagaagacaattaatttattgtagagaagtggctgtgaaagtcgttctctgtctttaaaaatcaattgcagaagttcatttgtcatttttctagagataaattatagtactcaaactggcagtgctcagtatatacattttgtaagctttgtcagtgaaaccatcagttttgcaggagcttcctttcctagtcaagataaagcttaaaattccagaaattaatgtcgttcggactgactttattcatatttccatcaaacttctccaatacagtaagagatagtgttgaaccagcatcaagtctccagaaacatggcagagcagacaggccgttaagtttcacagacatcatagatccttttcttaaagaagaaaaacatgtataaaatagttttagtagtccaaaatgtcaactatctgtagctgcttttgtgtgtgtgtcagtgaacaaataataatgccttgctcaatcaatgcattcagccatctcaagtgcaatttgtgaaggagactatggtttccaaaagatacatttttttacaaagttaaacctgtaaaaagtctttttttttttccctccagccgtacaccaactgcacttggttgtttcagcagttggtatactattaaattgtccaggccaaataggtttctgtagctgttttagtaatttgaagccaaattctcatgctgtttctcattaaaaagaatgagaatttggtccatagttagctttaagttctctcttcctttctttcccttacagttaagggtttggtgggggatggggaggttgttttcgttttttggatttttttgtcttttggctttaagtatcatattttcttttgcctgtatccaactgcttctttgagtattttcatctagtttaatgtgagtaatagatgctgtgctgtcattgaagtgttcaacattttgttcatttaaacaaaagtgtaattcatacatatatagatacatatcttaattgatttctcaactattttataagtaactggaatttttcattagatcttatacagagaagtattttattaaaaattcaaaagggaagacttttatgtgctcattttgtaatttttgattttaaatatctttacattgtctgccaattaaagtgttttaaacttgcattggaatggactccgaatgtatttttgtggtgttacgttatccgtagatttctagcatgaagttagcctcacgatgctgtgcaaaggattttaaaatatgagagtcactgaaagagtttaaacatctgttcatgttaaatgctctatggattttaattaaagacttgagaatgattttaaaaaaaaaaaaaaaaaaaaaaaaaaaaaaaaaaaaaaaaaaaaaaaaaaaaag

SEQ ID NO: 4676 - protein, 1159 aa, Homo sapien
TNEDSPIIEYYPPDFKTDLNGKQQEWEAVVLIPFIDERLLEAMETCNHSLKKEERKRNQHSECLMCWYDRDTEFIYPSPWPEKFPAIERCCTRYKIISLDAWRVDINKNKITRIDQKALYFCGFPTLKHIRHKFFLKKSGVQVFQQSSRGENMMLEILVDAESDELTVENVASSVLGKSVFVNWPHLEEARVVAVSDGETKFYLEEPPGTQKLYSGRTAPPSKVVHLGDKEQSNWAKEVQGISEHYLRRKGIIINETSAVVYAQLLTGRKYQINQNGEVRLEKQWSKQVVPFVYQTIVKDIRAFDSRFSNIKTLDDLFPLRSMVFMLGTPYYGCTGEVQDSGDVITEGRIRVIFSIPCEPNLDALIQNQHKYSIKYNPGYVLASRLGVSGYLVSRFTGSIFIGRGSRRNPHGDHKANVGLNLKFNKKNEEVPGYTKKVGSEWMYSSAAEQLLAEYLERAPELFSYIAKNSQEDVFYEDDIWPGENENGAEKVQEIITWLKGHPVSTLSRSSCDLQILDAAIVEKIEEEVEKCKQRKNNKKVRVTVKPHLLYRPLEQQHGVIPDRDAEFCLFDRVVNVRENFSVPVGLRGTIIGIKGANREADVLFEVLFDEEFPGGLTIRCSPGRGYRLPTSALVNLSHGSRSETGNQKLTAIVKPQPAVHQHSSSSSVSSGHLGALNHSPQSLFVPTQVPTKDDDEFCNIWQSLQGSGKMQYFQPTIQEKGAVLPQEISQVNQHHKSGFNDNSVKYQQRKHDPHRKFKEECKSPKAECWSQKMSNKQPNSGIENFLASLNISKENEVQSSHHGEPPSEEHLSPQSFAMKGTRMLKEILKIDGSNTVDHKNEIKQIANEIPVSSNRRDEYGLPSQPKQNKKLASYMNKPHSANEYHNVQSMDNMCWPAPSQIPPVSTPVTELSRICSLVGMPQPDFSFLRMPQTMTVCQVKLSNGLLVHGPQCHSENEAKEKAALFALQQLGSLGMNFPLPSQVFANYPSAVPPGTIPPAFPPPTANIMPSSSHLFGSMPWGPSVPVPGKPFHHTLYSGTMPMAGGIPGGVHNQFIPLQVTKKRVANKKNFENKEAQSSQATPVQTSQPDSSNIVKVSPRESSSASLKSSPIAQPASSFQVETASQGHSISHHKSTPISSSRRKSRKLAVNFGVSKPSE

SEQ ID NO: 4677 - DNA, 2427 bp, Homo sapien
ggctggcaattcaaactgataccgggttggagaggcaggaaaagcggaagagggagcgaaaaccaacgtgttcggtgacagaccccagcgccgactgagcctctaaagcgacttcagctctgccccaccaacaccaccgcgcgcccgggaacagccgctccgggaagaaacctgaggggactgcggggggcacgagggacagctgagggaagggaggacgcgagagaaacagcgcaagcacgctgagggccgggggttgccaggagaggggcccgcggacccgcagagcggaggaaggtccgggagaaaaggggcgggacggaggagaatccgggatcgcctggcagaaaaagagaagggagtttctgaatcctgggaagaggaggcgtgggtagggatgcttagcccgagatccgacagcagggaaccggagcgctccgggggaggggcttaatgctggggaagggatgtcttaaaagaggagaagctttaaattagacgatcggagaaggctgagggaattgctatgaaggggcgggagctgaagtgtagaggactcctttagacagcagaaagggaaagccgttgagaagttcccttcaaactccacctgcctcctctccaattcaaactccactcccttctccaaaagttaaaaggaaagccaagtttgccacgctcccctgttcctactcaataaatacttcttctactccgccaccgggaaaacagaaaaaaaaaactaatttccttcccaatattaggacttagaaaagctctaggtcccgcaatttgaattttagcctaggggaatcaaaatagtaggagcattactcttgtttcctttttcaaaatcccacacctcatccttcctgcgacgccatgtctaccaacatttgtagtttcaaggacaggtgcgtgtccatcctgtgttgcaaattctgtaaacaagtgctcagctctaggggaatgaaggctgttttgctggctgatactgaaatagaccttttctctacagacatccctcctaccaacgcagtggacttcactggaagatgctatttcaccaaaatctgcaaatgtaaactgaaggacatcgcatgtttaaaatgtgggaacattgtaggttatcatgtgattgttccatgtagttcctgtcttccttcctgcaacaacggacacttctggatgtttcacagccaggcagtttatgatattaacagactagactccacaggtgtaaacatcctactttggggcaacttgccagagatagaagagagtacagatgaagatgtgttaaatatctcagcagaggagtgtattagataaatggaattatgatatatatgatatacaaacttttttctatttaaaaatatattaatggatcaactttaaaattgttagttgccagtgatcttttttggaaaacaaaaatggggcattgttgatttatttattttccgtctctaattagttacctcagtttgattgaagccagtggagttgtgcttttcctctacttctacttcctctcccccacctttttctgcccagtgtaggtgtattcttaaattcagacgggaagattctttcacatatcactcagttacctcccaatctgggggagtttttcttacaacttgataccagataccattaattttacattcctgaataaaggcctagtacccacgcatatttcaaccatgcatatatcaagttcaaccgagttttaataggggattaaaaaaacaagctgttaggtttccatgggcactggttctcataggttctattggtgataactgctttaacatggagcaagagtttgtgaatcaggaaatagaataaattaaaatttaaaatatatagaggaatcctcttgattgctcagcatgatgttagataaatgagtttgtcagaaaatatcagtatacgctgtttaccaatgttatttatttacattcttctaaagccattatggatattgtattatgagagctaaacctaaataagttatcctgttccctaggaccttctctgtaaatagtgaattttagacgagtagtctgtcctaaatcttaaatagaaaaaaaactaaagcgatttgcttaagccattgtacattataaagagctgttttgttttgctttgctttgctttgttttgtttttttaaagctgcattcagagccacaaaggaataggaaagtagggtagtgttggattctggttttatgtaactctaaaataaatgtatctctttaatatctcagttgtagggattttgtcaataccaaagcagactgagttgtggttttgtaaataaagttttttctaaaaatgaccattcttcctttaattttttgttatgcccacatattgtatgtaaaaatataaataaatagtacttaaagtatag

SEQ ID NO: 4678 - protein, 120 aa, Homo sapien
MKAVLLADTEIDLFSTDIPPTNAVDFTGRCYFTKICKCKLKDIACLKCGNIVGYHVIVPCSSCLPSCNNGHFWMFHSQAVYDINRLDSTGVNILLWGNLPEIEESTDEDVLNISAEECIR

SEQ ID NO: 4679 - DNA, 2653 bp, Homo sapien
  Unsure 367-438: Unknown base
  Unsure 548-601: Unknown base
gggagttgcagggggagagatggaaaggctagcagctgaaaaaaaataggtaaataaccagtgtattccatgtagctgttaatctagtttgttgcttccatcagctgcaggagtattccatagtatgcatccaccatagtaaatttatccattcacctggttgcctcaaattcttggctacctggagaaattaaaacccttgaagctagggttctgagtacaagatcagttccaccaattagatttcttcatttgagatttgggaggtaaaggctgtctttctgctgtttgggttgttgctgctggaaagcaagtttatgtacatatggggctttctgcaacagctttccagctttgaaaacctgcnnnnnnnnnnnnnnnnnnnnnnnnnnnnnnnnnnnnnnnnnnnnnnnnnnnnnnnnnnnnnnnnnnnnnnnncattcaacaggtaaaataaatctactctgtaatagtataagtttgactacaataaactgtggttaagaagaaaaattggccgggcatggtggctcatgcctgcctgtaannnnnnnnnnnnnnnnnnnnnnnnnnnnnnnnnnnnnnnnnnnnnnnnnnnnnnccagagtaatggtttcttgactttctgtagcccttgttccttagtctgctgtgatatttatgttgacctttatcattttctattctgaacccctcttagcatttaatgtgaaatctaagaaattagaagtagaatggcttttattgttttgacacctttgaaattattattaataatttttccagagcaaaaaagcaaacacgctcaataagactaaacaaaacaaaatataaatgtacatcatttaatgtcccagtggctctattctacctgtaagaaaatgatacaaaaccacctaagatattttgaagcctgacaaatcagcttcatggaaaaaggtaaaaaatgcatttttcaaccgaaagggcagatccaatagaagacccgctccttaaataaacataaaatgtaaaaagttggaaaattaagagtaatgttccatctggaaactgaacttttgtccttgaacttgtgttggcaccaagcctcatacacagtgagctcaataactgttgggacaaaggaaggaaggacaaaatgtgtaacttcccagcatctgggagatgctgtctcttgcctcactgagtgttccttttctttgctctcatgtcattccctgagaacaatgaattctgggacaggctaaacatcatgatgaagtttcttaaacagactttcttagtggaaatccatttagatctgggtgtgctctatggggagtgctgacgtcaaagagcaaatgtctataaggggcccttttaaaatgaacattttcctcattgagcaagctgggattctctaatgtagaaatcaagccatctttataatttcacttcagatgtttatgtttttgtttttttttgtctccaatgatggtaaaaataaaaactacgcattacttaaaggagtttccctcacatgtaaacactgttaggaagtctggattaagttgaaagtcctgttttaactttttttctctcatataccaaacactctgtatttctcttaaagaagccctttaagagaaagccctaattttatatctgacagtaaagtttgctgcaagtgtatgagttcaaacacatcccttgttttctgtccctaggggaaaagtcatgtagttttagcttggctccagtgttaatattatattcagtagcagccttagaagagtggtctaagacttgaacctggagcaattttatagcacagaatcctacgaagataggactgtgaacatttgttttctttttcgtgtgtgtcaaactaactggtttttgctttaccaataaaatgtcctcggcagagtaaattttaaacgtgaaaattatagatcttgatattgaatccatcagtgattcaagagatacacctatttgcctaaaacaacctaagatgtattggttatggaatcatgtgttggataggttcttaagacctgtttcctcaaatcttgacacagttttcaagggtggcttattgacttgcacggttgggcagataatccagatttacctaagattgggtaaaaaagtcatctgtgactttgctggcagggcatttgctaagtggagtacaggatctaaaagggttttcttagaaagggcaatattgtccaatgaagtaagcagaaggactctgggttagaagcatctgcacaaaaactggtgagacctactctccactgctctgcagctggatggctgatggcaggctgagcagtggggaagcaggttttaacaacagggagtccttccaggtcactgtatattgagaagaaacataaaactattgtctgttacattccgaggtcagccttcttcttaacgttttataatatgcaaatgccagcttctggaaagcaagtatcatcatgtaccaaatgctttatacaccatcacattcatgaattttttagcatggtcagaacttgtgtaaatatgtctcttagatgattttggggagatgtgatttatttttcatattttcaaaatgcatttcatttcaaataaagttatctattgagacaaccgaaaaaaaaaaaaaaagcgg

SEQ ID NO: 4680 - protein, 33 aa, Homo sapien
MILGRCDLFFIFSKCISFQIKLSIETTEKKKKS

SEQ ID NO: 4681 - DNA, 1030 bp, Homo sapien
  Unsure 653: Unknown base
  Unsure 906: Unknown base
  Unsure 908: Unknown base
  Unsure 917: Unknown base
  Unsure 944: Unknown base
ctggtgggcgtcaggggcaggcaacagagtggcggccgctacggccctggaacggggccatggagaagctgcggcgagtcctgagcggccaggacgacgaggagcagggcctgactgcgcaggtcctggatgcctcatcccttagtttcaacaccagattgaaatggtttgccatctgcttcgtatgtggcgttttcttttctattcttggaactggattgctgtggcttccgggcggcataaagctttttgcagtgttttataccctcggcaatcttgctgcgttagccagtacatgctttttaatgggacctgtgaagcaactgaagaaaatgtgtgaagcaacaagattgcttgcaacaattgttatgcttttgtgtttcatatttaccctgtgtgctgctctttggtggcataagaaaggactggctgtgttattctgcatattgcagttcttgtcaatgacctggtatagcctgtcgtacatcccatatgcaagggatgcagttattaaatgctgttcttctctcctaagttgaaaatcagaaacttgtggaaaagagcacttgaatgttggtactctatgtttggtgaagtttgcttttccccataaaacactccaggaacaactgacgtgacagttgaagaccgtnttgtactaagtctcattttgtatactggtaaaaactacatgcttgattaaaccattaaatgcttgtaactttaaattcattatgtgtcattaatatacttttccaaagataagatttttaatcactgccagttgtaaattatttttagccaatttttaaatcttttcaaagcagctttgaaatgtgaatatttaaaggtagacctgtgctgcaagataattaaacttttttgcttttaaaaaatgtctgcatntntaagatttnttttactttaaatgtgaaacttatttnaagctaaaaattgcttattatatgtaataaaaataatatataaatctttacaattttgaaataaacccatccttggaaaaataaat

SEQ ID NO: 4682 - DNA, 717 bp, Homo sapien
gcacgagggctacggccctggaacggggccatggagaagctgcggcgagtcctgagcggccaggacgacgaggagcagggcctgactgcgcaggtcctggatgcctcatcccttagtttcaacaccagattgaaatggtttgccatctgcttcgtatgtggcgttttcttttctattcttggaactggattgctgtggcttccgggcggcataaagctttttgcagtgttttataccctcggcaatcttgctgcgttagccagtacatgctttttaatgggacctgtgaagcaactgaagaaaatgtttgaagcaacaagattgcttgcaacaattgttatgcttttgtgtttcatatttaccctgtgtgctgctctttggtggcataagaagggactggctgtgttattctgcatattgcagttcttgtcaatgacctggtatagcctgtcatacatcccatatgcaagggatgcagttattaaatgctgttcttctctcctaagttgaaaatcagaaacttgtggaaaagagcacttgaatgttggtactctatgtttggtgaagtttgcttttccccataaaacactccaggaacaactgacgtgacagttgaagaccgttttgtactaagtctcattttgtatactggtaaaaactacatgcttgattaaaccattaaatgcttgtaactttaaaaaaaaaaaaaaaaaaaaa

SEQ ID NO: 4683 - protein, 159 aa, Homo sapien
MEKLRRVLSGQDDEEQGLTAQVLDASSLSFNTRLKWFAICFVCGVFFSILGTGLLWLPGGIKLFAVFYTLGNLAALASTCFLMGPVKQLKKMFEATRLLATIVMLLCFIFTLCAALWWHKKGLAVLFCILQFLSMTWYSLSYIPYARDAVIKCCSSLLS

SEQ ID NO: 4684 - DNA, 826 bp, Homo sapien
ttccggccttgtaatcgccgagggcacgtgcatgccccctggttaagagttgcaggtagcggtagcgatggacactctggatcgagtagtaaagcccaaaacgaaaagagccaagagattccttgagaagagagaaccgaaactcaatgaaaatattaaaaatgccatgctgattaaagggggaaatgcaaatgcaacagtgacaaaagtacttaaagatgtgtatgcactgaaaaaaccatacggtgtactatataaaaagaaaaatattacaagaccttttgaggatcagacatcactggaattcttttcaaagaagtcagattgttctttattcatgtttggctcccataataagaagcggccaaataatctagtaataggtcgtatgtatgactaccatgtgctggatatgattgaattaggtattgagaattttgtctctctaaaagacattaagaacagtaaatgtcctgagggaacaaaacccatgctgatatttgctggcgatgatttcgatgtaacagaagattatagaagactaaaaagtcttcttattgatttcttcagaggccccacagtatcaaatatccgcctggctggattagagtatgttctgcacttcactgcactgaatgggaagatttactttcgaagctataagttgctgttgaagaaatctggttgcagaacaccacggattgaattggaagagatgggaccctcattggatctggttctgaggaggacacacctggcatcggatgacctttataaattatctatgaaaatgccaaaagctctcaagccaaaaaaaaaaaaaaaa

SEQ ID NO: 4685 - protein, 253 aa, Homo sapien
MDTLDRVVKPKTKRAKRFLEKREPKLNENIKNAMLIKGGNANATVTKVLKDVYALKKPYGVLYKKKNITRPFEDQTSLEFFSKKSDCSLFMFGSHNKKRPNNLVIGRMYDYHVLDMIELGIENFVSLKDIKNSKCPEGTKPMLIFAGDDFDVTEDYRRLKSLLIDFFRGPTVSNIRLAGLEYVLHFTALNGKIYFRSYKLLLKKSGCRTPRIELEEMGPSLDLVLRRTHLASDDLYKLSMKMPKALKPKKKKK

SEQ ID NO: 4686 - DNA, 3714 bp, Homo sapien
gtggccacacgtacaagcccgcctataaaggtggcagtgccttcaccctcaccctgaaggtgacagttccttggaaccttccctgatccttgtgatcccaggctccaagagtccacccttcccagctcagctcagtacctcagcagccacctccaagatccctacactgatcatgcttttcccaatctccatgtcggccacggagtttcttctggcctctgtcatcttctgtctggtattctgggtaatcagggcctcaagacctcaggtccccaaaggcctgaagaatccaccagggccatggggctggcctctgattgggcacatgctgaccctgggaaagaacccgcacctggcactgtcaaggatgagccagcagtatggggacgtgctgcagatccgaattggctccacacccgtggtggtgctgagcggcctggacaccatccggcaggccctggtgcggcagggcgatgatttcaagggccggcccgacctctacaccttcaccctcatcagtaatggtcagagcatgtccttcagcccagactctggaccagtgtgggctgcccgccggcgcctggcccagaatggcctgaaaagtttctccattgcctctgacccagcctcctcaacctcctgctacctggaagagcatgtgagcaaggaggctgaggtcctgataagcacgttgcaggagctgatggcagggcctgggcactttaacccctacaggtatgtggtggtatcagtgaccaatgtcatctgtgccatttgctttggccggcgctatgaccacaaccaccaagaactgcttagcctagtcaacctgaataataatttcggggaggtggttggctctggaaacccagctgacttcatccctattcttcgctacctacccaacccttccctgaatgccttcaaggacctgaatgagaagttctacagcttcatgcagaagatggtcaaggagcactacaaaacctttgagaagggccacatccgggacatcacagacagcctgattgagcactgtcaggagaagcagctggatgagaacgccaatgtccagctgtcagatgagaagatcattaacatcgtcttggacctctttggagctgggtttgacacagtcacaactgctatctcctggagcctcatgtatttggtgatgaaccccagggtacagagaaagatccaagaggagctagacacagtgattggcaggtcacggcggccccggctctctgacagatcccatctgccctatatggaggccttcatcctggagaccttccgacactcttccttcgtccccttcaccatcccccacagcacaacaagagacacaagtttgaaaggcttttacatccccaaggggcgttgtgtctttgtaaaccagtggcagatcaaccatgaccagaagctatgggtcaacccatctgagttcctacctgaacggtttctcacccctgatggtgctatcgacaaggtgttaagtgagaaggtgattatctttggcatgggcaagcggaagtgtatcggtgagaccgttgcccgctgggaggtctttctcttcctggctatcctgctgcaacgggtggaattcagcgtgccactgggcgtgaaggtggacatgacccccatctatgggctaaccatgaagcatgcctgctgtgagcacttccaaatgcagctgcgctcttaggtgcttgagagccctgaggcctagactctgtctacctggtctggttgggcagccagaccagcaggctggcctatgtggtctaaggttcagcctgaaactcatagacactgatctggctgcagttttgctatctgggctgtgggcaagcctaagggatcctgcctgcccctaccctggacttgcctctgcacaccctccagagacaacaggtaaaacagggccacatagatgctgatggagccttcccaagttgtgcttgagccaggaggcctgctagggttaggaggtccttaggcctctgagaagctctgaagaactctctggaagcccctgggcccagtacctagctggctctgtgagggtgctgactggcttcagcaagttagaactagccaaaccaggaccctgtccaatctttgacaattgggagctgccaagagtgaagggaagagacagcccaggatactggcacagaggtagtctcactgcttgaactaggctgagcaatctgaccctatgggtctaggacacagttcctgggaacatcacattcctctgcccttcctgcaggcaggaacaaacagggctgccttctggccttgtaagacccttattgctgtcctggaggggctggggacttgtgtctgcggggatcagagcgcacagggagtgcacatatccaggcaccaggactagggctggagtgaggggggggtatttcaattaccttctattggtctcccttctctacactcttgtaataaaatgtctatttttaatgtttgtacacaacaatccttctattctagcctgcattgagcttgcatgcttgcataagagcttaagaaccattgatttaatgtaatagggaaaattctaacccaggtatccaaaaatgtgtaagaacaactacctgagctaaataaagatattgttcactcgagccggaaaaatcacatttattagttaagacgaccacaggctggacacaacacacatgctaaaaagtggactgtcttttaaaacttccaaggtaaataggtaaatgttttccacagcccaacaatcatttcagtgtttacaaattaaaaggcccacggttaagacattaaacagtaaaatatgtaataaatgctccaacctaccctctcccccgaaagctgcttctaagtttaaaaccatgaatttgactaaccatgccattgaaaaccatccaggttactacaggctgaattagttttcaatgtctaagtcctagaaatatcactccctatcccagccctagcaaattctaactttacatttgacataaggcattaacatcaattaaagcctcagtttaataatcagaatttaaatgaagtctcctgaagacctctcttctggcaaaaaaaaaacacgtatcagactctgggaaaacattcagacccacttctagctattactgaaataaatgattagaaagttacgttggtgagccgaagttaaacctaaagctatcccctggatctttctagcaataaacccatgttgaacctaccatgaaaactttcattcactgtgcttttggttacgttgcctcctgattagtcattaattttaatgaggttttttccttgtgttgagtatgaatagaccttacagtttgaggatctctagaattccctgaattattggaaagacattcatgactcccagtgtgactagttaagagccccagggagcctgtgaagactagaatctacaagtaacctgcactaagaacgaaattcagtaaaggagactcaagcttagctcctggccatcttaaagggctaatgtatgtctttcacaggtttgttcaacatttcagtaattcacagtatagccaagagcatgagtataagtctcttgaaaaagccagttatttggagctttttaaattataaactttgaaaaagtcacccacgttctcacactatatagatgactttgtatctattttactattttctcatttaacc

SEQ ID NO: 4687 - protein, 569 aa, Homo sapien
GHTYKPAYKGGSAFTLTLKVTVPWNLPLILVIPGSKSPPFPAQLSTSAATSKIPTLIMLFPISMSATEFLLASVIFCLVFWVIRASRPQVPKGLKNPPGPWGWPLIGHMLTLGKNPHLALSRMSQQYGDVLQIRIGSTPVVVLSGLDTIRQALVRQGDDFKGRPDLYTFTLISNGQSMSFSPDSGPVWAARRRLAQNGLKSFSIASDPASSTSCYLEEHVSKEAEVLISTLQELMAGPGHFNPYRYVVVSVTNVICAICFGRRYDHNHQELLSLVNLNNNFGEVVGSGNPADFIPILRYLPNPSLNAFKDLNEKFYSFMQKMVKEHYKTFEKGHIRDITDSLIEHCQEKQLDENANVQLSDEKIINIVLDLFGAGFDTVTTAISWSLMYLVMNPRVQRKIQEELDTVIGRSRRPRLSDRSHLPYMEAFILETFRHSSFVPFTIPHSTTRDTSLKGFYIPKGRCVFVNQWQINHDQKLWVNPSEFLPERFLTPDGAIDKVLSEKVIIFGMGKRKCIGETVARWEVFLFLAILLQRVEFSVPLGVKVDMTPIYGLTMKHACCEHFQMQLRS

SEQ ID NO: 4688 - DNA, 5252 bp, Homo sapien
  Unsure 3219-3254: Unknown base
gtttctgccccttgctgagagaatggtcgaaaaaatggtgaaagaggacaagatagaagctgaggctgaagttgaactttattatatgatcctggaacgtttgggaaagtaccaggaggccttggatgtcatcagagggaaattaggagagaagttgacaagtgagattcagagtcgggaaaataaatgcatggctatgtacaagaagctgagcaggtggccagagtgcaatgccctttcccggcgcctcttactaaaaaaaggcctggagtcctcctgctgaaggtgaacactctttagaaggagaagtacattattctgcagaaaaagctgtgaagtttatagaagatcggataacggaagaatctaaaagttctcgccatctccgaggaccacatctagctaaattggagctgattaggcgtttacgaagtcaaggttgtaacgatgagtacaaactgggtgatccagaagaattaatgttccagtattttaaaaagtttggcgataaaccttgttgttttacagaccttaaggtgtttgttgacctcttacctgctacacagtgtacaaaatttattaatcagttacttggagttgttccttgtcgacaccaacagaggataagctggcactgcctgctgacatcagagctctgcagcaacattgtgtgtggtgcagctgacgaggttacttggcttgtaccacaccatggataaaaatcagaaattgagtgtggtcagagaattgatgttaaggtaccagcatggactggaatttgggaaaacctgtttgaaaacagaattgcaattttctgactattactgtctccttgctgtccatgcgcttattgatgtatggagggaaacaggtgatgagaccactgtgtggcaggccctgactttgctggaagagggattaacccatagcccttccaatgctcagttcaaattgctgcttgttcgaatctactgtatgctgggtgcatttgaaccagtggtggatctttactccagcctcgatgctaagcatatccagcatgataccattggttatcttttgacccgatatgctgaatctctaggtcagtatgctgctgcgtcccaatcctgtaacttcgcactcaggttttttcactccaaccagaaagatacctcagaatatattattcaagcttacaaatatggtgcatttgagaagatcccagagtttatcgcttttaggaacaggctgaataattctcttcattttgcacaagtccgtactgaacggatgctgttagaccttctacttgaagcaaatatatcaaccagtttagcagaaagtataaagtcaatgaaccttaggccagaagaagatgacattccatgggaagatttgcgagacaacagagacttaaatgtttttttcagctgggatccaaaagacagggacgtttctgaagaacataagaaactttccttagaggaggagaccttgtggttaagaatccgatccttaacattgaggctgataagtggacttccaagtctcaaccaccctgtggagccaaagaactcggagaagactgccgagaatggggtatcctcccggattgatattcttcgtttgctccttcaacagctggaggcaaccctggagacaggaaagcgatttattgagaaggatattcagtatcctttccttggtcctgtacctaccagaatgggtggattctttaattctggctgttctcagtgccagataagctctttttatcttgtcaatgatatttatgagctggataccagtggtttagaggatacaatggagattcaggaacgaatagaaaatagttttaagtctttactagaccagttaaaagatgtcttcagtaaatgtaaaggtgacctcttagaagttaaagatggtaacttgaaaacacatcctactcttttagaaaatctagttttctttgttgagactatttctgttatcctttgggtatccagttactgtgagagtgtcctacgaccatacaaactaaatttacagaaaaagaaaaagaagaaaaaagaaaccagcatcatcatgccacctgtctttaccagtttccaagactatgttactgggcttcagactttaatttccaatgttgtggatcatattaaagggcttgaaacacatctaattgcacttaaacttgaagaacttattttagaagacacttctctctcaccggaagagagaaaattttcaaagactgtgcaagggaaggtgcagagcagttatctgcactcacttctggaaatgggggagctgctgaaaaaaagacttgagaccacaaagaaactaaaaatttaaggaagtatctatcatgggcactgatgactctgcaacagaatatgacaccatcttcccaggcaaaagcaacatctggttgaccatgattttaatccagaacttcctcataaaatgcatgaaggactttgatcgtgaatttttttaggtgttaaatatatacaactgattaaattattgtatataaaccagaagcgggaccctcatctgggtttgaccactttttatacatgttcatatgcatatggcagcaacaagagaaccctacttttcttcttcccatcaccagaaacatcttttcaggggagcggggggtctataaaaacagcaatagaaattaagcataaagcatcaacctcatagcaactgaatagcccttccattataaataacattgagagtttttggtctggtccttgagccacaagaagtggaggggagaccatgcctgggaacagacccccttttcacagcagtaagtttgttttgaggctttctcagctacttggctcccacagaacccaaggcaggtacacaaaggaccttagatgagatctggcatatgcacccgcaatagaagggcaccacttggatgaccacaggcacttagtttttggctagtttttgtctgatagttaagacatccccatcctagcttctgtgagagttaaaaatctcaggtaagaaggcaaggaaggctctgttaatttatagctgtttagaggggaaagcagtgcagaccacttattaagcccgctgaggactagctttctgtctttcatacatttgggaaagataggaatgactgtttcaaagaagagaggtgcacataatttatgcaggcaagtatgatacttatttcattggttttgtgagtcnnnnnnnnnnnnnnnnnnnnnnnnnnnnnnnnnnnngacttgaaaattaagatttaatactttaatgttttaagtgtggggggtttgggaaggaaggaatgtaatattatggatttagccttaggctttaagttttaggctggcaaaagaaatgttattcagtgggtttgaggtttggactactttcttcaaacttagagaattataacaggatggtgtttactttgttcacctggatgtccccaagactctagcttcttctatcagtggttggtctgatagaagaggtaaaaattgctcttgaaaatgtcctacaatttatgcagtttctttgataatatttttctgtttaaatccctgcttctgtttttggtctgttacctaaatatagttcaagtttaattctgtaagagcaaagaaatgaatttgatgaggaaattaagcatccaatggaggattggtcttgaagaccttaaaggtgctttccaacctgcactgctccagtgaaatgtggtacttttttcttttaaaagcaaccaagagagctgggaatatctgtgtacgcaaagtaattgcattttgtcccttcattttgactttcttagattcataatttgatacagtgcttaaacttccaaggaaattttaaacaattactacattacctgttcaaaataaggcttgttggaaatcctagtccatcaactaatttcaaaaatttatttttgatatgagtagcaacagctggtcatataccctatcccaaaaggaagaactgtcttgaacaagatgaatggaaaattgtggttaattctgaatttcatgtaatgacaacatattctttcataaaactatggcctgtttaagatggaactttgtgtgtgtctgctggggagggtggggtacatgtgtatggcgtgtgttcttgaaatgatgtctctctgaatatccaaaaaagtactgtactgtagaaatgctctttgaaaaagtctatcgactgaccatgatcaatctagcatatgtatgttcagtgggctagccttggtcctcagggacagtgtgtgactctagtggtcttcctaaccagtctcttgcctaaagatatctgggacctctactggctttaatgacaaataatgttatgttgaggttatgcttcctttgttatttgctgattttcctactaaatgtagcatttcaattagatccagctttcacattttgagataattgtaaaaagaatgaaattatgcagaaatggccaatatctcttatcaatctgttcttttggaaaccctcatgtactataaattgtgtacagttaaaaaaatatatatatatatatattcttacatgagtaaaaagcaccctctcccagcaatcgtatgccattggtatttgaagagaattcccaaataacccattgctgctgctgctgtttttgatttgtatgggtttttttgttttgtttgtttttgtgtggtaaactgatatttaaaaaaggaaaggagaaaaatcacgactactgtttacagactgaaaaattattgctttttatactactgagatcctaagttaagactctccaaagcaaacatttggtttaaatcatttatctgatgtagataaaaggtagagaaacttgtagtgttctccacataatggaaaatgtacaaatgcctagttgtgttgcccatcaattttgtatattttcataattttaattgttgaaaattgcattatattttgcaatcactatgttcaatctggatttgtctttcattttaacttttaatataaaaaggggtttcaatgtatctacaggcttgttattgaaacttcctacttatttgatgtgatttattaatataggaagtatatattcttccttaagtaagtgaagcatagcaaatctactttaaactggatgggttaatttatataaacattttcattttaagttggcatttctggctggttcctttttgttcagattcttagaagcaacaacttctgaatggtgtaattcatctc

SEQ ID NO: 4689 - protein, 780 aa, Homo sapien
FLPLAERMVEKMVKEDKIEAEAEVELYYMILERLGKYQEALDVIRGKLGEKLTSEIQSRENKCMAMYKKLSRWPECNALSRRLLLKKGLESSCEGEHSLEGEVHYSAEKAVKFIEDRITEESKSSRHLRGPHLAKLELIRRLRSQGCNDEYKLGDPEELMFQYFKKFGDKPCCFTDLKVFVDLLPATQCTKFINQLLGVVPCRHQQRISWHCLLTHQSSAATLCVVQLTRLLGLYHTMDKNQKLSVVRELMLRYQHGLEFGKTCLKTELQFSDYYCLLAVHALIDVWRETGDETTVWQALTLLEEGLTHSPSNAQFKLLLVRIYCMLGAFEPVVDLYSSLDAKHIQHDTIGYLLTRYAESLGQYAAASQSCNFALRFFHSNQKDTSEYIIQAYKYGAFEKIPEFIAFRNRLNNSLHFAQVRTERMLLDLLLEANISTSLAESIKSMNLRPEEDDIPWEDLRDNRDLNVFFSWDPKDRDVSEEHKKLSLEEETLWLRIRSLTLRLISGLPSLNHPVEPKNSEKTAENGVSSRIDILRLLLQQLEATLETGKRFIEKDIQYPFLGPVPTRMGGFFNSGCSQCQISSFYLVNDIYELDTSGLEDTMEIQERIENSFKSLLDQLKDVFSKCKGDLLEVKDGNLKTHPTLLENLVFFVETISVILWVSSYCESVLRPYKLNLQKKKKKKKETSIIMPPVFTSFQDYVTGLQTLISNVVDHIKGLETHLIALKLEELILEDTSLSPEERKFSKTVQGKVQSSYLHSLLEMGELLKKRLETTKKLKI

SEQ ID NO: 4690 - DNA, 1146 bp, Homo sapien
gtgcgtacgtgcgtcgtctctatggtggcggcggatttggagggaccctacgaaccaggagtcaggcgagccgatctggggctgcaggatgttccgctgggagcgctccattcccctgcgaggctcggccgccgccctgtgcaacaacctcagtgtgctgcagctgccggctcgcaacctcacgtattttggcgtggttcatggaccaagcgcccagcttctcagcgctgctcctgagggtgtgcccttggcccagcgccagctccacgctaaggagggtgctggagtgagtcccccacttatcactcaggtccactggtgtgtcctccccttccgagtgctgctggtactcacctcacatcgaggaatacagatgtacgagtccaatggctacaccatggtctactggcatgcactggactctggagatgcctccccagtacaggctgtgtttgcccggggaattgctgccagtggccacttcatctgtgtgggaacgtggtcaggccgggtgctggtgtttgacatcccagcaaagggtcccaacattgtactgagcgaggagctggctgggcaccagatgccaatcacagacattgccaccgagcctgcccagggacaggattgtgtggctgacatggtgacggcagatgactcaggcttgctgtgtgtctggcggtcagggccagaattcacattattgacccgcattccaggatttggagttccgtgcccctctgtgcagctgtggcaggggatcatagcagcaggctatgggaacggacaagtgcatctatatgaggccactacaggaaatctacatgtccagatcaatgcccatgcccgggccatctgcgccctggacctggcttctgaggtgggcaagctactctctgcaggtgaggacacctttgtgcatatctggaagctgagcagaaacccagagagtggctacattgaggtggaacactgtcatggtgagtgtgtcgccgacacccagctgtgtggtgctcgattttgtgattcctcaggcaactcctttgctgtgactggctatgaccttgcggagatccggagattcagcagtgtgtgagaagagcagccttcctttgtccctgtggtattcataaagtacccgctccaccc

SEQ ID NO: 4691 - protein, 334 aa, Homo sapien
MFRWERSIPLRGSAAALCNNLSVLQLPARNLTYFGVVHGPSAQLLSAAPEGVPLAQRQLHAKEGAGVSPPLITQVHWCVLPFRVLLVLTSHRGIQMYESNGYTMVYWHALDSGDASPVQAVFARGIAASGHFICVGTWSGRVLVFDIPAKGPNIVLSEELAGHQMPITDIATEPAQGQDCVADMVTADDSGLLCVWRSGPEFTLLTRIPGFGVPCPSVQLWQGIIAAGYGNGQVHLYEATTGNLHVQINAHARAICALDLASEVGKLLSAGEDTFVHIWKLSRNPESGYIEVEHCHGECVADTQLCGARFCDSSGNSFAVTGYDLAEIRRFSSV

SEQ ID NO: 4692 - DNA, 7029 bp, Homo sapien
atggcggcggcggcggggaatcgcgcctcgtcgtcgggattcccgggcgccagggctacgagccctgaggcaggcggcggcggaggagccctcaaggcgagcagcgcgcgcgcggctgccgcgggactgctgcgggaggcgggcagcgggggccgcgagcgggcggactggcggcggcggcagctgcgcaaagtgcggagtgtggagctggaccagctgcctgagcagccgctcttccttgccgcctcaccgccggcctcctcgacttccccgtcgccggagcccgcggacgcagcggggagtgggaccggcttccagcctgtggcggtgccgccgccccacggagccgccagccggcgcggcgcccaccttaccgagtcggtggcggcgccggacagcggcgcctcgagtcccgcagcggccgagcccggggagaagcgggcgcccgccgccgagccgtctcctgcagcggcccccgccggtcgtgagatggagaataaagaaactctcaaagggttgcacaagatggatgatcgtccagaggaacgaatgatcagggagaaactgaaggcaacctgtatgccagcctggaagcacgaatggttggaaaggagaaataggcgagggcctgtggtggtaaaaccaatcccagttaaaggagatggatctgaaatgaatcacttagcagctgagtctccaggagaggtccaggcaagtgcggcttcaccagcttccaaaggccgacgcagtccttctcctggcaactccccatcaggtcgcacagtgaaatcagaatctccaggagtaaggagaaaaagagtttccccagtgccttttcagagtggcagaatcacaccaccccgaagagccccttcaccagatggcttctcaccatatagccctgaggaaacaaaccgccgtgttaacaaagtgatgcgggccagactgtacttactgcagcagatagggcctaactctttcctgattggaggagacagcccagacaataaataccgggtgtttattgggcctcagaactgcagctgtgcacgtggaacattctgtattcatctgctatttgtgatgctccgggtgtttcaactagaaccttcagacccaatgttatggagaaaaactttaaagaattttgaggttgagagtttgttccagaaatatcacagtaagcgtagctcaaggatcaaagctccatctcgtaacaccatccagaagtttgtttcacgcatgtcaaattctcatacattgtcatcatctagtacttctacatctagttcagaaaacagcataaaggatgaagaggaacagatgtgtcctatttgcttgttgggcatgcttgatgaagaaagtcttacagtgtgtgaagacggctgcaggaacaagctgcaccaccactgcatgtcaatttgggcagaagagtgtagaagaaatagagaacctttaatatgtcccctttgtagatctaagtggagatctcatgatttctacagccacgagttgtcaagtcctgtggattccccttcttccctcagagctgcacagcagcaaaccgtacagcagcagcctttggctggatcacgaaggaatcaagagagcaattttaaccttactcattatggaactcagcaaatccctcctgcttacaaagatttagctgagccatggattcaggtgtttggaatggaactcgttggctgcttattttctagaaactggaatgtgagagagatggccctcaggcgtctttcccatgatgtcagtggggccctgctgttggcaaatggggagagcactggaaattctgggggcagcagtggaagcagcccgagtgggggagccaccagtgggtcttcccagaccagtatctcaggagatgtggtggaggcatgctgcagcgttctgtcaatggtctgtgctgaccctgtctacaaagtgtacgttgctgctttaaaaacattgagagccatgctggtatatactccttgccacagtttagcggaaagaatcaaacttcagagacttctccagccagttgtagacaccatcctagtcaaatgtgcagatgccaatagccgcacaagtcagctgtccatatcaacactgttggaactgtgcaaaggccaagcaggagagttggcagttggcagagaaatactaaaagctggatccattggtattggtggtgttgattatgtcttaaattgtattcttggaaaccaaactgaatcaaacaattggcaagaacttcttggccgcctttgtcttatagatagactgttgttggaatttcctgctgaattttatcctcatattgtcagtactgatgtttcacaagctgagcctgttgaaatcaggtataagaagctgctgtccctcttaacctttgctttgcagtccattaataattcccactcaatggttggcaaactttccagaaggatctacttgagttctgcaagaatggttactacagtaccccatgtgttttcaaaactgttagaaatgctgagtgtttccagttccactcacttcaccaggatgcgtcgccgtttgatggctattgcagatgaggtggaaattgccgaagccatccagttgggcgtagaagacactttggatggtcaacaggacagcttcttgcaggcatctgttcccaacaactatctggaaaccacagagaacagttcccctgagtgcacaatccatttagagaaaactggaaaaggattatgtgctacaaaattgagtgccagttcagaggacatttctgagagactggccagcatttcagtaggaccttctagttcaactactaactactactacaacaacagagcaaccaaagccaatggttcaaacaaaaggcagaccccacagtcagtgtttgaactcctctcctttatctcatcattcccaattaatgtttccagccttgtcaaccccttcttcttctaccccatctgtaccagctggcactgcaacagatgtctctaagcatagacttcagggattcattccctgcagaataccttctgcatctcctcaaacacagcgcaagttttctctacaattccacagaaactgtcctgaaaacaaagactcagataaactttccccagtctttactcagtcaagacccttgccctccagtaacatacacaggccaaagccatctcgacctaccccaggtaatacaagtaaacagggagatccctcaaaaaatagcatgacacttgatctgaacagtagttccaaatgtgatgacagctttggctgtagcagcaatagtagtaatgctgttatacccagtgacgagacagtgttcaccccagtagaggagaaatgcagattagatgtcaatacagagctcaactccagtattgaggaccttcttgaagcatctatgccttcaagtgatacaacagtaacttttaagtcagaagttgctgtcctgtctcctgaaaaggctgaaaatgatgatacctacaaagatgatgtgaatcataatcaaaagtgcaaagagaagatggaagctgaagaagaagaagctttagcaattgccatggcaatgtcagcgtctcaggatgccctccccatagttcctcagctgcaggttgaaaatggagaagatatcatcattattcaacaggatacaccagagactctaccaggacataccaaagcaaaacaaccgtatagagaagacactgaatggctgaaaggtcaacagataggccttggagcattttcttcttgttatcaggctcaagatgtgggaactggaactttaatggctgttaaacaggtgacttatgtcagaaacacatcttctgagcaagaagaagtagtagaagcactaagagaagagataagaatgatgagccatctgaatcatccaaacatcattaggatgttgggagccacgtgtgagaagagcaattacaatctcttcattgaatggatggcagggggatcggtggctcatttgctgagtaaatatggagccttcaaagaatcagtagttattaactacactgaacagttactccgtggcctttcgtatctccatgaaaaccaaatcattcacagagatgtcaaaggtgccaatttgctaattgacagcactggtcagagactaagaattgcagattttggagctgcagccaggttggcatcaaaaggaactggtgcaggagagtttcagggacaattactggggacaattgcatttatggcacctgaggtactaagaggtcaacagtatggaaggagctgtgatgtatggagtgttggctgtgctattatagaaatggcttgtgcaaaaccaccatggaatgcagaaaaacactccaatcatcttgctttgatatttaagattgctagtgcaactactgctccatcgatcccttcacatttgtctcctggtttacgagatgtggctcttcgttgtttagaacttcaacctcaggacagacctccatcaagagagctactgaagcatccagtctttcgtactacatggtagccaattatgcagatcaactacagtagaaacaggatgctcaacaagagaaaaaaaacttgtggggaaccacattgatattctactggccatgatgccactgaacagctatgaacgaggccagtggggaacccttacctaagtatgtgattgacaaatcatgatctgtacctaagctcagtatgcaaaagcccaaactagtgcagaaactgtaaactgtgcctttcaaagaactggccctaggtgaacaggaaaacaatgaagtttgcatgactaaattgcagaagcataattttatttttttggagcactttttcagcaatattagcggctgaggggctcaggatctattttaatatttcaattattcttccatttcatatagtgatcacaagcagggggttctgcaattccgttcaaattttttgtcactggctataaaatcagtatctgcctcttttaggtcagagtatgctatgagtagcaatacatacatatatttttaaaagttgatacttctttatgacccacagttgacctttattttcttaaataccagggcagttgtggctcattgtgcattttactgttggcccattcatttcgtttttggaaattatggttttgtattttcatgtttatttacattcatttttgtttattcagggaaagctgatctttttttcaaaccagaaaaaaaaaatgaactagatatgaagtagagttcattaaatatcttgctattgtcagagtttttaaaatatagacttaattttgtttttttaaattggaatacaataaagtactacctacatttgagtcagtcaccactcttattgtgcaggttaagtacaagttaactaaaaataaactgtcctctctggtgcaactcacaaccaagatcaagattaccttaaaatttatttgaattttttagatgttttggttgtcaaactgtaggaaacttcacaacatttaagtcttactctgtatgtaacaatccatcattcaccttcactactggtaataacatagagctgccattttccttttaccatgcatcatctctttacagtaggcctggcagatcattttttaaaaagattattcaactaccaatcagtaatgtttttaaacagtacatttgctttgaacttggaaaatgtgttcagaaagaaaaatggaattgaatttcatttatacactaattccttggattttgcacagttacctaacggttttagtctggagttaaattcagatgcatggaatcctgaaggaaaatggtagctttttaatctttttgtgtgtgtgtgagtcttttaaatcaagtactgattaactattaagtacaactttgagattttagttttaactcttcagaagccagtgtgaaatagaattggttattctcaaagactcaggataaactaaataagctatatatagagtacatttaaaatgtacaacacaaattggaagtaaaataagttacaagataagtttacagggatatattgcttacaatttttaaaaggcagtttgttttttatgtgaatatgtttcttagtgaaattttacattcctttgttttggaagattggcgatatttgaagagttaaaaatagtacagaaatgtgaagtttggtatctctaaatgtgttgtacttgactttcttttttatttttttttattttttttgactacttagaattttcacaattctaataagattgtttccaagtctctcatgtgcaagctttaaaggatgcactcttgccattttatgtactggaagatcattggtcagatgaatactgtgtctgacaaaaatgtaaactgtataaactgaggaacctcagctaatcagtattactttgtagatcaccatgcccaccacatttcaaactcaaactatctgtagatttcaaaatccattgtgtttgagtttgtttgcagttccctcagcttgctggtaattgtggtgttttgttttttgttttgttttcaatgcaaatgtgatgtaatattcttattttctttggatcaaagctggactggaaattgtatcgtgtaattatttttgtgttcttaatgttatttggtactcaagttgtaaataacgtctactactgtttattccagtttctactacctcaggtgtcctatagatttttcttctaccaaagttcactttcacaatgaaattatatttgctgtgtgactatgattcctaagatttccagggcttaagggctaacttctattagcaccttactgtgtaagcaaatgttacaaaaaaagacaagaaaaaaatctctgggttaagaaaatttggcttaaatgtatcctttgttattttaaatatattgagatattttaattaaaatttttaccccattgaaccgattttatagtatttgtacctattttggtgtttttgtctttatagtaaataaaagtttttgaacaaaaaaaaaagtcgacgcgg

SEQ ID NO: 4693 - protein, 1512 aa, Homo sapien
MAAAAGNRASSSGFPGARATSPEAGGGGGALKASSARAAAAGLLREAGSGGRERADWRRRQLRKVRSVELDQLPEQPLFLAASPPASSTSPSPEPADAAGSGTGFQPVAVPPPHGAASRRGAHLTESVAAPDSGASSPAAAEPGEKRAPAAEPSPAAAPAGREMENKETLKGLHKMDDRPEERMIREKLKATCMPAWKHEWLERRNRRGPVVVKPIPVKGDGSEMNHLAAESPGEVQASAASPASKGRRSPSPGNSPSGRTVKSESPGVRRKRVSPVPFQSGRITPPRRAPSPDGFSPYSPEETNRRVNKVMRARLYLLQQIGPNSFLIGGDSPDNKYRVFIGPQNCSCARGTFCIHLLFVMLRVFQLEPSDPMLWRKTLKNFEVESLFQKYHSKRSSRIKAPSRNTIQKFVSRMSNSHTLSSSSTSTSSSENSIKDEEEQMCPICLLGMLDEESLTVCEDGCRNKLHHHCMSIWAEECRRNREPLICPLCRSKWRSHDFYSHELSSPVDSPSSLRAAQQQTVQQQPLAGSRRNQESNFNLTHYGTQQIPPAYKDLAEPWIQVFGMELVGCLFSRNWNVREMALRRLSHDVSGALLLANGESTGNSGGSSGSSPSGGATSGSSQTSISGDVVEACCSVLSMVCADPVYKVYVAALKTLRAMLVYTPCHSLAERIKLQRLLQPVVDTILVKCADANSRTSQLSISTLLELCKGQAGELAVGREILKAGSIGIGGVDYVLNCILGNQTESNNWQELLGRLCLIDRLLLEFPAEFYPHIVSTDVSQAEPVEIRYKKLLSLLTFALQSINNSHSMVGKLSRRIYLSSARMVTTVPHVFSKLLEMLSVSSSTHFTRMRRRLMAIADEVEIAEAIQLGVEDTLDGQQDSFLQASVPNNYLETTENSSPECTIHLEKTGKGLCATKLSASSEDISERLASISVGPSSSTTNYYYNNRATKANGSNKRQTPQSVFELLSFISSFPINVSSLVNPFFFYPICTSWHCNRCLKHRLQGFIPCRIPSASPQTQRKFSLQFHRNCPENKDSDKLSPVFTQSRPLPSSNIHRPKPSRPTPGNTSKQGDPSKNSMTLDLNSSSKCDDSFGCSSNSSNAVIPSDETVFTPVEEKCRLDVNTELNSSIEDLLEASMPSSDTTVTFKSEVAVLSPEKAENDDTYKDDVNHNQKCKEKMEAEEEEALAIAMAMSASQDALPIVPQLQVENGEDIIIIQQDTPETLPGHTKAKQPYREDTEWLKGQQIGLGAFSSCYQAQDVGTGTLMAVKQVTYVRNTSSEQEEVVEALREEIRMMSHLNHPNIIRMLGATCEKSNYNLFIEWMAGGSVAHLLSKYGAFKESVVINYTEQLLRGLSYLHENQIIHRDVKGANLLIDSTGQRLRIADFGAAARLASKGTGAGEFQGQLLGTIAFMAPEVLRGQQYGRSCDVWSVGCAIIEMACAKPPWNAEKHSNHLALIFKIASATTAPSIPSHLSPGLRDVALRCLELQPQDRPPSRELLKHPVFRTTW

SEQ ID NO: 4694 - DNA, 5705 bp, Homo sapien
gaatctttccatgccgctggagctcatctgctccgatgagcacatgcaaggcagcgggagcctggcccaggctgtcatcagggaagtcagagcccagtggagtcggattttctccaccgcactcttcgtggagcacgtgctcctaggaaccgagagccgcgtccccgagttacaggggctggtgaccgagcacgtcttcttactagacaagtgtcttcgagagaactctgacgtgaagacgcacgggccttttgaggccgtgatgcgcactctctgtgaatgcaaggagacagccagcaagaccctcagcaggtttgggattcagccgtgctccatctgcctgggagatgcaaaggaccccgtctgtctgccctgcgaccacgtgcactgcctgcgctgcctcagggcctggtttgcctcagagcagatgatatgcccctactgtttaactgccttgccagacgaattctctccagctgtttcccaagcgcacagggaagccattgaaaagcatgcccgcttccggcagatgtgcaacagtttcttcgtagacctggtgtccaccatttgcttcaaggacaacgctccgcctgagaaggaagtgattgagagcctgctctctctcctcttcgtccaaaaggggcgcttaagagatgctgcccagagacactgtgaacacacaaaatctctctctccattcaatgatgttgtggataagactcctgtcatccgctcagtgatactgaaactgcttttgaagtacagctttcatgatgtaaaagattatattcaggaatatttgaccctgttaaaaaagaaagcattcataactgaagataaaactgaactgtacatgctcttcatcaactgcctggaggattcaatacttgagaagaccagtgcttactccagaaatgatgaactgaaccacctagaagaggaaggtcgtttccttaaggcatattctccagcaagccggggccgagagcctgccaacgaggcctcggttgaatacctgcaagaggtggcccggatccgcctctgcctcgacagagctgcagatttcctctcggagcctgagggaggcccagagatggccaaggagaagcagtgctacctgcagcaagtcaagcagttctgtatccgggtggagaacgactggcaccgggtgtacctggtgcggaagctcagcagccagcgggggatggagttcgtgcagggcctctccaagcccggccgcccgcaccagtgggtgtttcccaaggacgttgtcaagcagcaggggctgcggcaggaccacccaggccagatggataggtacctggtgtacggcgatgaatacaaggctctccgtgatgctgtggccaaagctgtcctcgagtgcaagccactgggcattaagactgctctgaaggcctgcaagaccccccaaagccagcagtcagcctacttcctgttaacactgtttagagaggtggctattttgtacagatcccacaatgcaagcctccaccccacgccagagcaatgtgaagctgtgagcaaattcattggcgaatgcaagatcctttcacctcctgatatcagccgttttgcaacatcgctcgtggacaattctgtgccattgttgagggcggggcctagtgacagcaaccttgatggaacggtgacagaaatggccattcatgctgcagccgtccttctgtgtggacagaatgaactcttggagcccctaaagaatctggccttctccccagccaccatggcgcatgcttttcttccaaccatgcctgaagacttgctggctcaagctcggaggtggaagggtctggagcgagtccactggtacacttgtcccaacggccatccttgctccgtgggagagtgtggcaggccgatggaacagagcatctgcattgactgccatgcgccgattggaggcattgaccacaaacctcgggacggctttcatctggtcaaagacaaggcagacagaacgcagaccggccatgtgctgggcaacccgcagcggagagacgtggtgacatgtgaccgagggctgcccccagtggtcttcctccttatccggctactcactcacttggctctgcttctgggagcgtcccagagttcccaggctctgataaacatcattaagcctccagtgagggatccaaaaggctttctgcagcagcacatcctgaaggacctggagcagttggccaagatgctgggacacagtgccgacgagaccatcggcgtggtccacctcgtcctgcgcaggcttctccaagagcagcaccagctctctagcagaaggcttttaaattttgacacagaattgtcaactaaagaaatgaggaacaactgggaaaaggaaatcgcagctgtgatttctcctgaactggagcatctagataaaacccttcccaccatgaataatctcatcagccaagataagcgtatcagctctaaccctgtggccaaaataatatatggtgacccagtgaccttcctgccccacctgccccggaaaagtgtggtccattgctctaagatttggagctgcaggaaaagaattacagttgagtacctccagcacattgtggaacagaaaaatggcaaagaaagagtgcccatcctctggcatttcctgcagaaggaagcagagctgaggctggtaaagttcctgcctgagattttggccttgcaaagggatctagtgaagcagttccagaacgtccagcaagttgaatacagctccatcagaggcttcctcagcaagcacagctcagatgggttgaggcagctgcttcacaacaggatcacagtctttctgtccacatggaacaaactgaggagatcgcttgagacgaacggtgagatcaacctacccaaagactactgcagcactgacttggatctggacactgagtttgagatcctcttgccacgccgacggggcctgggcctctgtgctaccgctctcgtcagctacttgattcgcctacacaatgaaattgtctacgccgtggaaaaactctccaaggaaaacaacagctattccgtggatgccgccgaggtcactgaactgcatgtcatcagttatgaagtggagcgggacctgactccactgattctctccaactgccagtaccaggtggaggagggcagagagaccgtgcaggagttcgatctggagaagattcagcggcagatcgtcagccgcttcctccagggcaagccccggctgagcctcaagggaatacccactctggtgtacagacacgactggaactatgaacatctctttatggacatcaagaacaaaatggcacaggactccctccccagctcggtcattagtgccatcagtggacagctgcagtcctacagcgatgcctgtgaagtgctgtctgtcgtagaagtcactctggggtttctgagcacagctggtggggatccaaacatgcagctgaatgtgtatactcaagacatcctgcaaatgggtgatcagacgattcacgtgttaaaggccttaaacagatgccagttaaaacacaccattgccctctggcagttcctgtctgctcataagtctgaacagctgctgcggctgcacaaagagccatttggggaaatcagttcaaggtacaaagcggatctgagcccggaaaatgctaagctcctcagcacattcctaaatcagactggcctagacgccttcctgctagagctgcacgaaatgataatcttgaaactaaagaacccccaaacccaaaccgaggagcgcttccgccctcagtggagcctgagagacactctcgtaagttacatgcaaactaaagaaagtgaaattcttcctgaaatggcatctcagttcccagaagagatactgctcgccagctgtgtctcagtgtggaaaacagctgctgtgctgaaatggaatcgagaaatgagatagaattatttcctcagctatctttggatgactttggagagaagactcctctctcctcgtctgcggcgtggacttgatcatggactggtgcctttgcattcagaaggagagctgtcagcgtagcaccgaattcaagaccaaggcgtgctacctgagctgacagctttttgaaagccgagctgtttctgaaccatgtacatacatgttctgaaactttctcatcattttatgagtactgttcattgagagatgacaatgaagattagatgaaattggaaataaaccaacattgtttacattccaggagacttgtagctcagccacacacgcagtaatgacctgtgcccgttcgcctctggcactgcccacccctctttttttttttcttctaattctgtactcacaaaagagaatctcattttcttctttcttccattcccttaaattctgagtactgtacatatatttctgggttcccacgatgatgtgaaaaactaccagactgttttttgtcttctcacaaagacaagaaaaatcagggcattttgtgagtgccttaagatcaaactaacaagatctgaccctctcccctcacagtgagccactgccccacttcagagggtaagagccaaaagcctcattgtgaaaggcactggacttggaccagggacaccatcagggccttggttttctcacgcataaaatggagagtggattaatcgccaaagattcttctgatctgacattttgaaattgtgagagaaactagatgactgtaaacttggtcacaggcctggttctggcagttctttgcggacttttttctagcattatgccaaataaacatgcagtctcagtgtgctctcgcatgtatgaatatctagtcctttctgtggttctcagccaagacataaaaactaggactcagagcacatacaaaaccagttatgtttcggaaagagggaaaagagtccccgagcccggatcttgtgctgcttttctcactgacgtgttgccttttttctttacaaaatctgctttgatacttaggacctctctggactaatttctcttcctagacagctcagcacagctattgatatgttagaggcagtatccttaatattcattctaaatgagttaacgacttaacttgaaattgggcctaaggagtgagaactacaaaaatacaaaatgcttgtccaggactcagccatgcacaccttgagcagcgccggcaggaggcacggaaggaactgtgctccgttctcctcactgtcatggtgccaccagtgtctgatgaagggcagagtgacccagactgcaggcagtaactgacttcacacagtccctggcatttagtcatctgtgattgttttatcactctggactgtgcagagccacctgccaccgagatctgcattccgactgcctatgaacgggtgtgggggccgggggctggcttgctgaagtcttcaacttgcactcggagctcctttgatacctcagagctggctgtcaggtggcagctcacacccagactcactggccacacctcagcagggggggagtcgagtgtcagtctctttctgtgaaggctttttttttcctttggcctgggaatttttcccatttttatgaaggggttttaaattgtttcattttgtgtgctgtgcttcaaagccttaactgtcaaatcttgcattatcttgtttgtacagaaatatactggcctagcagaggc

SEQ ID NO: 4695 - protein, 1320 aa, Homo sapien
NLSMPLELICSDEHMQGSGSLAQAVIREVRAQWSRIFSTALFVEHVLLGTESRVPELQGLVTEHVFLLDKCLRENSDVKTHGPFEAVMRTLCECKETASKTLSRFGIQPCSICLGDAKDPVCLPCDHVHCLRCLRAWFASEQMICPYCLTALPDEFSPAVSQAHREAIEKHARFRQMCNSFFVDLVSTICFKDNAPPEKEVIESLLSLLFVQKGRLRDAAQRHCEHTKSLSPFNDVVDKTPVIRSVILKLLLKYSFHDVKDYIQEYLTLLKKKAFITEDKTELYMLFINCLEDSILEKTSAYSRNDELNHLEEEGRFLKAYSPASRGREPANEASVEYLQEVARIRLCLDRAADFLSEPEGGPEMAKEKQCYLQQVKQFCIRVENDWHRVYLVRKLSSQRGMEFVQGLSKPGRPHQWVFPKDVVKQQGLRQDHPGQMDRYLVYGDEYKALRDAVAKAVLECKPLGIKTALKACKTPQSQQSAYFLLTLFREVAILYRSHNASLHPTPEQCEAVSKFIGECKILSPPDISRFATSLVDNSVPLLRAGPSDSNLDGTVTEMAIHAAAVLLCGQNELLEPLKNLAFSPATMAHAFLPTMPEDLLAQARRWKGLERVHWYTCPNGHPCSVGECGRPMEQSICIDCHAPIGGIDHKPRDGFHLVKDKADRTQTGHVLGNPQRRDVVTCDRGLPPVVFLLIRLLTHLALLLGASQSSQALINIIKPPVRDPKGFLQQHILKDLEQLAKMLGHSADETIGVVHLVLRRLLQEQHQLSSRRLLNFDTELSTKEMRNNWEKEIAAVISPELEHLDKTLPTMNNLISQDKRISSNPVAKIIYGDPVTFLPHLPRKSVVHCSKIWSCRKRITVEYLQHIVEQKNGKERVPILWHFLQKEAELRLVKFLPEILALQRDLVKQFQNVQQVEYSSIRGFLSKHSSDGLRQLLHNRITVFLSTWNKLRRSLETNGEINLPKDYCSTDLDLDTEFEILLPRRRGLGLCATALVSYLIRLHNEIVYAVEKLSKENNSYSVDAAEVTELHVISYEVERDLTPLILSNCQYQVEEGRETVQEFDLEKIQRQIVSRFLQGKPRLSLKGIPTLVYRHDWNYEHLFMDIKNKMAQDSLPSSVISAISGQLQSYSDACEVLSVVEVTLGFLSTAGGDPNMQLNVYTQDILQMGDQTIHVLKALNRCQLKHTIALWQFLSAHKSEQLLRLHKEPFGEISSRYKADLSPENAKLLSTFLNQTGLDAFLLELHEMIILKLKNPQTQTEERFRPQWSLRDTLVSYMQTKESEILPEMASQFPEEILLASCVSVWKTAAVLKWNREMR

SEQ ID NO: 4696 - DNA, 5705 bp, Homo sapien; identical to SEQ ID NO: 4694

SEQ ID NO: 4697 - DNA, 6981 bp, Homo sapien
  Unsure 863-884: Unknown base
  Unsure 4131-4156: Unknown base
  Unsure 6613: Unknown base
  Unsure 6629: Unknown base
  Unsure 6633-6634: Unknown base
  Unsure 6649: Unknown base
  Unsure 6651: Unknown base
gagggagttataattttaaaggtatgctctggctgttccacctccgtgtgcttgttaattaacttgtaggactttgactgtaagatgtgaaaccacgtttcttgcatgatgttttagagattatttcatttacagtcttttaacctgcagctgcagcacttagttcacgttttcacaaatttcaagagtcactacactaaagacaatgccttttcatgaataagaagttttcagaaggctctagggggctgggaggcaggctgttcgtttgtcttttgttgggggtatcatttctgaacttgaaatccagttcagggagaagagaattcaaaattagaggagcttaaggggacacgggtcaacatctagctcgattcaggtgcattgagaagagtgagttcacatcggtgacccttaggacagtgagtggcagagccctgacgactgtggtgtcctctccacaaaaccctcaagggacttttgtcatcatgtgtgatgaatctttaaatatcgtctaattttcataagaatgaaaagaagttaacaggaaatagtaggctagggtttagttttaaaggcatgactgttatttacaaaggtgttaaatctgaggaaattgacaaatacagatttgtccattctagtggccaaacagtaacagtctaaaatgcagtcattttgaccctcccaagcaatttagtcatatgtgttgttttctcttttctgtttttacttcttagatttttaactaggttactgttggttcccattctgtcttttttgccagacttacatctggtgccagatacaatcagttggttaaattttgcttgcagttctgtgtattttttttcctctattannnnnnnnnnnnnnnnnnnnnngagatcctaaccttagatctttgatgtgaagctagcactgtctgtaatacttctaagagctgccactaaaataatacagcaatccgtggccaggggagcaccccctcctggttgggcccctcagttggagtctaagggttaatctctcatcttgctaagcagtattcaagtgccttgaacagtgtcccctcggcatggctccccttcagcaggctggcattccaagcagtggcccccgcaggcagccgacccccttcctcttcacgctctatgagtttaaaaagctgatttgtacctctcccctgggggaaacggttccatataaaacactaacacttaattacaagctccattatgccattttaaatggcttctttttgttaattggaggcattgttcataacttaaggcttttgccattaacttagctggctaagcagaggcttggggtaaaatcagtgtttgcatttagcctcttgacccggagttccggcccaagctcccttgtgatagccgagatggcaggtgtgtgagttctgtcctagacctgtgcccaactcacttccaccccagaggagtcttctgtcctcctccccaacccccgagctccctggtaacctcctcttgaacttctgtatcagtgaagacatctgtggtttctgctcaccagacctctctttagaaagggttatcagagccatggagcttagctcaattggattcttctagacgatcttaggaggcatcttggcatgaggcagcttctaagcgtctcctgggacaggattggggtgacagcccagggatgcatgcgtgggagaactctctgagaaatgccaggatcgtggctcacagggacccaccatcaaaacctgctactttgtgcaagtaattgaggcaaaagataccagtcgacagcctccctggggtagatcccttgtacctccaaagtacaaatacctccctgctcagtttccttcctgtcgccatctttgttttcttcccattgaaaaaccatcctgtctgatgtggacgttcaggtctgctggttggcggtccgggcccagagtgcagcagagctctgggttaaatattcctttctggccaccgcccaagcccaggtggccagctctcataccccatctccctccttggccagggccagcatcaggcgtgcagctcatgaccagtttacacaggctgcaaagagatcgctgtgggcctcggctgactactttaagattatgccacagccaggccctaaaaagagaggggaacaggagtccccaggtgagctctctgacgggcaggtgccttcccgactaaggttggactggatgactttgttcctcctgcatgcatgtcctttgatgcaagggtgatcaatgaactctgttgacattctatgcaatgtttttcattcctctgattttagcaaagcaaatcttactgaaaaatagcagagccaggggaacagacgcatgtccttctgggagtcacacaaagcagagagattttgaactgaggggcgacagcctttgccttaaatgcagtatgacaggcgcttcttggcagaccagtaaaaacaaaagcccatagaccttactcatcccaaggccgacaagccagctgtacagggcgagatgtagcaacacggggcatgagcggtgggcgtgctgggctatttgctgtggtactttaggctggaggtttggctcctgtgctgccggtggggggccctgtccctccccagatgtcctccctcttcttcacactcctcattgtcccttctacctcactaacctgtcttctccatctgatgtcacccagaaccacaccccacagaactgtgaggcacgtgggctggagagagcagaaaagctgccagcgcagcagacacgaacatccctctgcctggtgggccggctttgtgtgtctctccttttgtgagcgcaacacggacaaacagctgtgctctgcaaggcacacggatgtttcccttccacctgttcccaaagctccagcagctgtttcttttgcaggcagggcgtggtctcggggctccgagggtcttgtctttggtccgccttcctttctgtccagtcctgctcagctgttaagatccatcatggccattatccttgtcccggactgccccaaagttcccagctggctttggggaacactgtagctcttgggtgtctcttgtctctggcatggttttagcgtcactgcgaacactcctttgcaaacatcaaacatctcaaagacggaaaaggatagatggcttcctccagcctacacgccccgtccacagtggcatcaccctcttatcccaaaagaatatgccagttcccatccagcaccgaagaaaatcagctcctggggctggtggttggaggtgggtctgtccactgtgggggccaaagtgttcccctgctggagacagtttgcaagtaagaacctaaggatggggacagcatcctgtgcttgggcattgaccagccaaagctcacatttagaaatccctcagtgcttctgtggtttcacctgggcatcgacgacattagggaagcctttgtgaccacaagggcagggcttgtgccctgagtggcgaggtggtgacctgaggccagtgtgatgtggttggatctcagcgtgtactgaatgccagtctggccggcacactcgaacgctaagagaatggtccaatttgatgatcttatttctatttcgatcaggttttgactttttgtagatgaaaactaccagggaaaaggggaagcaggtacccaataaagtttagaaagatccagtctgtgaaacccttagagatgggctgaaagttaagtccaccaacccttgggcttaatcaggacggaagaggagggggtgtggggggcagagcgtaaaacaagccccagccctactcccggccccccagcccagtcttcccaatcccagaggccccggcggcctgtgctcctcaccaccctggtcaggggaatagaaggaaatgcaatttccgcctgtctgcccgacttccaaaaactgcctcctcctgcccaggcctctcccaccaccaccttccctccaaagataaccgtgtccatgccatccgtggcatcatctcgagttttcatttttggatgaagtgacatttagctttaacaagacatttccaaagcgcctagtctcctccaaaatgctaactttaaaagttgggcattgtaggcgaaaaatcccnnnnnnnnnnnnnnnnnnnnnnnnnngggctggcgagagaaagacatttggctatgcataaatgtgcacttcccccatgcccccgttcttaaactcttaagatgcctttgagttgcttttcatgaatccttttagtttacccgataatgttaagaaagcattagtctacgttactgtaatttctgtagtgtttacgctttaatttctaccacaaaatatgctatatgctatgtatcaagctttctgtaatcagaaagaaaaggtgccttatatcccaatgtcacggctacatccctatggaaattaatcagaagcacagtgtgtacggaagcattgggacttctgctggtgaaacaagagaccattcagcaagacacattgaagtggcacggagctgcttttgttttataattcttttttccccccttttccttcttcttttttattattttattattttttttgtactttgctttaaacggaaagcacttaaatagatgactatgtgtaaaagctctgtgcaattgaaatcatttttcttcattttaaaaaaataacgtattgcacaccaaatgaactcaaagtaagctttagaccaggacgattcaggttatgaatgagtttgttcactgtagttccgtttgttcatgaaccgaagggaaaacaggcctccccgactccctccagtctcccagcctgcctcttggtgaccactgtgctgggcgtgcagggcccgcgggctctggccggagccgctggcctgacgaggcaggatagggagtatccgtgattcagaagctgagacccttccccagtgtctgaggccacagccatcccttccagcacttaatcttgtcttgttgaaatggactgactgctactgacctgccggcgtgcgtgagggtgattataaaaggatgtttccttgagaaaaaaaaaattatttctatcctcttctatttattattaggttaatcatttaagtacttatcaggagtgtattgttattttgtgttttgttgtcataaatgctttttgctgtcactctagtggttactatcctctgccttcctctcctcccctactcccccagagaaccaaggcgtctgggggattgactggggggcagagggggtttccccagcaaaatcaaacacctgtctccagagtagccactcaaaaactggtggtctctatgtgtctaactttttaaatgagagtgtttatgaacaaaaaaatttaccaacgtgtgagggagttgctgagttgaagaatgctcgctcgaggagcttcagaggaatcttagcaaagccaagttcagttccccaaagcctcctagagcctctggtaagacttctgggttcatgaagtttcggcgagccgtggtcagagagggcgcggtggcctggccaagactttacctccaagcgagagagtgatttcttccaaggcccgcacgggttgatacgttttggttggttttttgttgttgtttttcttgcgtacaaagttggtcaaaaccatctttcaaagcaacagtgttttgtagtaccaggctgtggcttgagggctcacctaggagatcataggcagagggcccctttcccctataggtggttcaacgtggaggaaggttgggtgtggagattgcttgctgtggccccaagctcagccagcaggacacccagttgttgccaatcaggtgtgaaggtgaggcgccctgccttgatcccatgggcccagcagaaggaaacttaccccaggccaaggcaagggccctgctcaccccaaggtaggctgggaagagcatctctttccatatcatcacctccccttctccaagattgccgggggccctgattttgttctctctttgaaagaaaccctccaccgaaacaatggtccccatctccccagaagcctttttttttttcatttttctctaattagtctatgcatttctctctctcaaaccatcttctgcctcttcccttgagaaaacgggcatctcacgtacccccatctgagacctcttggaaaaaaaaaatcccgtgtattctggagatgtgagaattcacccaaaattcttaaaacattggagaatagcttgttataaaataaaagtgggggtaaaaagaaggtggttttccccacatccctttgcattgaataagagacctagttctttgcgtttgtgcaataactctttgctgcttgccttgagagcgggtagcaccacgctcctgtccagactactaacagcacaagacgcactcacagggtggcggaatcttccggaaaactctctataagctcagctccccccaccccacccccactctagcgttttgtcacgtcttacattttagcagtattttatattttctgtaacgcaccaagtcttagatctttctagagcttgtttgttcatcctcacaatcacagatttttttctccaatcctcacagagacccaattgaccnaaaaagcaaaaagganaaannaaaagtcgtcttttntnttttttttttgtacaaatcgctttgagatgcctctggtgtgttgctgtgtgacatctctctggtaacattttatttcttgctatttgtttttctacattaagagtcaaagttgacctggctggcgtgggggtgggggaggcacccgtcggccccttggtgttgtccctctgtctttggttagccatacgatgtttgttctcagcactgtacaacggtccctatataatacggagaagcaatatcactgtatgagactcacaccatgtattattattcactagcaccctaggtgtgataattgaagtaaatatcttttatacaaacacaaa

SEQ ID NO: 4698 - protein, 22 aa, Homo sapien
EGVIILKVCSGCSTSVCLLINL

SEQ ID NO: 4699 - DNA, 1666 bp, Homo sapien
tacaaaaaaaaacttataaaatgtttaaaaaaatgttcaaagcttgggagaaaagctttcttcattagtcaaggtgttttgatatggtattaaaatgtctaataaaagatggcactgcgtgattttattttaatgaagtgttatacaatcaagaaatgggggcaagggcctgccccccactccctcacctacctccttagcattccttcaggctgctactcggggctccaggtgtgtgaattggtcctcagatagtcaggcctgggtggagggagtggcaagtcaggcgtgcctcctacaagcttcctaacctcttaagcatcatggaaccagtcagccctctgtggagtcattgtgctggacctctgaaaagatctgcaggggccaagatgttgcagccaccggaggctgcaaggatgtgggttcttccaggtgtgggcccagcccccctccttccagcctttgctccccatcccacgttccactcgccctgcctgttgttcagtttgcgtctcagtgctgactcacgggcatgcttcattgaggcccaggaagaggccctggtttggggctgtgccagctcagagcccttgaaccagaaccaactgctcaggctcacaaaagttggcaaaatgcgggctgggcaggcagctcggggcagggagcagcagtgcaggcctggcctgtgtccccgtgcccagcgggctcccggagcagcattccagagcctcctgcagagccagcgaaggaaagctctagagggagacgactccaccgcctctctgctctgacccttctcaggcccgcctgatgtgctggaccatccccctgctgccacggcccctggctccgcagtcaccctccatcagatgcttccagaagcacctactctgtgcaagggcattcacaacaggccagtgggcaaacgtgagccagggccagcggagaaacactaaagaagactcggtggttcagagcctgggtctcagcgcgggacccgtctggggtgaagaccttggggctgttgtgagtcggtggcaggaacgtgggctctagactgtgcattcaggctctcctacttggcagaatgatcttggggaaacgacttcatctgaacttcagatatttcacatgtgaagcggggacaaaaccatgcagctcagaggtccctgtgggggctgggggagctgccctgcaggtcttggcacatgcacagcaggctccccatagctttgtcaccacaaagggcactgttctattcacagcacctcctgcttctgcctttctgggatgggagagaaggtgagggagccggcgagcaggttctaccctctctgctaagggcctagcacactttgatgaggttcctggacgtgagaccctcacaaagaccaaccattcctctaatagccatttaacggtactgcagttcatgggaaaatgtcctcattcttaggagatagatgctggattatataggtgaatgccttcaagaaatgtgtaatttaattccaaatagttccccccaaaatacacaaagcaaataaggccaaaatgttcattgttgaatctgcagtggctggtatttcagtgaacagtgtacttgttctttcaacttttctgtatgtttggaatttttcttaataaaagattgtgggaaatggtc

SEQ ID NO: 4700 - protein, 155 aa, Homo sapien
MEPVSPLWSHCAGPLKRSAGAKMLQPPEAARMWVLPGVGPAPLLPAFAPHPTFHSPCLLFSLRLSADSRACFIEAQEEALVWGCASSEPLNQNQLLRLTKVGKMRAGQAARGREQQCRPGLCPRAQRAPGAAFQSLLQSQRRKALEGDDSTASLL

SEQ ID NO: 4701 - DNA, 4310 bp, Homo sapien; identical to SEQ ID NO: 4269
  Unsure 2600: Unknown base

SEQ ID NO: 4702 - protein, 227 aa, Homo sapien; identical to SEQ ID NO: 4270

SEQ ID NO: 4703 - DNA, 1348 bp, Homo sapien
aacctacctcagtttcagagaatgaaggcatttcaaccataccaagccctgtgacctcaccagttttgtcccgccgacactatggagaatctataacaaatataggcaaagcaagcatattaggggctgctagcattggaaagggacttggaggaatgttgttctcaagatttggacgttcatctacaacacagtcatctgaaacatcaaaagactcaatggaagatgagaagaagccagttgcctcaccttctgctaccaccgtagggacacagacccttccacatagcagttctggcttcctcgattctgcatatttcagacttcaagaatcgttctttaatctcccacaacttctttttccggaaaatgtaatgcagaataaagataatgccctcgtggagttggatcacaggattgattttgaactcagagaaggccttgtggagagccgctattggtcagctgtcacgtcgcatactgcctattggtcatccttggatgttgccctttttcttttaaccttcatgtataaacatgagcacgatgatgatgcaaaacccaatttagatccaatctgaactcttgaaggacatgaatggcctaaaactgattttttttttttccgttaaaatgtgtgtgtcaagatacggagatttcagggttaaagtatatttcagttttctttagggcaacatatatttgaatttaaaagcactttatttaaaaaaaaaagaagttttcagttctgaagaagtcatttacagtttgcatcattttaattatgagtctgacaaaaccttctccagagaatcaagcaagacctggatgtgaagaaggtttgggtaaactgcatgtaaaggctacaaatcacaatctgattcctcccaaatataaaggcatatggaacataatgtattaaccaaagtatgttataaatcaaaaatggtcaaggttcagcatattctatatgaagatcacaaggtggtatcgttttagatttctatgaaggctttcatttgtacatccctttgaaaaaatataacagatttaaaatgttttgaatttaacttgtttagaaaaactaatgcttaaaacaatatttgaactactgtatttataatttattacctctaattgctttatttcagtgtatgagacattactgttttaatgtttgctttgaacataatttaagaaccagatttattttctatagtgataaacccttttttctcagaactccatctttgtactcttcagatgaatatatagacactgtggcatacattttttttcattaaaaacttatggcttcaaaaaaaaaaaaaaaaaaaaaaaaaaaaaa

SEQ ID NO: 4704 - DNA, 5806 bp, Homo sapien
  Unsure 2900-2977: Unknown base
gggggtagctggcggaccagagccggtagcgaggttgggagagacggagcggacctcagcgctgaagcagaagtccccggagctgcggtctccccgccgcggctgagccatgcggctccctgacctgagaccctggacctccctgctgctggtggacgcggctttactgtggctgcttcagggccctctggggactttgcttcctcaagggctgccaggactatggctggaggggaccctgcggctgggagggctgtgggggctgctaaagctaagagggctgctgggatttgtggggacactgctgctcccgctctgtctggccacccccctgactgtctccctgagagccctggtcgcgggggcctcacgtgctcccccagccagagtcgcttcagccccttggagctggctgctggtggggtacggggctgcggggctcagctggtcactgtgggctgttctgagccctcctggagcccaggagaaggagcaggaccaggtgaacaacaaagtcttgatgtggaggctgctgaagctctccaggccggacctgcctctcctcgttgccgccttcttcttccttgtccttgctgttttgggtgagacattaatccctcactattctggtcgtgtgattgacatcctgggaggtgattttgacccccatgcctttgccagtgccatcttcttcatgtgcctcttctcctttggcagctcactgtctgcaggctgccgaggaggctgcttcacctacaccatgtctcgaatcaacttgcggatccgggagcagcttttctcctccctgctgcgccaggacctcggtttcttccaggagactaagacaggggagctgaactcacggctgagctcggataccaccctgatgagtaactggcttcctttaaatgccaatgtgctcttgcgaagcctggtgaaagtggtggggctgtatggcttcatgctcagcatatcgcctcgactcaccctcctttctctgctgcacatgcccttcacaatagcagcggagaaggtgtacaacacccgccatcaggaagtgcttcgggagatccaggatgcagtggccagggcggggcaggtggtgcgggaagccgttggagggctgcagaccgttcgcagttttggggccgaggagcatgaagtctgtcgctataaagaggcccttgaacaatgtcggcagctgtattggcggagagacctggaacgcgccttgtacctgctcgtaaggagggtgctgcacttgggggtgcagatgctgatgctgagctgtgggctgcagcagatgcaggatggggagctcacccagggcagcctgctttcctttatgatctaccaggagagcgtggggagctatgtgcagaccctggtatacatatatggggatatgctcagcaacgtgggagctgcagagaaggttttctcctacatggaccgacagccaaatctgccttcacctggcacgcttgcccccaccactctgcagggggttgtgaaattccaagacgtctcctttgcatatcccaatcgccctgacaggcctgtgctcaaggggctgacgtttaccctacgtcctggtgaggtgacggcgctggtgggacccaatgggtctgggaagagcacagtggctgccctgctgcagaatctgtaccagcccacagggggacaggtgctgctggatgaaaagcccatctcacagtatgaacactgctacctgcacagccaggtggtttcagttgggcaggagcctgtgctgttctccggttctgtgaggaacaacattgcttatgggctgcagagctgcgaagatgataaggtgatggcggctgcccaggctgcccacgcagatgacttcatccaggaaatggagcatggaatatacacagatgtaggggagaagggaagccagctggctgcgggacagaaacaacgtctggccattgcccgggcccttgtacgagacccgcgggtcctcatcctggatgaggctactagtgccctagatgtgcagtgcgagcaggccctgcaggactggaattcccgtggggatcgcacagtgctggtgattgctcacaggctgcagacagttcagcgcgcccaccagatcctggtgctccaggagggcaagctgcagaagcttgcccagctctaggagggacaggacctctattcccgcctggtgcagcagcggctgatggactgaggccccagggatactgggccctcttctcaggggcgtctccaggacccagagctgttcctgctttgagtttccctagagctgtgcggccagatagctgttcctgagttgcaggcacgatggagatttggacactgtgtgcttttggtggggtagagaggtggggtggggtggggtgggggctgtctgtgtccaggaaacttaattccctggtgactagagctttgcctggtgatgaggagtattttgtggcataatacatatattttaaaatattttccttcttacatgaactgtatacattcatatagaaaatttagacaatataaaaaagtacaaagaagaaaagtaaaagtacccattgtttcacttcctggagataaccatagttgctattttgctgcctgtcccatcagtcgtttatctgttgtttgagatagaaattaaccaaaaatgacataaatattcatgagattgccttcctatatccttccttgttcctaccagtgtctgctattttgaagaagctagggtctggagggacagagaacagttccctgattaacagtattaatagcgacattggtaacagctaccatttatagagttttaatgggagtaggagctatgctaagtgtttttcatgtattatcgtttttaatcattatccccaacctatgannnnnnnnnnnnnnnnnnnnnnnnnnnnnnnnnnnnnnnnnnnnnnnnnnnnnnnnnnnnnnnnnnnnnnnnnnnnnnggtggagttggagtttgaacacaggcctgaccctagagtccacaccctgacccaatcaattatattgcatcttgggtccataaaccctaatccataatcccatcaagaaaagctctgctgctcttagctctaaataattcagaatctattctcttctctccagtcccgttgttatagtcttcactcatagacttaagatgatcccatcaccagagaggtttctctaccattagcttccctcttccggccattcttcacaaagtcatttttctaaattctgtgtcacatacgatgatggcatttctggaaattccttcaggtgctctcaagccctgctgcagagatccttttcagagcacacactgttccagcccatctgtctcaccctctcctgttgtatccagctccacgacaaacttctgccttccccaacacctttgtgcctttgcatatggtgttttcttgcccattttctgctcgactcgcccctgattttcaagttcaagacttaactcagggttcaggtcttccaggaggccttacttatgtcgtcagtctggggaactctccatgtgcttctatcactgtgcggttacctctttcacagcccttttaaagttctatcttccctttcccaccttttttgaccttccactagaccatgagcacctgggcggaaagccatatatcttattaagctttatatctgctacctggccgagggcctaattcatagtggagaataaatagtcaattgaataaatgaataaatatctccaccatcgtactaatcttaatcctccctgcccactcccaccactgaaaatgcaacattgtacacatcactggttgttgggagggacttaccttggaaagttgctattctaggaaagagaaaccttcatattcctggaaacagcaggtagtttccagtgctggcaatgaattccccagaactgctgttttggattttttcttgcctggcagctgttgggagcagggtgcagtgaggatggggtgagagtgggcagtttcttgtgcagatttgcctttctttcatcctggggctgacttgcagctccacacccatccatctctcaaatttcacagagggtaaaataggcatttggagagaaagaactctggcctgattcctttctctcccacaaatgtcctttattcataaaacaggaataataattcctgtatctcccaactacatggaagctgcagccctcacagaagaagatgatctgagaaattctttgatttcctcagtacagttatacccatgcatcataatactttaagcctggaaggcatcttaaaaataatgcaacagtcaaacctaattttacagagaaactgacatgaaatcacgcagctaatcatgataaagctgggtggaaaacttatcttgatgggcagtacaggaagatgcagtagaccttaagatgtcctgaaagtttcttatctcaggggaaactcccaggtaggctttatgtcagggacacagaaaaatgctccctgaaagtcaaaatattcgggctagacagacaaattcctgtaagtgtggtttgtctgggaaccacagatgtcactaatcctggtttgctccagagttctttttgttcactcctaccccccatcaccatttgattgatctccttaccctgtaatttccccttcttgtcgcttacctgcagtatctttcccacccaggcatgccttattctttctaaaggaaagtatgaatggagaggggaaagcttgggaaactgatagatttccttggatgccaaaacacctccatagcctgtctgcccggccctatgtggaaacagcattgagtttcaagtcctttatgcctccacccagggatagccacttggaatccacatggcaattgtgaaacaagcaggaaatgcgtaattgtcagaattttgtggggaaaggactagggaataaggaaaacaaagatcttccttgtgttttagagctgtcagctagaggagcacctgcttgagtctgatgccatctaatggtcccagaagaaactgggttttgaacctagagttccatggactcttaggaattagactactactactactaagcattcactggtgcttactatgtgctattgctgtgccaagtatctgaaacctgtcttcttaccttatttttcaagataattctatgtggcaggtattactatctcaattctaagagtgagaaaatggagttttagaaacatttactaacttgcctgggtcacatagctaaggaagaggtggacttgcccagctttgcataaaactcctcaaaagagttgcctatactccctgactccacttatcttcctactatcctctttttaaaatatattatttatttatttaaataagcaatatatgaatgtggtttgaaattcaaaagacacaaagaagtatacagaggaaagcctcactctcaatccttctcaaggtttgctaattcctcttgcataggcaatccgttcttccagctttgtgtttatctttccagagaagtttactgtgtattaagcaaatatgtatatctttattcttgctcagtattttcgcaaacagcagctgtctaagttcactgttctgaactttattttttaaattaaaaatatatggctatgtagtattctattttatggaagttccatatttcatttatcctgtttccttctactgatggctagttaggttattggaagtcttttgctgttgctagttagtcttgtatagacattgtaatgcacatgtgcaaaaatacaagtatgatacaatcttaaaa

SEQ ID NO: 4705 - protein, 686 aa, Homo sapien
MRLPDLRPWTSLLLVDAALLWLLQGPLGTLLPQGLPGLWLEGTLRLGGLWGLLKLRGLLGFVGTLLLPLCLATPLTVSLRALVAGASRAPPARVASAPWSWLLVGYGAAGLSWSLWAVLSPPGAQEKEQDQVNNKVLMWRLLKLSRPDLPLLVAAFFFLVLAVLGETLIPHYSGRVIDILGGDFDPHAFASAIFFMCLFSFGSSLSAGCRGGCFTYTMSRINLRIREQLFSSLLRQDLGFFQETKTGELNSRLSSDTTLMSNWLPLNANVLLRSLVKVVGLYGFMLSISPRLTLLSLLHMPFTIAAEKVYNTRHQEVLREIQDAVARAGQVVREAVGGLQTVRSFGAEEHEVCRYKEALEQCRQLYWRRDLERALYLLVRRVLHLGVQMLMLSCGLQQMQDGELTQGSLLSFMIYQESVGSYVQTLVYIYGDMLSNVGAAEKVFSYMDRQPNLPSPGTLAPTTLQGVVKFQDVSFAYPNRPDRPVLKGLTFTLRPGEVTALVGPNGSGKSTVAALLQNLYQPTGGQVLLDEKPISQYEHCYLHSQVVSVGQEPVLFSGSVRNNIAYGLQSCEDDKVMAAAQAAHADDFIQEMEHGIYTDVGEKGSQLAAGQKQRLAIARALVRDPRVLILDEATSALDVQCEQALQDWNSRGDRTVLVIAHRLQTVQRAHQILVLQEGKLQKLAQL

SEQ ID NO: 4706 - DNA, 4412 bp, Homo sapien
ctggcttcaaagctcagcgaccacactgctaattaagaatgcttatgaagaatgtttaatgatatgaggaagacttacaaactgtttttacaaagttatcaatgtgtggattttatttacatgaaagaaaaaatagtcacaaatgttacctttcaatggtagtataatagaatattaaaatttacttttatttcattctaaattttctacattctgcatgtattctctttataatcattttgtaaactcagaatactgttgtaaagatgtcagctccttcccgaggaaataccactagttagacttaatacacacatttttttatgttgaattgaaattttacttggtaatgaatcattccctttaatctactcttctagattactgatctctcattacccaactatctgatggcatcttcggttggactgcttcctacccagcttctgaattcttacttgggtaccaccctgcggacaatggaagatgtcattgcagaacagagtgttagtggatattttgttttttgtttacagattattataagtataggcctcatgttttatgtagttcatcgagctcaagtggaattgaatgcagctattgtagcttgtgaaatggaactgaaatcttctctggttaaaggcaatcaaccaaataccagtggctcttcattctacaacaagaggaccctaacattttctggaggtggaatcaatgttgtatgattctaatgagatacgtgattgtcaagagcctagtgtgctatctaaggtctagcagtcacttcactagtgggcagagacaagttctaattgtattacagcacaaacaaaactgactagtttttaaattgcaccattgtttttttttttaaagcaagaatcattttctgggtatgtaagtgtaaatgtagatgcaaatttggctgcacctctttatcatgcctgtattggcctataggtctgcactttagtgttttttaattgttttatttctgtgtatttacgaacagagaaataacccaaatattatttctgcttagtgtctttatttataaagcccatgagtagtttgtatgcatctttcctacttgtaaagatgagtaaaagtatgcagttttaaatttataatattattggatgttctttgctttggtagtctttccagaaaggataaacagtggtttttgttttgttttgttttattgtttaagtgggaccacttagcttcccgtttccttactagttaaagaacagacattaattttcagttgaatgtatttttgcaggcatcatattgttacagggccatttacacctattcacaaagcttaaatcctaccttgtgggactgaagtgctcttaatataactgtttattttcactgtgtaatatgcaaagcaaaagggaaattatttggtggatggtagctcaaaattggaactcttgttctaattcagttacattggctttaccctccttagatttttcatcaaagggctgtcccattgcaatcttactaaaacattttgttaaaataaactcttttcctttttatattaataattaggcttttaaataaagatgttattcctttaaaatggtgggcttaccatcattgaagatgtcactcaggtggccttgtttgatcaaaacgccttttttaaaaaccaagctttaaaaacatgtttataatttcatgaagtacatatatattgttcccatagtcttcagctttaaaactataaatatgcccaaattttgttatttgccctactttaagtaggtttattgtgtttgttttttcagtacttgtttttctctgataagactcaggaattctgaaatgtgaaattgtctcaattctttctcttgtagcatgaatcaaatgtatttattaatagcacttatgactatagaatataatttggcatatgattcatattacatatgtattcattttatttttaaaatagtttataaacttaatgatttttttttacaaatgaggttatagatattaatgcaaattttctggtaggtatctctttttttgctatgatgattccaacttatcagagacctcccatttgccttttcattacggtgaaagctttgccctcatctactaaagtacaaaggaattctttggaagcagattattctagtcttatgctagagatgaatttgatcattttaatgtgtgatctttttgctctatcaggtataattgttttcctttcctttataatgggtaagttttctcacctttgagtaacagtaaagttcatttatatgtccatacctagaagaccagtgcaaatactttgagagcacctgggtctacaggacataattggcatctaaatcctcatttcttgctattagtaggaaaacagatatagtattgtaatacccttattctttttgaatcctaattactcatttcggttttttttctctcttttgaatctagttgctggttttcgtttaatgattttagtttaacaatcccaaccaacaatacatttgatttatttttttctgtctaacctgacaacctttttcttgtgcttcttgtttgttggttagtttttgtgaaaggaatcattgtttaagatcactgttttcatacttgttttacacttcacgtattttgaagtacatttatttactaagcatttgtgacttgaataatttcaccaaatgaatacattttggtagtttgtaatgagttcttctaattgttacactttgcttggtacttaacaataaatatgtaaaggtaaaagaaataattttctgtattctgccaatcttaattttatataataaatcatccatttttttcttaaaatagtatggattgactgtttctaaaataccaatctgtggctgtggtttttcttttcttcagcatttccagcatccaagtaaacaatagtcccttatagtcctgctacttgatgggtaaatttggttgctgggtttttaagttgcactcacaataaatcgtgcaaagcattgtcatgccttatttactccatttttaatcctgcatcccagatttatggcagcaacacatatctacaggatacttttatgttgtccaaatattgctgtcagtcatatgtacttataaaatgtctccagtcatgtatatttatagaaatgaaatgtcaaatttctcagactgttaaagtgcagtataaagttgcttaatgcacacttaaaaatgatatataatttctgaatcctatgaaatatgtgttcttttttaattctttgggagttttcttaagttttacatgttttttggtttattgttaatgattttgtttactctttgccaaattttgtcatgtaggttattttacaatagcacctttaaaaaaaatgtatatgctaatttactaagcatattcatgtccatttttatttgatcatctgatttgtgaaataacttgaaatttgtactgtttggtttgtgaaaataatattaccaaatctctgtcattagaatgtgtactttatgttcagaagtgactgtgggtttattcagagccagccattctctcccttgatgcactttgtaaccagctacacatgcttttaggtggcttttccctgatagggtcaagtatatgactataaaacatttttcttgtgaagctattaagttcattagttactcttatttccccttgttgtaactaagtggtgcaggtataagcatatccccagcattcctgtgtgtgtgaatgtgcactgctgatttggactgttcttgagaaaggtgctgtgacatatgtcaatatttgttagctctggggatatctttagaatgcttgagaaagttgctaggtgtgtgccacattggtgcaggtaaatccatgctgttcacagccaagcagcatttgcagagaaaaggagagttttacatagaccccaggaaaaacagtactaacctggttgatggccttggtggtggaattttgtttcagccagaggctactcattatatcagaatgatgttcagtataacactatctgatttttagattggtcgatttctgttgtaatcaagtatttaggatgtaatctttttaaagtcattgctttaatctgaaaagccattagaagggagaggaatcactgttccacaggatatttaaaactcaggagttcaaataacctcacatattgaacataaactgttaacttattccacaactaaattctaacctgatacttatgaattgcaaagtgattgctgcaaactttttctaaggtggctgaagatttaaaatagatcattctaaagggaaatcagtaaaatgtcttgataattggtatccaaatcacttgtgtgcctgagaaaataaaaggtaatattttactttcaaaaaa

SEQ ID NO: 4707 - protein, 105 aa, Homo sapien [sequence omitted]

SEQ ID NO: 4708 - DNA, 4703 bp, Homo sapien
gaattaggggaactcagaaatccatcccccaccccacggccctacctagaagacttaggaatgtgggtccccagcgccgccatctgagactccagagtcgaggctcctagcatcccctacgtagaacactgagaaattccgactgcgggaccccagtctccgagagaccccagattctattcctggagcctgagagcccgaagttcacgcccctgagtctgggctccgcacctccctggggaccgcgtcggggtcgcgcaggagccgggctgcctcgagccggggctggaggctccccgggaggactctgctgggccgctcagccatgcctgagggagcccaaggactgagcctctccaaacctagcccaagcctcgggtgtggccgaagaggtgaagtgtgtgactgtggcaccgtgtgtgagactcggacagctcctgcagcccccaccatggcctccccccgaggttctgggagctccacatccctgagcacagtgggctctgagggggatccagcccctgggcccactccagcctgctcagcctccaggccagagccccttccagggcctcccatccgcctacatctctctccggtggggatcccaggttcagccagaccctcaaggctggagcgtgtggcccgggagatcgtggagacagaacgggcctatgtcagggacctccgcagcatcgtggaggactacctgggccctctgctggacggcggggtcctggggctgagcgtggagcaggtgggcacgctgtttgccaacattgaggacatctacgagttcagcagcgagctcctggaggacttggagaacagcagcagcgccgggggtattgccgagtgcttcgtgcagaggagcgaggattttgacatctacacattgtactgcatgaactacccgagctccctggccctgctccgggagctgtcgttgtctccgccagcagccctgtggctgcaggagcgccaggcccagcttcgccactcgctgcccctgcagagcttcctgctgaaacctgtccagcgcattctcaagtaccatctgctgctgcaggaactagggaagcactgggcggagggcccaggcactgggggtcgcgagatggtggaggaagctattgtgtccatgacagcggttgcctggtacatcaacgacatgaagcgcaagcaggagcatgcagcgcgcctccaggaagtgcagcggcggctgggtggctggaccggaccagagctcagtgcttttggggaactggtgttggagggcgcgttccgaggaggcggagggggtggcccccggctacgagggggtgagcggctgctcttcctgttctctcggatgctgctggtggccaagcgcagggggctggagtacacctacaaaggccacatcttctgctgcaacctgagcgtgagcgagagtccccgagaccctctagggttcaaggtgtctgatctgaccattcccaagcacagacacctgctccaggccaagaaccaagaagagaagaggctgtggattcactgtctccagcgcctcttctttgagaaccaccctgcctccatccctgccaaggcaaagcaagttctccttgaaaacagcctgcattgtgcccccaaaagtaagcctgtcctagagcccctgacacccccacttgggtctcctcgacctcgagatgctagaagttttacccctgggcgaaggaacacagctccatctcctgggccctctgtgattcgccgaggccgcaggcagtctgagccggtgaaggacccttatgtcatgttcccacagaacgctaagcctggattcaagcacgctggcagcgaaggggaactctaccctccagaatctcagccaccagtttcaggctctgcaccccctgaggacctggaggatgctggacccccaacactggacccctctgggacctcaatcactgaagaaatcctggaactgctgaatcagcgaggccttcgagatccagggccgtccacccatgacattcccaagttccccggagactcccaggtgcctggcgacagcgaaaccctcacattccaagccctgcccagccgggactcttcagaagaggaggaggaggaagaggaagggctggagatggatgaacgggggccttccccactccacgtcctggaagggctcgaaagttccattgcagctgaaatgcccagcattccctgccttaccaaaattcctgacgtgcccaaccttcctgaaattcccagccgctgtgaaattcccgaaggttctcgccttcctagtctctctgacatttccgatgtttttgagatgccctgccttccagccatacctagtgtccccaacacccccagtctgtctagcactcccaccctctcctgtgactcctggctccaagggcctctgcaggaaccagctgaggctccagccaccaggagagaactgttttctgggagcaatcctgggaaactgggagagccgccttcaggaggcaaggcagggccagaggaggatgaagaaggggtatcattcacagacttccagccccaggatgtcacccaacatcagggattcccagatgagctggcattccgctcttgctcagaaatccggagcgcctggcaggcattggaacagggacagctggcccggccaggcttcccagagccactgctgatcctggaggattcggatctgggtggagacagcgggagcgggaaggcaggagccccgagttcagaaaggacggcgtcccgagtgcgagagctggcccggctttacagcgagcggatccagcagatgcagcgggcggagactcgggcatcagccaatgccccgcgccgccggcctcgggttctggcccaaccccagccatccccctgtctgccccaggagcaggcagagccagggctcctgcctgcctttggacacgtgctggtatgtgagctggccttcccactgacatgtgcccaggagtctgtccccctgggtcctgctgtctgggttcaagctgccatacctttgtcaaagcagggaggcagcccggatggccagggtctacatgtttccaatttgcctaagcaagaccttccgggcatccacgtttcagctgctacccttttgcctgagcaaggaggttcccggcatgtccaggctccagccgccacacctttgcccaagcaagaaggccccctgcacctccaggtgccggctcttacaactttctctgatcaaggccacccagaaatccaagttccagccaccactcctttgcctgagcataaaagtcacatggttataccagctccatccaccgccttttgtcctgagcagggacactgtgcggacatccacgttcccaccactccagctttgcccaaggagatttgttctgatttcacagtttcagtcaccacccctgtgcccaagcaagaaggtcacctagacagcgagagcccaaccaatatcccactgacaaagcaaggaggttccagggatgttcagggcccagaccctgtctgcagtcaacccatccagcctttgtcttggcatggaagcagcctggatccccagggcccaggcgacaccctaccacccttgccatgtcacctcccagaccttcagattccaggtacctcacctttgcctgcacatggaagccacctggaccatcggatcccagccaacgccccactgtctttgtcccaggagctcccagacactcaggttccagctaccacacctttgcccctgccacaagtcctcacagacatctgggtccaagccctcccaacttcacccaagcagggaagcctcccagacatccagggtccagcggctgcacctccacttccggagccaagccttacagatacacaggtccaaaaactcacaccttcgttggagcagaagagcctcatagatgcccatgttccagctgccacacctttacctgagagaggaggctctctagacattcagggcctctcacccaccccagttcagaccaccatggttttgtccaaaccaggaggctccttagcctctcacgttgccaggttggagtcttcagacttgacgccacctcatagtcccccaccttccagccgtcagctcctgggccccaatgcagctgccctctccagatacctggcagcctcatatatcagccaaagcctggctcggcggcaggggcctgggggaggggcccccgcagcctcccggggctcctggtcctctgctcccacgtcacgggcatcttcgccgcccccccagccccagccaccacctcccgcagccaggcggctcagctatgccacgacggttaacatccacgtgggcgggggtgggcggctgcggccagccaaggcccaggtccggttgaaccaccctgctctcttggcctccacacaggaatctatgggccttcacagggcccagggggctcctgatgcccccttccacatgtgagccaggacatgaggcttccctgaagcaaggatttcagccagatgccatagaccctcagaacttgacctggaagtccagacactgaacgcaggcctcaaaactgctgcggccttccaactcctggtatctgcatcggcgaatggcccttcttgccttgatccacagggatggggaagggaatgtcattaatgttttgttaatactgattctttcatgc

SEQ ID NO: 4709 - protein, 1430 aa, Homo sapien
EPEVHAPESGLRTSLGTASGSRRSRAASSRGWRLPGRTLLGRSAMPEGAQGLSLSKPSPSLGCGRRGEVCDCGTVCETRTAPAAPTMASPRGSGSSTSLSTVGSEGDPAPGPTPACSASRPEPLPGPPIRLHLSPVGIPGSARPSRLERVAREIVETERAYVRDLRSIVEDYLGPLLDGGVLGLSVEQVGTLFANIEDIYEFSSELLEDLENSSSAGGIAECFVQRSEDFDIYTLYCMNYPSSLALLRELSLSPPAALWLQERQAQLRHSLPLQSFLLKPVQRILKYHLLLQELGKHWAEGPGTGGREMVEEAIVSMTAVAWYINDMKRKQEHAARLQEVQRRLGGWTGPELSAFGELVLEGAFRGGGGGGPRLRGGERLLFLFSRMLLVAKRRGLEYTYKGHIFCCNLSVSESPRDPLGFKVSDLTIPKHRHLLQAKNQEEKRLWIHCLQRLFFENHPASIPAKAKQVLLENSLHCAPKSKPVLEPLTPPLGSPRPRDARSFTPGRRNTAPSPGPSVIRRGRRQSEPVKDPYVMFPQNAKPGFKHAGSEGELYPPESQPPVSGSAPPEDLEDAGPPTLDPSGTSITEEILELLNQRGLRDPGPSTHDIPKFPGDSQVPGDSETLTFQALPSRDSSEEEEEEEEGLEMDERGPSPLHVLEGLESSIAAEMPSIPCLTKIPDVPNLPEIPSRCEIPEGSRLPSLSDISDVFEMPCLPAIPSVPNTPSLSSTPTLSCDSWLQGPLQEPAEAPATRRELFSGSNPGKLGEPPSGGKAGPEEDEEGVSFTDFQPQDVTQHQGFPDELAFRSCSEIRSAWQALEQGQLARPGFPEPLLILEDSDLGGDSGSGKAGAPSSERTASRVRELARLYSERIQQMQRAETRASANAPRRRPRVLAQPQPSPCLPQEQAEPGLLPAFGHVLVCELAFPLTCAQESVPLGPAVWVQAAIPLSKQGGSPDGQGLHVSNLPKQDLPGIHVSAATLLPEQGGSRHVQAPAATPLPKQEGPLHLQVPALTTFSDQGHPEIQVPATTPLPEHKSHMVIPAPSTAFCPEQGHCADIHVPTTPALPKEICSDFTVSVTTPVPKQEGHLDSESPTNIPLTKQGGSRDVQGPDPVCSQPIQPLSWHGSSLDPQGPGDTLPPLPCHLPDLQIPGTSPLPAHGSHLDHRIPANAPLSLSQELPDTQVPATTPLPLPQVLTDIWVQALPTSPKQGSLPDIQGPAAAPPLPEPSLTDTQVQKLTPSLEQKSLIDAHVPAATPLPERGGSLDIQGLSPTPVQTTMVLSKPGGSLASHVARLESSDLTPPHSPPPSSRQLLGPNAAALSRYLAASYISQSLARRQGPGGGAPAASRGSWSSAPTSRASSPPPQPQPPPPAARRLSYATTVNIHVGGGGRLRPAKAQVRLNHPALLASTQESMGLHRAQGAPDAPFHM

SEQ ID NO: 4710 - DNA, 2779 bp, Homo sapien
aaaactatttgagacataaacagttgtgtgatgtaattttagtcgctggtgatcgcagaattccagctcacagattggtgctctcctctgtctcagactattttgctgccatgtttactaatgatgtcagagaggcaagacaagaagaaataaaaatggaaggtgtagaaccaaattcgttgtggtccttgatccagtatgcttatacaggccgccttgaattaaaagaagataatattgagtgcctgttatctacagcttgccttcttcagctttcacaggttgtagaagcatgctgtaagtttttaatgaaacagcttcatccatccaactgtcttggaattcgttcttttgctgatgcccaaggttgtacagatttgcataaagtggctcacaattatactatggagcatttcatggaagtaatcagaaaccaggaatttgtattattaccagccagcgaaattgcaaagctcttggctagtgatgacatgaacattcctaatgaggagacaatattgaatgcacttcttacttgggtccgtcatgatttggaacagagacggaaagatctaagtaaacttttggcttatattaggctacctcttcttgcaccacagttcctggcagacatggaaaataatgtactttttcgggatgatatagaatgtcagaaactcattatggaagcaatgaagtaccatttattaccagagagacgacccatgttacaaagtcctcggacaaaacctaggaagtcaactgttggtacattatttgcagttgggggaatggattcaacaaaaggagcaacaagcattgaaaagtatgatctccgtacaaatatgtggactccagtagcaaatatgaatgggaggaggctacagttcggtgttgcagtgctagatgacaaactgtatgtggttggaggaagagatggactgaagactttgaatactgtagagtgctacaaccccaaaacaaaaacttggagtgtgatgccacctatgtccacacatagacatggccttggtgtggctgtactggaaggtcccatgtatgccgtaggaggacatgatggctggagctatctgaacacagtggaaagatgggaccctcaggctcgccagtggaattttgttgccactatgtctacccctaggagtacagtaggtgtggcagtactaagtggaaagctttatgcagttggtggtcgtgatggaagttcttgtctcaaatcagtagaatgttttgatcctcatactaataagtggacactgtgtgcacagatgtcaaaaaggagaggtggcgtaggagtgacgacctggaatggactgctgtatgctataggggggcacgatgctcccgcatccaacttgacttccagactctcagactgtgtggaaagatatgatcccaaaacagacatgtggactgcagtagcatccatgggcatcagcagagatgcagtgggggtctgtttacttggtgataagttatatgctgttggggggtatgatggacaggcataccttaatactgtggaggcttatgatccccagacaaatgagtggacccaggttgctccactgtgcctaggaagagctggagcttgtgttgtgactgtaaaattataatttagtgccccgttttctacatgaagacaccgtcttcctttattaatttagtataattattctatcaatggatacatttttagtaaatgtgcattgtcacaatcctgggcacaaagtgcctgatgtcaaaatgaagatagtaaaacaagggaggaagcagtggatggaccaggattaattcctttcatttcttagtaaattaaaacctgcagctggtggattgtgatcacacattcccgaagtaataagtgaggacgaatgcactgctctggaacataacccagtgctaactgggggtttcatttattcagtcaagcacatcttactcacatccagatttattttcctacagtgcaaacacaccagatgaaactttaaaatgttactttttgtaagcttatcataaatgagttgcagtaatttgtttgcttgtttgtttaaccacaaccactattttaatgatatactaaagataacactatttagttttttcagaaacatctgcattatatgtgtgttggttgtggattttgtttctaaaattggcttagtccaataaataaagaaaagcattaaggacttaaagcaacaataaccaaataaaaacttgataggatctttgaagtctatttaaatattcattccattacatctagactcaccaagaactacatgttatgatgttaagttgaagttgaaacatgatgttttgcattaaatttaagatatgcaaatttatgtagagaaaataaatgttatataccctataatctttcacctaattagtatttaattatatggatttgttttatattataaaagatgttttgattttgtcttttgatattgacaaaattgtttggatatccttatgttctcaagtctgtatctgcctcccctgccttatttcttatgttttgccacagttaacccattgtgcttctttgtaatcaaacagtttgtgggagaatgggcttattgaatgtctaaaaaataagtttaaagtgtttgttaccctaagttttttacatttttaaactctaattacatatgtgaatgttattactctcagtgaattgttattgtttgcaaaaatgcactgggcagtaacattttgtgataaatcctataagatataagtc

SEQ ID NO: 4711 - protein, 508 aa, Homo sapien [sequence omitted]

SEQ ID NO: 4712 - DNA, 1501 bp, Homo sapien
gcctggctaatacaaaaaattcttttaagagatgggatccctcccttttaaaatcagaacttgttcacatggtggttgcttgtggcaaaacggagttcaaattttgctctcctattgctataattctgctagcaatctgttgaggtgaaacttgggatctgactcttcagcaagcagcaaatgacctagtaactcagggacaactatttttgaactttaagtgccactttaatgcagttagtttgataaaaccatgtgggttttttttttagggctagctctacgggagtggaagtgagagccaggcatgagtgcgtctccacatgcttttccacctgccctgagtgtgttacatactgaaacaggcctacatagatgttacaacttcccttcctctgtcggagatgtcatctgtgcctttctcagtgttcatctgataatgtaaatttaaatgcctctacatttgatacgaaacccacattcaggtgacactgaacgaggtggcttttgtcccaccagtgcctcatcagtgtgaggcgattcctctctgctttaggaaaatgatttttccccctaaacttgtgccaaccatcaacaacatctccatagatcttatggattgtagaactgttggctgtttcctaaatttattccaagttctcgtagaggcatatagatttcagtctgtgcttgtatgggatagatgatctgagtggctttctggcctcttttttgagtttaaaatccatatgaggttgacttgtcatactaaggtaacatgtttgtgaggttattccactagtactgtgatcacgtgggtgtcagtatctttaacggccttcattcttggttgtgagattttatttgatatgcccactcaccctcgacgaatctgcccgctttgggctgtggtgcctgtgtatctttgcccgtctggtctccagttggtggaattaccttttttgtactgccacttctcagcatctttgaaatttgacataatgttgcttcatttcagtttttttagttctgtaatttgttgattgtatttaactatgtgagttctgttgtgatgtttactgtattgtaaagcacctcattcatgtgatgagtgctctataaatcaataaatgatgacttagaggctgtatcacgagctattttggttttaggatgcaggtctcaaaagcaagttgtgggactctttctgtataaacagcacatgataccaaaggaaccacagggaaaccttgtattttacagactttaaagaaggaaccagagaagttaacttgccttccaacctgataatgatgctctttagatttccagtacgtggccatgcaccgttttaactcagagtttgtgtgcactgtgatttataaccttcgagtgagcacttattagaacattattggggattttgtctttggcctaaactggctctaccataaaggtaagctgaaaggtgaggaacccagactcaaatgtgaactggaag

SEQ ID NO: 4713 - protein, 46 aa, Homo sapien [sequence omitted]

SEQ ID NO: 4714 - DNA, 1425 bp, Homo sapien
actgcgcgcgcctccaggcaccggcgttagcgggtcgccgacccgcaatccccgccgcggctgcttgcctaccggagtgtgcgccggcacctgccgccggagacatgttgcaaaaaccgaggaaccggggccgctctggcggccaggccgagagggacagagactggagccatagcggaaaccccggggcttcgcgggccggggaagacgcccgggttctcagagacggctttgccgaggaggccccgagcacgtcccgcgggccgggcggctcgcaggggtcgcagggcccctcgcctcagggcgcccgccgggcccaggccgcccccgccgtggggcccaggagccagaagcagctggagctgaaagtgtccgagctggtgcagttcttgctgattaaagaccagaagaagattccgatcaagcgggccgacatactgaagcacgtcatcggggactacaaggacatcttccccgacctcttcaaacgggccgccgagcgcctccagtacgtcttcgggtataagctggtggaacttgaacccaagagcaacacttacatcctcatcaacaccctggagcctgtggaggaggatgccgagatgaggggtgaccaaggcacgcccactacgggcctcctgatgatcgtcttagggctcatctttatgaagggcaacaccatcaaggaaactgaagcctgggactttctgcggcgcttaggggtctaccccaccaagaagcatttaattttcggagatccaaagaaactcattactgaggactttgtgcgacagcgttacctggaataccggcggataccccacaccgaccccgtcgactacgaattccagtggggcccgcgaaccaacctggaaaccagcaagatgaaagttcttaagtttgtggccaaggtccataatcaagaccccaaggactggccagcgcagtactgtgaggctttggcagatgaggagaacagggccagacctcagcctagtggcccagctccatcctcttgaaaggtggattcagagggacccccgggacaagggtctgagacccaaaggcacagtttagaggattgggggaagggagaacgaacccagggagcatattgctgtaaacgcttcaatgtgtgtagctttaggatgtgtttgcaaagttttgtttttttaatgttgtgttattttgctccagattttcatctataaacaaaggagcatttgttttgattttactctttttggtataaaaaattttgctagcttagtaaaacgaattggaaaacttgactatgatctggaacagataatgcaagaaggaacacataagtaagttgctttggtgccaagaaaataaaaaagctattatcaggtctcctaactaccccagtttgtaaggaaaaataaaagtttttataaaatt

SEQ ID NO: 4715 - protein, 304 aa, Homo sapien
MLQKPRNRGRSGGQAERDRDWSHSGNPGASRAGEDARVLRDGFAEEAPSTSRGPGGSQGSQGPSPQGARRAQAAPAVGPRSQKQLELKVSELVQFLLIKDQKKIPIKRADILKHVIGDYKDIFPDLFKRAAERLQYVFGYKLVELEPKSNTYILINTLEPVEEDAEMRGDQGTPTTGLLMIVLGLIFMKGNTIKETEAWDFLRRLGVYPTKKHLIFGDPKKLITEDFVRQRYLEYRRIPHTDPVDYEFQWGPRTNLETSKMKVLKFVAKVHNQDPKDWPAQYCEALADEENRARPQPSGPAPSS

SEQ ID NO: 4716 - DNA, 3676 bp, Homo sapien
  Unsure 1907-2072: Unknown base
tgggaatataaatgtcaagttacatctgacttgagctcagcagaataaacaaaactgtgaatcattaagaggatgcttgtgaagacatgcttacttttatctttgcttgggtgagtttgaaaggcaaaggaagataaccaaaccagttccctgttggttgggggccattcttaacgtgtactgaactgaacaagcagcaaaataggtggaaggtgatttgaatcactccaaagtcaggcttggagtcccaagtctgacctggaaaatggactctagctctgcctcttatcccacacatgtgtgtgtctgtgtgaacatgtgtgtgtgttggtggtttgttttgttttgttttcctcttatgtacttgggaagcagttgctgagggtcttgcggagctctgtttcctccagtgtagcatagcagcaggtgcaggggtccaaagctatggtggcaaaatgaagaatgaaaggaataaattgcacactatcatttcaacatgtaacccagtgaatcaaactgaaggtaggatgtctatatacccttcatttcaggggcccctagagaatataccttagctttccctcttccggcatcctggaaagtggatacctgtggccttcctttcactttgaaagcttacaccctcattttgactacaactaatactaaaagcttggcatcttgcttgagattagtgtttgctatgccaaacaccttctcctctttctattgaaagcaaaacataggaaaataatttgaaatacttttaaggcatcttaaaaacatgactttttcatcttatggaaaagcagaccaattttgcttttttttcccaacttgttctccagactgtgccaataaaatgtgttcatagcaggaaaatttggaaaatacagaaaagcactatgaagaaaacaaaatgtacccaaaatcccatcactcagataacatcactgttaatgttttgatatgtatttccagtcttttctattgtgttaatttttcattttgtttttgaataaataactttcaggaaagaaattgagccttttctgccacctctgaagcctgattactgtgtgaagcaggccatgaaggccatcctcactgaccagcccatgatctgcactccccgcctcatgtacatcgtgaccttcatgaagagcatcctaccatttgaagcagttgtgtgcatgtatcggttcctaggagcggacaagtgtatgtacccctttattgctcaaagaaagcaagccacaaacaataatgaagcaaaaaatggaatctaagaatctttttgtatggaatattacttctatcagaagatgatcaagatgtttcagtccagtgcacatcagcattgctgacattttatggattctaaacttgtgttgtttcttttttaaatcaactttttaaaaaaataaagtgtaaattaaccgactagagtacttggaaaatgtgatcagtacaagtgaacttaggttgttgccaacagggtccttttaggcagaacccagaaaccagtcaaatctgtagagaagcagtgtgacatcttcaggttaccattattttttaatgagcaggaagtctagaaatgataactagactgtatgtttcatgtgtgtgatttttcagaattcccagagtttactcattcttgttattaaactctagccagttgacatcttcgcaatttcaaggactgatagtgctgtattttctcacgttttctaagtttccgttttgcaaggcctaggtgactttttcatggtgtttgtatgtttagctcttttgaaaaggaattttgaaatctccatcaactgaagtaaatgatgtctgagtgttacagtaaaggtgaccaagtctctttcttaaagtcacaatgactaaagtattagttgaannnnnnnnnnnnnnnnnnnnnnnnnnnnnnnnnnnnnnnnnnnnnnnnnnnnnnnnnnnnnnnnnnnnnnnnnnnnnnnnnnnnnnnnnnnnnnnnnnnnnnnnnnnnnnnnnnnnnnnnnnnnnnnnnnnnnnnnnnnnnnnnnnnnnnnnnnnnnnnnnnnnnnttgaatttttaattttatctctgatatacttcattaggtctccagacacttaatgaagtatatcagagataaaattatcctaaaagatcatacattttctacctatgaattttgctgcatacagaaagtgccctttcctcaggaagttgctgtgtttcatttctttggatggactcttatctagaatacatagcagctctgcaaagaaacagtttttaaaaatgggaacttctacattgaaaagtccccatttttgtgccaactatgattagtgagaggaagaaatcttattctatggcatatgtatggaagggtgtaaagattcttttgaaaggtttattcacattgtagaacagcaaatgacatttttacagtatttttttgtaaagcaaactattttgtgccttgaatttggtatatgtgtattagtgaaacattgtaaaggtgaacttctacctctgtatctaaatgtataccatccacttgtaaatgactataaactattatgtgattgcttttttttttagaatgtcttgtttaaatagtggccaatgtttaaggctgttaaaataagccaacttttactaattggggagttttataaatgactgattaaatttaaagaattaacttacatgcaattgtgtgattattagttatcagcagtgttgtaaggaaaattattgtgtttttttttatgatcattatcccactttaggtaaagaaaaatattggaatggaatagtgttgggaaacagacattaacaacctagggtgcctgcactcaaatagccgatgttactgtccctagattagagacttgattaagggcttgtttgtaccaaaagtggggaaacaatgccatgacctgtgttttagtttggctgcaccacagatcaaatctgcactgtgtctacatataggaaaggtcctggtgtgtgctaatgttcccaatgcaggacttgaggaagagctctgttatatgtttccatttctctttatcaaagataaccaaaccttatggcccttataacaatggaggcactggctgcctcttaattttcaatcatggacctaaagaagtactctgaagggtctcaacaatgccaggtggggacagatatactcagagattatccaggtctgcctcccagcgagcctggagtacaccagaccctcctagagaaatctgttataatttaacaacccacttatccaccttaaaactgaggaaagtcgtctttacatctaattttattcttgtgtgttataacttaaacctatttctatttttgtttgttattgcccttataagggtgtccatctccaagttcaataaactaattcatttaacttttttgtagaagtctttcattcccatgtcccagcccagttcaatcacttctgtggctcttccttgaatgttgtccatattctccctcccatctttagctgtggagtttggaaagggatacagttaatgcaggtttagaactatggaattcctacaagttgcatttcttcatcccaatgtcacgttcttattaatgctacattgctgattgtgtgcattattgtttctaaacatgaaatctcttctagac

SEQ ID NO: 4717 - protein, 5 aa, Homo sapien
MKSLL

SEQ ID NO: 4718 - DNA, 2165 bp, Homo sapien
ctattttgtttgtagtattgtggaacagtcttgttatggagtgccagcttagaggttgttgcaaacttgtctagaagtgagagcatggttttttttagccctttgagagtctacatctaatgaacattcttgctcacccataaataacgtcaagcctcaatgtcaccgtcacgttgggatactctttctcatctggcatcctagacaggacaaggttggttacctttccttccatgaaccatgaacctgtgacggcatcattcatcctgacttcaccaagctccgcctgtgggtgaggccagagctcccactggcaatttttagaagagccagaggctccctgcttcctctagaaataacagttcagggtgaagcatggagggtttcagttcccagacaacggaaccatttagagacaacacagttggacatttccactttttccttgattcctggaagtccagtgggttctgcagctgaaaaagccctgggtcccagcagcagagagacaggacagaggggatgcttgggcggggagggacggtaacctgcagaacagattccatttttatagaacgagtacacgtttgctaaaacagtcctgctttcccagactggattcccaccacagggacagtcggaactcaggactagctccagcgacatctttcctccgaattcaagccttctatcacaatgtcaaaacagctatttataaagccattttcattgtacttgataacagcacgagtcccaaaacttttagaaataaaataggacattggcttgattgaaaagagggactttttaaaaattgttctttcgtcagaagccttttggatgacttacaatagctctgatgaagataccaccccagcgtcagtccaataggtcagtgagtttcaacaggcatccatccctcccatgaagggattctggtgatgggaagtttctgtaatgacaggaaagcattgaccctcattgattgtcaactttggtattagccatgaaagacaggatgctcattgggtgttctgtagagtgaggaatgctgcctattccctcccagaacgtctgacccaggggtgtgtgttgaggagccctgggggaaatggaccaagttttcccacagagcagtattaggctgaagagcaggtgactggtaggccccagctcccatcattccctcccaaagccattttgttcagttgctcatccacgctggattccagagagttttccaatttgggaagccatgagaaaggtttttaaatcttgggaagatggagagagggacataggatagttgactccaacatgacaggaagaggctggagattgggaattggccatcaaccaagcctgtagtagtaaagccatggtcccgcattggaattacttggggaacttatacagttctgatacccaggctctcctagaccagttcaaccaattctaggtgggggactcaggcatcagtgtgtttcgtagctccccgggtgttttccctgtgcagccgagcttgggaaactgccatgctttttggatgtcaaggcgctgttggaggctgggtgtgacagcacagagccaggttgtcttgtggaaaccacagccacgggtttgccactggctcagcatggcctcactgccagtcccagcctggctgagggacaagatggtttctcttgggagttcctgagtggagcacccttccaggctttttgaaagccagctgatctgtggagccttgttaagggactcaatacggtgtttggatattgatgtttttccttgagactgtcttgtccatcaataaagatggaggatgtctcctctttgaaccccgcttccccaccagtactctctctcccttagagtttatgagttattcaaggaggagacttcttaaagacagcaacgcaattcttgtaacttgtgtaaatagccccatctttcagagtgataccatttctacatttgataatgcctgtattcctgtaggatgtatatagtttaggggattttttttttgtttggttttgttttttagaagtcaatatgtctggttttatttattgcttgaaaaagatcatttgaaaaaaataaatacattttcaattccagaaaggatctatgtcgggtgcggagaaagaggtaatgaaatg

SEQ ID NO: 4719 - protein, 9 aa, Homo sapien
MSGAEKEVM

SEQ ID NO: 4720 - DNA, 1734 bp, Homo sapien
ggcacgaggctggaaccaaacagtttggcatgtgtgtcagtgatacacaaaatagttttgcagattatggttgtatgttacaaattagaaacgtgcatttcttaccggacggaaggtctgtggttgatacagttggaggaaagcggtttagggttttaaaaagaggaatgaaagatggatattgcactgccgacattgaatatctggaagatgttaaggttgagaatgaagatgagattaagaatctcagagagcttcatgatttggtttactctcaagcctgcagctggtttcagaatttaagagacagatttcgaagccaaattcttcagcatttcggatcaatgcccgagagggaggaaaaccttcaggcagcccctaatggacctgcatggtgttggtggcttcttgcagttctccctgtagacccacgataccagctgtcggttttgtcaatgaagtctttgaaagaacggttgaccaagatacagcatatactgacctatttttctagagaccaatctaagtaactaactctttggatctccctttaaagtgaccctaatctggctgcattgatggccagattgtctgctgcctttgcacatctagtgctggtttcagaaatttaatgaaacttttctttttccttcgacctcctgaatcatgtggttctgcaaatgaataccttcaactaggatttagaccactaagaacttgcacagaaaaacacgcattgaatgtgtgtcgaacctctacattgtgaagttgcactatgtaccatactctaaaatgaaataagaactctttatgtctgtgagagagtgtgtgtgtgtgtgtgcgtgcgtgtgtgcttgtgggggttgggtagtgtgtgtgtattttctctggctttaaaatcttaaaacaaacaaacaaaaaagccatagagagcagaacttgccgagggtcatttattgcccaagtttacaagagtagcgatacaagtttttgcaaattgaatttgcctcagatatatctgtcctaatgcttatatttgcacaagtatgtaaaatatcgtgttgaggatcattctttgttggaaatactgctcttgctgaactgtcttgaccattgactatgacacagtttcttatttatgtaaatacttgcatcacagtggccgacaggcattggatgcagaacctagagccagttttcaggaacaattgtaaacctgacatggtactgtgcatctattcataaaacactcaaaactgtgaaaatatggtttacatttaattgtacataaaggtaaagggagaactcaattcagtaccagttagtttgtacattttagggggcttttcacattaactgcccatttgtgtaatttatagtttgacatgatgtgtttgttttaaaaaaaaatgcatagtataaacccattaaggatctgggaaaagagaagaagtttaatatagaactaagcttttaaagtttgtttttgtttttaattctggtctcggtgcaaatgttagttatgccttattcatatcacagttagatcaccatgctgcaacatggtttatattcatgctgccctagaaacttttgtaattatttgttgcaaatttgtgactgtccttattaactttcttttatgtaagtaatttgtaaaagtttcttaaaatttttgcttttgcttatttaattttgaataaaagctaaattcctaaaaaaaaaaaaaaaaaa

SEQ ID NO: 4721 - DNA, 855 bp, Homo sapien
gcagaagtcaaaagttttgcaaggaaaccgatgaggttgctgacctgagctgggcagggttgaacaggcgagtgccaagatcaaggtctctgattgtctctccttgaaaggtaagcagagaactagggctatcccataaattaagtgggagattggaaaggggtgcggacttctgtattggggagaaggtcttggatgaactggggcagagaactgccagagagagtacctaggaatacgttgttagcaggagaaagaccaagttcagatgcagacttgggaaagtaggtaacttgaccaaaggtagcaaaattagactacccaactggattgtgaatgcagtttatgaaatggatcaggacaggaacaaaaatagattttctagaaactgcagactcctgtgattggagcagtatacaaagtacagcaacatcagactagatctcacctgaggtgctgggtgagaaatcttagggaccagatggaagagggcctgtgtataaagacattaggaaggaggtttgggaaggtttgggagggcagcctgacttgtctccagagaaagttagaactggttgacttagcaaccaagggacactgggtcaaagacgaggaatcaggacgtcggtgcctagtgactgagcgccagcccagcccatttctctacattgccatgggctaaacccagtgtgctgtaaactcttcagttcctttggttatggattttgtatcttttctgtgtttcttaataaagttcttttgaaaaatgggaacctttctcagatgggaattttgtatctttcctctgtttcttaataaagttcttttgaaaaattggaaaaaaaaaaaaaaaaa

SEQ ID NO: 4722 - DNA, 2518 bp, Homo sapien
gggattttctgctccggttggtgagcgcgcctgcgcgttgacggcgattttgcgttctgaggctgcagcgtcggcatcttgagctgccggttcgcgagttcgaggccaggttccgcctgtcgtgggttcgcaccccggacgcgatgctattcgacaaggtgaaagcgttctcggtgcagttggacggcgcgaccgcgggcgtcgagcccgtgtttagcggcggccaggccgtggcgggccgggtgctgctggagctgtcaagcgccgcgcgtgtgggtgccctgaggctgcgcgcgcggggccgcgcccacgtgcactggaccgagtcgcgcagcgcgggctcgagcacggcttacacgcagagctacagtgaacgcgtggaggtcgtgagccaccgcgccacgctcctggcgccagataccggggagaccacgacgctgcctcctgggcgccatgagttcctgttcagcttccagctgcccccgaccctggtgacatccttcgagggcaaacacggtagtgtccgctactgtatcaaggccaccctgcaccggccctgggtcccagcacgccgggcaaggaaggtgttcactgtcatcgagcctgtggacatcaacacgccagccctgctggcacctcaagcgggggctcgggaaaaggttgcccgatcctggtactgtaaccgtggcctagtctccctttcggccaagatcgaccgcaagggctacaccccaggagaggtcatccctgtctttgccgagatcgacaacggctccacacgtcctgtgctgcctcgggcagccgtggtgcagacacagacgttcatggcccgaggcgcccgaaagcagaaacgggcagtggtggccagcctcgcgggcgagccggtgggccccgggcagcgggcgctgtggcagggccgggcactgcggatccccccagtgggtccttccatcctgcactgccgcgttctacacgtggactacgcactcaaggtctgtgtggatatcccaggaacgtccaagctgctgctggagctgccactggtgatcggcaccattcccttgcacccttttggcagccgttcctccagcgtgggcagccacgccagcttcctgctggactggaggctgggggccttgccggagcggcctgaggctcctcctgagtactcggaggtggtagccgacactgaggaggcagccttggggcagagccccttcccgcttccgcaggaccccgacatgagccttgaaggcccgttcttcgcctacatccaagagttccgctaccgcccgccacccctgtactctgaggaggatccaaacccactcttgggggacatgaggccgcgctgcatgacttgctgaacggcacagggacccctcgaggaacaaggttgcacaccagctttcagccaccatgactgtggggagtggctggaccaagggctgacctccccgactgcatcaaagttggggaaccaagtctcagagtgaggcgggggcctttcggatatcacatgggacagaggaagagcccggctggaatctgacttacctggaccgctgtccttgtgaggcattgaatgcccagtgcagtatccgagagactgtttaataacctgtcttcccagccaattggtggtgctggaatcccctaggagccttcagtctgggagaaacagagccagacatagacagttccagcatcacagaaccagaagaagagacctgcaactgtgagagtccagacaggaagcagagaaggcgtccttgcggaaagggcattttagctgaggctttggagtacgaataggagctcagcaggcagacgaatgaggaataaaggtcagagaaggtcagagctgagtgacgtttggaatccaccccgtttattgtagaactgggggttcagagggcaggtgcctcagagttgaggccacacagtgaggtctggtgggtgaaaggacccaggaacgaggcgttcaggaaagcaggttgtcagagctatgtggagtctgtgggtggcaggggcagccgctccagcctttgaagactttgaaagccagagattcctggcgcaggcttggacttcctgggagctcctccaagtacccaggggcatcagagctgcctgggtgttacatggcccagggaacccaggttcagggtaggacaggcaagaccagatacccaatgtgcaaagtgaaaacactgggctccctgttaaacgatgaagaattcaagacagtgacagcattacgtcacccctggggacagaggtcagcctaaggtgacacacggggactactgtgcttccggaggctccctgtgtcctggaggagaaaagcattagagggggcagctggacaagctcccaactgcagagtcccagccctggctggggcagggccccggcctgggactcagcatttctgatatgccttaagaattcattctgttttgtacaattattttttaaaagtaaacgtgtggagaaagaaaaaaaaaaaaaaaaa

SEQ ID NO: 4723 - protein, 407 aa, Homo sapien
MLFDKVKAFSVQLDGATAGVEPVFSGGQAVAGRVLLELSSAARVGALRLRARGRAHVHWTESRSAGSSTAYTQSYSERVEVVSHRATLLAPDTGETTTLPPGRHEFLFSFQLPPTLVTSFEGKHGSVRYCIKATLHRPWVPARRARKVFTVIEPVDINTPALLAPQAGAREKVARSWYCNRGLVSLSAKIDRKGYTPGEVIPVFAEIDNGSTRPVLPRAAVVQTQTFMARGARKQKRAVVASLAGEPVGPGQRALWQGRALRIPPVGPSILHCRVLHVDYALKVCVDIPGTSKLLLELPLVIGTIPLHPFGSRSSSVGSHASFLLDWRLGALPERPEAPPEYSEVVADTEEAALGQSPFPLPQDPDMSLEGPFFAYIQEFRYRPPPLYSEEDPNPLLGDMRPRCMTC

SEQ ID NO: 4724 - DNA, 1510 bp, Homo sapien
aaaaaacaacttaaagaggtaatttagccatcattcttatgccagcagatataaataaacttggacccatctggtcttcagctaaacctgagacattttaaagtgcatggacagccatggacagcaggccctcctctaacaggggatgcaaggcatggagaaagacaatcagtacccaagctcagccacagaagacaggagtcactcatataacttgtgtttagaagtttttggtagccacgcacactttctgaaatcacactatctggtggtttaatcatatttttaaagacagaatccctgagtgctgagcagattctcaaaacacatttagaatccctgaaattagaaagatcaatgacaaaatatctgtcagccaggccacaaacaggtgtaaaattatgaaaggagtggttggatgtgccaagtttggtaaagtggtgactgcatctgagaaagaggctgtgaggctgaactcttggtggcttccttctgtaacttccagagggagtcttcaacacaggccccgtgctcgtaggaatacggtagcacctatgtaggaagtgcgtggagttttctgtcttctttctgtgtgatttttggcctttttatcagcacttctcccctcccaggagcctggggatgccaaacatccagaatgtgatgggacaagatgggggcaggggcctcacctccctgcagaggtccggccaggtctccttgtccctggacaatctcctgagcctctctgcttggtggagcaggcacctgtgtgcagaattcccactgtggccagcacgaggaagtcttttctagtgaaaatgtgtcttgtggtcaggaataattatcctttcccctgtagccaccaaggagggcaaatagagaaaggtaacctaattgaaggattggtcatgtgaaaagggctacatttgggaagctgggaaaggcctccaggcttctagagcagctagcttgggctggattctcacacccaggctgccccttggattgttctacccaagcttttccctggggtctgggctcactccataaggtaaggtgccttttaccttatggtccttctttagcaggtaacaaaggagcatcaggggcaggctgccctggtggcatcacactggctagtgaggccgtgaatatcttgtcccccagcagggccgacagtttctatcacagaaaacagtgtgttcagtggtgaaaatcgttgcatgcatgttttcatctgagcgtgtccttctcccatactccctatcagccagccctgcctgtagctgctgtatggtgattgcacttggacatcagtccaatgactgcaagtcggcctggattttcacttgcagaggctacagctgcattgtcaggtctcccagccctgcagagagctccctccactggttagcagtgtgttgtgttttccattcatttcagaagagctacattgtgtcactggacatttttaaaaactgtgatttttaataaaaatttaaaattt

SEQ ID NO: 4725 - protein, 87 aa, Homo sapien
MFSSERVLLPYSLSASPACSCCMVIALGHQSNDCKSAWIFTCRGYSCIVRSPSPAESSLHWLAVCCVFHSFQKSYIVSLDIFKNCDF

SEQ ID NO: 4726 - DNA, 3362 bp, Homo sapien
agactccctgtctttgcggtttgggagatgatgagaaaccacagaattgctagtagtttatgtggagatcaggtcttctccaagaaaaaaaaaaagaaaaaaaaaaacaacatggctgcaaaggagaaactggaggcagtgttaaatgtggccctgagggtgccaagcatcatgctgttggatgtcctgtacagatgggatgtcagctcctttttccagcagatccaaagaagtagccttagtaataaccctcttttccagtataagtatttggctcttaatatgcattatgtaggttatatcttaagtgtggtgctgctaacattgcccaggcagcatctggttcagctttatctatattttttgactgctctgctcctctatgctggacatcaaatttccagggactatgttcggagtgaactggagtttgcctatgagggaccaatgtatttagaacctctctctatgaatcggtttaccacagccttaataggtcagttggtggtgtgtactttatgctcctgtgtcatgaaaacaaagcagatttggctgttttcagctcacatgcttcctctgctagcacgactctgccttgttcctttggagacaattgttatcatcaataaatttgctatgatttttactggattggaagttctctattttcttgggtctaatcttttggtaccttataaccttgctaaatctgcatacagagaattggttcaggtagtggaggtatatggccttctcgccttgggaatgtccctgtggaatcaactggtagtccctgttcttttcatggttttctggctcgtcttatttgctcttcagatttactcctatttcagtactcgagatcagcctgcatcacgtgagaggcttcttttcctttttctgacaagtattgcggaatgctgcagcactccttactctcttttgggtttggtcttcacggtttcttttgttgccttgggtgttctcacactctgcaagttttacttgcagggttatcgagctttcatgaatgatcctgccatgaatcggggcatgacagaaggagtaacgctgttaatcctggcagtgcagactgggctgatagaactgcaggttgttcatcgggcattcttgctcagtattatccttttcattgtcgtagcttctatcctacagtctatgttagaaattgcagatcctattgttttggcactgggagcatctagagacaagagcttgtggaaacacttccgtgctgtaagcctttgtttatttttattggtattccctgcttatatggcttatatgatttgccagtttttccacatggatttttggcttcttatcattatttccagcagcattcttacctctcttcaggttctgggaacactttttatttatgtcttatttatggttgaggaattcagaaaagagccagtggaaaacatggatgatgtcatctactatgtgaatggcacttaccgcctgctggagtttcttgtggccctctgtgtggtggcctatggcgtctcagagaccatctttggagaatggacagtgatgggctcaatgatcatcttcattcattcctactataacgtgtggcttcgggcccagctggggtggaagagctttcttctccgcagggatgctgtgaataagattaaatcgttacccattgctacgaaagagcagcttgagaaacacaatgatatttgtgccatctgttatcaggacatgaaatctgctgtgatcacgccttgcagtcattttttccatgcaggctgtcttaagaaatggctgtatgtccaggagacctgccctctgtgccactgccatctgaaaaactcctcccagcttccaggattaggaactgagccagttctacagcctcatgctggagctgagcaaaacgtcatgtttcaggaaggtactgaacccccaggccaggagcatactccagggaccaggatacaggaaggttccagggacaataatgagtacattgccagacgaccagataaccaggaaggggcttttgaccccaaagaatatcctcacagtgcgaaagatgaagcacatcctgttgaatcagcctagaggagaagcagcaggaatgatgctttgatactctggaggagaagttaactcaagatggaattcatgttctgatttgaggaatgaaaatgagatgatcaggcaggaaactgacattccaaggatctaatccaggaagtactctcagtggggaccacctgctttcatcccctgacattgtgggagaaattttgcaatgtatgctaatcaaaatgtatttatatgttctctgctgatgttttatagaggtttgtgaagaaaattcaacctcagcaacttcagaaactgcccctgatacgtgtgagagagaaataaaatcagattttgagtgttgaagggactgaggaagtgaggataaagagcatgaggacagcatggaaagaaggaggcagaagtggaactgaactttcactctccatgggacagatcaatctcattatcaagtctgaatagcaaccagccctctcctccaccccgtttctcctcagttaattggagctcagtcaggtgattattgagtcttgtacagcactgaaatgaaatcaaagatgaagaagcattgattgtattcgaagattgaagcacgctcatactttgtatgtgctttagggaaggggtgggtgggcacttgggccttgcgggtgcattcatgtaatctgagactcttgaactttatgacggagtcttcaatattttgatgtatatgaaacttttgttaaatatgttgtatacttcgctggctgtgtgaagtaaactaaaactctgatgaacactttggagtctgctttagtgaaggagaccaaagtgggaagggctttagggcactgatagaggccctgggtgtacttttcaatcctgtgtaatgtttaattcttgcaactgaatcaaaacagtgttaaattatggcaatatttgcactttgggaatgagtacataactgtatgatcacactctgcaaatgccacttttaaagctgttaatagactttgcaccttttctttgacaaggatgtgtcatatttaaatttttacattcatcatggctacaggtagaactggggaggggggaatgtaattttttatgggaattttgatatgaaaagaaactagtcatttatttatacaataggcttggctcaaaaagtgtttttcagacctcggtattcctaatgtgggatgtgactttattttatttttagtagcaaatttggatgtagactgacagacatagctgaatgtcttaataaatttaaatttgaagat

SEQ ID NO: 4727 - protein, 691 aa, Homo sapien
MMRNHRIASSLCGDQVFSKKKKKKKKNNMAAKEKLEAVLNVALRVPSIMLLDVLYRWDVSSFFQQIQRSSLSNNPLFQYKYLALNMHYVGYILSVVLLTLPRQHLVQLYLYFLTALLLYAGHQISRDYVRSELEFAYEGPMYLEPLSMNRFTTALIGQLVVCTLCSCVMKTKQIWLFSAHMLPLLARLCLVPLETIVIINKFAMIFTGLEVLYFLGSNLLVPYNLAKSAYRELVQVVEVYGLLALGMSLWNQLVVPVLFMVFWLVLFALQIYSYFSTRDQPASRERLLFLFLTSIAECCSTPYSLLGLVFTVSFVALGVLTLCKFYLQGYRAFMNDPAMNRGMTEGVTLLILAVQTGLIELQVVHRAFLLSIILFIVVASILQSMLEIADPIVLALGASRDKSLWKHFRAVSLCLFLLVFPAYMAYMICQFFHMDFWLLIIISSSILTSLQVLGTLFIYVLFMVEEFRKEPVENMDDVIYYVNGTYRLLEFLVALCVVAYGVSETIFGEWTVMGSMIIFIHSYYNVWLRAQLGWKSFLLRRDAVNKIKSLPIATKEQLEKHNDICAICYQDMKSAVITPCSHFFHAGCLKKWLYVQETCPLCHCHLKNSSQLPGLGTEPVLQPHAGAEQNVMFQEGTEPPGQEHTPGTRIQEGSRDNNEYIARRPDNQEGAFDPKEYPHSAKDEAHPVESA

SEQ ID NO: 4728 - DNA, 3869 bp, Homo sapien
  Unsure 3475-3477: Unknown base
  Unsure 3653: Unknown base
  Unsure 3661: Unknown base
cccgggcaggtcgccgccgcagcgcgaacatgggacgccgtcaacgccttcaaccaggagctcttttcgcttatggatatgaaacctcccatctctagagccaagatgattctcatcactaaagctgctattaaagctattaagctttataagcatgtagttcaaatagtagaaaagttcatcaaaaagtgtaaaccagaatacaaggttccgggattatatgtaattgactcaattgtgcgacagtctcgtcatcagtttggaactgataaagatgtttttgggccaagattctctaaaaacataactgccacattccaatatttatatctttgtccatctgaagataagagtaaaatagttcgtgtgctgaacctttggcaaaaaaatggagtgttcaaaattgaaattattcaacctcttttggacatggcagcgggaaccagtaatgcagccccagtagcagaaaatgttaccaataatgaaggctcacctccacctccagtaaaagtttcttctgaacctcccacacaagccactccaaactccgtcccagctgtaccacagttgcccagctctgatgcttttgctgctgtggctcagctgtttcagacaactcaaggccaacagcttcagcagatccttcagacttttcaacagcctccaaaaccacagtctcctgcccttgacaatgctgtgatggctcaggttcaggctatcacagctcagttaaagacaactcctacacaaccatctgaacaaaaagctgctttccccccacctgaacagaaaactgcatttgacaagaagttgcttgatagatttgactatgatgatgagccagaagctgtggaagaatcaaagaaagaggataccattgccgtcgccacgacagcacctgctgccgcagtaccccctgcacccgccgccaccgtgcctgctgctgctgcacccgctgctgcctctcctcctcctccacaggcaccatttggctttcctggagatggcatgcagcagccagcatacacacagcatcaaaatatggatcagtttcagccacgaatgatgggaatacaacaggatccaatgcaccatcaggttccacttcctcctaatggacaaatgccaggatttggacttcttcctacacctccatttcctcccatggctcagcctgtgattcctccaactccaccagtgcagcagcctttccaagcttcttttcaggcacaaaatgaaccacttacacagaagccgcatcagcaggaaatggaagtagaacaaccttgtattcaagaggttaagcgacatatgtctgataacagaaagtcaagatctaggtcagcatccaggtcaccaaaaaggaggcgatctagatctggttctagatctcgaaggtctcggcatcgacgttctcgatctcggtccagggatagacgccgacattctccccgatctcgatctcaagaaagacgggatcgagaaaaagagagagaacgtcgacaaaaaggcctccctcaagtgaaaccggaaactgcaagtgtttgcagtactaccctctgggtggggcagctggacaaaagaactactcagcaggatgttgccagtctcttggaagagtttggtccaattgaatcaattaatatgattcctcccaggggttgtgcctatattgttatggtttataggcaagatgcatatcgtgccgtgcagaaactgagccgaggaaactataaagtgaaccagaaatccataaagattgcgtgggccttaaacaaaggaataaaggcagattataagcagtattgggatgttgaactttgtgttatttatattccatgtgacaatgttaagcctgaggaaatggagagtttttatgaaggaggaatgttggacagtgacacacttaacccagattggaaaggaattcctaagaagcctgaaaatgaagttgctcaaaatggaggtgctgaaacctcacacacagaaccagtatcacccatacctaaaccattacctgtgcctgtccctcctattcctgttcctgcacctataacagtgccacctccacaggtcccaccacatcaaccgggtccacctgtagttggtgctctccagccgcctgctttcacgcctcctctgggaataccgcctccaggctttggtcctggtgttcctcctccccctcctcctccaccatttttgcgcccaggattcaacccaatgcatttaccaccaggttttctgcctcctggacccccacctcctataactccaccagtatccattcctcctcctcacactccaccaataagcatcccaaactctactatcgctggtataaatgaagacactacaaaagacttatctattggaaatcccattccaacagtggtgtctggggctagaggaaacgccgagtctggtgacagcgtgaaaatgtatggctccacctgctgcacccacgagtctgcccacccctcctgtaacccagcctgtttgccgtgctcacttcttggcactcaaggagttgcccctggtcctgtaattggacttcaggaaccatctactggtcttcttggcgcccggcccggtctcatcccactccagcgccctccaggaatgcccccacctcacttacagcggttccctttgatgccgccccgtcccatgccaccgcacatgatgcacagaggcccaccgccaggaccagggggctttgcgatgcctccacctcatggaatgaaaggtcccttcccaccgcatggcccctttgttaggcctggtggaatgccagggctcgggggcccagggccaggcccagggggtcctgaagacagagacggaaggcaacagccgccgcagcagccacagcagcagccacagccgcaggcgccccagcaaccacagcagcagcagcagcagcagccaccaccatcacaacagcctccaccaacacagcagcagccacagcagtttagaaatgataacaggcagcagttcaattcaggtagagaccaagaaaggtttggaagaagatcttttggaaatagggtggaaaatgaccgggaacggtatgggaaccgtaatgatgatagagataatagtaaccgtgacaggagagagtggggaaggaggagccctgaccgggacaggcacagagacttggaagagagaaatagacgctctagtgggcatcgagacagagagagagattctagagatagagagtctcgtagagagaaggaagaagcccgaggaaaggaaaagcctgaggtgacagacagggcaggtggtaacaaaaccgttgaacctcccattagccaagtgggaaatgtagacactgcttcagaacttgagaagggggtgtctgaggctgcagtcctaaagccttctgaagagttacctgctgaggctacctcatccgttgaacccgaaaaggatttaggttcagcagcagaggctcctcgttagnnnaatttgtgaaaatgtgacagtgacaattcctggagtgtagagctagaggtgtacagatgctatattatatccgctcccggtgtactgcagccccgcgccagctggtggggaactgtaagcaatttgattgcttcccttgtatttaaaaatagccacaaaataacaaaaaatactgnaaatatgnataaatattaccctttttgctgtaactttttaaaagttttgactttaaaaagtttacaaattgtaattagaagtgctctctatttttttttttttttttaatttaagacaaggtaacggtgaaagctcctcaaaacaatagggatgtttttaataaactctattttcgtaacaaactttaatgtgtgctattcttcctacactgcatt

SEQ ID NO: 4729 - protein, 1157 aa, Homo sapien
PGQVAAAARTWDAVNAFNQELFSLMDMKPPISRAKMILITKAAIKAIKLYKHVVQIVEKFIKKCKPEYKVPGLYVIDSIVRQSRHQFGTDKDVFGPRFSKNITATFQYLYLCPSEDKSKIVRVLNLWQKNGVFKIEIIQPLLDMAAGTSNAAPVAENVTNNEGSPPPPVKVSSEPPTQATPNSVPAVPQLPSSDAFAAVAQLFQTTQGQQLQQILQTFQQPPKPQSPALDNAVMAQVQAITAQLKTTPTQPSEQKAAFPPPEQKTAFDKKLLDRFDYDDEPEAVEESKKEDTIAVATTAPAAAVPPAPAATVPAAAAPAAASPPPPQAPFGFPGDGMQQPAYTQHQNMDQFQPRMMGIQQDPMHHQVPLPPNGQMPGFGLLPTPPFPPMAQPVIPPTPPVQQPFQASFQAQNEPLTQKPHQQEMEVEQPCIQEVKRHMSDNRKSRSRSASRSPKRRRSRSGSRSRRSRHRRSRSRSRDRRRHSPRSRSQERRDREKERERRQKGLPQVKPETASVCSTTLWVGQLDKRTTQQDVASLLEEFGPIESINMIPPRGCAYIVMVYRQDAYRAVQKLSRGNYKVNQKSIKIAWALNKGIKADYKQYWDVELCVIYIPCDNVKPEEMESFYEGGMLDSDTLNPDWKGIPKKPENEVAQNGGAETSHTEPVSPIPKPLPVPVPPIPVPAPITVPPPQVPPHQPGPPVVGALQPPAFTPPLGIPPPGFGPGVPPPPPPPPFLRPGFNPMHLPPGFLPPGPPPPITPPVSIPPPHTPPISIPNSTIAGINEDTTKDLSIGNPIPTVVSGARGNAESGDSVKMYGSTCCTHESAHPSCNPACLPCSLLGTQGVAPGPVIGLQEPSTGLLGARPGLIPLQRPPGMPPPHLQRFPLMPPRPMPPHMMHRGPPPGPGGFAMPPPHGMKGPFPPHGPFVRPGGMPGLGGPGPGPGGPEDRDGRQQPPQQPQQQPQPQAPQQPQQQQQQQPPPSQQPPPTQQQPQQFRNDNRQQFNSGRDQERFGRRSFGNRVENDRERYGNRNDDRDNSNRDRREWGRRSPDRDRHRDLEERNRRSSGHRDRERDSRDRESRREKEEARGKEKPEVTDRAGGNKTVEPPISQVGNVDTASELEKGVSEAAVLKPSEELPAEATSSVEPEKDLGSAAEAPR

SEQ ID NO: 4730 - DNA, 1168 bp, Homo sapien
ggcacgaggccgggccgaggcgatggcgccctgggcgctcctcagccctggggtcctggtgcggaccgggcacaccgtgctgacctggggaatcacgctggtgctcttcctgcacgataccgagctgcggcaatgggaggagcagggggagctgctcctgcccctcaccttcctgctcctggtgctgggctccctgctgctctacctcgctgtgtcactcatggaccctggctacgtgaatgtgcagccccagcctcaggaggagctcaaagaggagcagacagccatggttcctccagccatccctcttcggcgctgcagatactgcctggtgctgcagcccctgagggctcggcactgccgtgagtgccgccgttgcgtccgccgctacgaccaccactgcccctggatggagaactgtgtgggagagcgcaaccacccactctttgtggtctacctggcgctgcagctggtggtgcttctgtggggcctgtacctggcatggtcaggcctccggttcttccagccctggggtctgtggttgcggtccagcgggctcctgttcgccaccttcctgctgctgtccctcttctcgttggtggccagcctgctcctcgtctcgcacctctacctggtggccagcaacaccaccacctgggaattcatctcctcacaccgcatcgcctatctccgccagcgccccagcaaccccttcgaccgaggcctgacccgcaacctggcccacttcttctgtggatggccctcagggtcctgggagaccctctgggctgaggaggaggaagagggcagcagcccagctgtttagggttgctggaggccgggctaccgtcttgtgcctgaaaaccacggggcctgtccccagctggggtgagcgctcagagggcctggggccctcactcctgcccacgcctcccagaccccagaacggagcttcaagtcagacagatccctgccttggtgggcagttctgccttccaaggaagaaggggaagaaaaggacctgtgggtggctcaggcccaagcagaccccgggctccaccccagccccgcccaggctgctgccagtgcacacttttacaaatttaatataaagcaagtccagtcttaaaaagacaaaaaaaaaaaaaaaaaaaaaaaaaaaaaaaaa

SEQ ID NO: 4731 - protein, 267 aa, Homo sapien
MAPWALLSPGVLVRTGHTVLTWGITLVLFLHDTELRQWEEQGELLLPLTFLLLVLGSLLLYLAVSLMDPGYVNVQPQPQEELKEEQTAMVPPAIPLRRCRYCLVLQPLRARHCRECRRCVRRYDHHCPWMENCVGERNHPLFVVYLALQLVVLLWGLYLAWSGLRFFQPWGLWLRSSGLLFATFLLLSLFSLVASLLLVSHLYLVASNTTTWEFISSHRIAYLRQRPSNPFDRGLTRNLAHFFCGWPSGSWETLWAEEEEEGSSPAV

SEQ ID NO: 4732 - DNA, 2736 bp, Homo sapien
gaaaaggcaaatctacccttcacagttcctgttaagggtagatttgctgaaatggagaaacaaagacaagaggaacaaaggaagagaacggaggaggaacgaaaacgcagaattgagcaggatatgttagaaaagaggaaaatacagcgtgaattagcaaaaagggctgaacagattgaggacataaacaatacgggaactgaatcagcatcagaggaaggagatgattcactacttataactgtggtacctgtcaaatcatataaaacatctggaaaaatgaaaaagaattttgaggatctagaaaaagaacgtgaagagaaagaaaggatcaagtacgaggaagattaaagaataagatatgaagaacaacgaccatctctcaaggaagcaaagtgtctttcattagttatggatgatgaaatagaaagtgaagcaaaaaaagaatcactttctcccagaaaattgaaactaacttttgaagaactggagcgacaaagacaagaaaaccgaaagaagcaagctgaagaggaagcaagaaaacgtttagaagaagagaagcgtgcttttgaagaagcaaggcggcaaatggtaaatgaagatgaggaaaaccaagacacagcaaaaatttttaaagggtaccgccctggtaaactcaaactcagttttgaagaaatggaaaggcaaagaagagaagatgaaaaaaggaaagcagaagaagaagccagaaggagaatagaggaagaaaagaaggcgtttgctgaagcaaggagaaatatggtagtagatgatgactccccagagatgtataagacaatctctcaagaatttcttacaccgggaaaactggaaattaattttgaagaattattaaaacaaaaaatggaagaagaaaaacgacgaacagaggaggaacggaagcataagctagaaatggagaaacaagaatttgaacaactgagacaggaaatgggagaggaagaggaagaaaatgaaacctttggattgagcaaagaatatgaagaactgatcaaattaaaaaggagtggctctattcaagctaaaaacctaaaaagcaagtttgaaaaaattggacagttgtctgaaaaagaaatacagaaaaaaatagaagaagagcgagcaagaaggagagcaattgaccttgaaattaaagagcgagaagctgaaaattttcatgaggaagatgatgttgatgttaggcctgcaagaaaaagcgaggctccatttactcacaaagtgaatatgaaagctagatttgaacaaatggctaaggcaagagaagaagaagaacaaagaagaattgaagaacaaaagttactacgcatgcagtttgaacaaagggaaattgatgcagcactacaaaagaaaagagaagaggaggaggaggaagaaggtagcatcatgaatggctccactgctgaagatgaagagcaaaccagatcaggagctccatggttcaagaagcctcttaaaaacacatcagttgtagacagtgagccagtcagatttacggttaaagtaacaggagaacccaaaccagaaattacatggtggtttgaaggagaaatactgcaggatggagaagactatcaatatattgaaaggggagaaacttactgcctttacttaccagaaactttcccagaagatggaggagagtatatgtgtaaagcagtcaacaataaaggatctgcagctagtacctgtattcttaccattgaaactgatgactactagctcccctcccctctccctggaactttctctttcactccaactttcttactacatccatcttttctgtggcggggccaaaaaaggaaaccaggagtgccactatgctgacttcttattccttttcataacagtcttcaaagcacagctcatctaaagaatgcctacttcttttccaaataagcatcagatttatcgcctattatgcagtaacagtcaataaaatgtacttatgggggggaattactcaattattctatcagaacctattataaagactgtatttcccatagacgtttacagcaactatgtttaaaaaacaaaaacaaaaaaaaaacacacaaacctaagtagaatacattattttgcatgaaggaatgtcatttctgagctttttacacctaaaattaggctgaaatagctgagataattaatttggaacctatcaatttgagtggactttttctttagtagtacaccattttggttgttgtagtttcaaagtctttctgaagcagatatattgggattggagcggggtggggaaaactgtcactcctttcagaggaaaaggggaggagcatggagaaaaacaaaaattaaaggacttaaagaatggctatacagtgttgagtgttgaggatattaaacatgttatttttcaaacgtatgtaatatatattaaatttataaagcaaatttatgttgtgatcttgcctgaacaaattatattttaatgaaaaaactttctattaatagttcacgcaagagaaaacactttcaacatagtcgaaggcttcaagatctaagtgtatcagacttagggaaaaagtggcacaaccttcgatttaaaattctagtctttaaaatgagtttgtaaataattagctattacgttctattaagttgttttatattttaattttctggaagacaattttattttacaacgtgaacccaaataaagtaacttctgtattt

SEQ ID NO: 4733 - protein, 448 aa, Homo sapien [sequence omitted]

SEQ ID NO: 4734 - DNA, 5385 bp, Homo sapien
aggaacccgagccgcacggaacggcggtggtggcccgcggagccggacggggcactatgaacgaagaggagcagtttgtaaacattgatttgaatgatgacaacatttgcagtgtttgtaaactggaaacagacaaagaaacactctccttctgccacatttgttttgagctaaatattgagggggtaccaaagtctgatctcttgcacaccaaatcattaaggggccataaagactgctttgaaaaataccatttaattgcaaaccagggttgtcctcgatctaagctttcaaaaagtacttatgaagaagttaaaaccattttgagtaagaagataaactggattgtgcagtatgcacaaaataaggatctggattcagattctgaatgttctaaaaacccccagcatcatctgtttaatttcaggcataagccagaagaaaaattactcccacagtttgagtcccaagtaccaaaatattctgcaaaatggatagatggaagtgcaggtggcatctctaactgtacacaaagaattttggagtagagggaaaatacagactttggactttctatgttacaagattcaggtgccactttatgtcgtaacagtgtattgtggcctcatagtcacaaccaggcacagaaaaaagaagagacaatctctagtccagaggctaatgtccagacccagtatccacattacagcagagaggaattgaattcgatgactcttggtgaggtagagcaactgaatgcaaagctcctacagcaaatccaggaagtttttgaagagttacctcaccaagtgcaagaaaaagattctttggcctcacagctccatgtccgccacgttgccatcgaacagcttctgaagaactgttctaagttaccatgtctgcaagtagggcgaacaggaatgaagtcgcacctacccataaacaactgacctaaacagacttacttcgtatgccctgccctttattggtctcccagacatgcaaactttgaagaagtttgaagaaagttgtggtccgtttttttatggtcattaaatttgccaaacataaggcagtatttaacatctttgtcaaataaagcagatcattatactctagtcttctagggctaatcattttggctcatttggggactcttttttcccagaattactaaacaaattttatcacatgtgactacttaaatatactgttacagtgtcattttattaaacattttaattcacctgtcaaaacaacagattaactccttagtgtaaactactagagataatttttaagagggaaatggaattcatatcacctcttatttattatgagcaatattttaatataaaaattttatatgtgaaaatgctattttaggtactttgccattctatttataaatgtgtatttgagtggttctgtatatttatttacattatcatgtgtgaatatgttcacccatatttcaggtcactgcattttattctcttaatacaatgttttcacaacggttaccttgctttccaaagataaatatattttggattagaaatctgagttgttttaatttctaatacctcttataaaagaagaattaataactttttaaagcagtattcaggtaaatacaatacattattttgttttctaacaaaagcagttcttagttcaggaagaaaagactaatctggcttctatgtcaatttgtctccatagaaatgaaagcctcctcttgcttctttcattattagcttcacaccagtgactgtgatgcattagaatttggacagagtaagtcaagcctcacttccaattcaaatataatgtctatcttcaaattgagtgtgctgtgaaattgttctgtctttgaaaaaaaaaagtaagattattttgtgtgccactttgggtaaagtttcaagaatacttaaactgtccaaattgtattatcaccatcattgaacttagtgctcaaagaaagcattgtgaggtatttttctaaactttagactctatagagaaatataggattgttctacagaagaaaagcaaaactcctaattaaaaaaaaataaacctatgtattaagagaatgttctcgtaagttgcctatgatgcttccaaagagtttttatctaacagattgtgccaaacagctagataaattttaataatgtattacagtaaaggctataaccaatgcagaattaaaatgggctctaaattctgtttttaactcatgtttagaatgtacttatgaggtagatccttgcttgaaagtatctgctgaaaagcccagtaacgtggcagcttcatgcataaagatataaatgacatttgccttaaatttggcagcctaccctggcttgggtcagattttgttgttgaacacaagaaagtatttaagcaaagaaacacttcagtttaattgaaaacaactttttgtaatgctgacgtgttaaattggcctgagggtattaattgatatctgttgattttgtttttctttgaagtataacattactttttggagggaatttttgaaagatgctttcgatttctctcaattctttaagtcatgcaaaatgaatttaaaatccagggagtatggatgcattgccttagttttgatgagctttaaattaaatgtgtgcaatatcaaaatattcaaacttacaagctgggtaatacatttcctgattaatatcttagtgcttaattgttcccacgttttcaaatttgactttactcttttttggcgtaattcagtaagattgttaccagccagtgtgtttgcacacatttgggtttgtgtttagatgagttagggacagtcataaaagttggggatatgttgcatttgatatcaatggtagcatatttccagaatatgagccataagttgcagtcctgaatacaacagtgttatccaaagaaaggagttttctgacaaatatacatagctttgctaatgagtacggaacaagtggatgaacgtgtgcgtgtgctaaggtcttaagtgggactctgatttattccatttagatatttctacttaagctctaaaaaggagaggtgctcttaaaaaaaaaaactttgtggtgctggtactcacactactttatttggatgagttcctagtaaaaaaaactttttgttgaagtattttgcacagcagtttatccaaatgtttggtaaacttataatttagtcctatgttagttttcttaatcaaatatgcagttactgtgtatgcaaatataagtatcaggtacagagttctaacaagagaacatgaaatatcacaaatattgttttccacacttggctattctctacagttgttagtaatttttgagaatgttttgaagcatatctcatgtactactgtttaaaaagtggcaaaacagactgccagtcatccattactaaattttcagagcttatatgattaaggggagtgagataagacaaatctttttcacgttcagttttataatttgacacgttaaattgagttttaaaaattagaaaagtgtttttgaccacacaggttgttctctttaaagttcagccttatattgaagctaaaaatcaattatgttttactttgagattatcatcttatcctttgatcctcatattaatatctaaattagtcttttttaaaaggcatgcacttgagactccagtaatagatgattcaggcagcagaatagtgttttgttgtgtcgttgactatgcacaatggtggagcaaagacacattcttagtttttcaaaacacatgttcattttaccacaaagtgcccatttttatatacatttaaggattattttttcaatgtcaagttcatgttagtgatttcagaaatatagtcaaaatatatagtcaaatatatcttgacaggcatcttgagatttggtttttcattttactatatttatgactgaaaatggttttgtgttttctttatgttgtttatatattttttaccttagtgtttacactggtaaggcttgttagtccatttttgtagtttttttaaagtaaggttttagatctattcgtgttttaatgtttcccagtttgggttttgttttgttttggaagaatctgctttcattattaaattataaaatgtaaatgctctaaagtaggaatttttaaagagtaaattatttgtgtagcttattaggaggttcaggttagtgaccataaagtgggttacttgtacatgaaaatttgaaatggtaccatgtaaaattcttctattgtcaactttttctgatgtatgccagttcatttactgacaaatgttgttactaagtgcttattaagaagtgtaatacgctataaaaaagttaatactttttgttcagatgtaaggcaaagataattgatgccgtttcagtgtatgattgtattgttaacttttacgttggtgggagtaactatttgaggaaatttgtggtgagaattagtaagagataaaacccccaacagtttattcttaccaagtaaagttttgtggtcatggggcagggaagagtttatttaccagaatactagagccctcacacaaaataaaggtaacttggaagagggctataatgcttgcatctcagtattttcatttcacttcatcctttcataattgccttgattatggtgcagtctaacctattaagcaacttctggctatggtaacattgatatgaaccatattatatcaagtctccaaaacatctagtttgttaacatacactttccctgttctttttagtttgagtccacattactaatacattttaataatatttaattatttcacaattttaagtttaccaaagtaaacaaaaattcatgaagatgagtattgccctctcccaaaaaaggtttaaagattagttgaacttccctcaactacacctaaagcaaaggggaattttagtaagtgtgtgtaccttgtttctttcagacacatctagaatgtttttctttcaccgtacctccaaaagaggcaatttagaaagtattaagtagtgacttttgttcagtcccattttgtgtgtgtgtgtgtgtgtgtgtgtgtgtgttaaccttgctttaaaacagtagcatatactatggtcattgaacttaatctctctggcgttagaaatttactttacaaaattgtgttaagacttttggaaaaagaaaatgaaactgctgtggtaaaaaccaagtttgtttcaaaaaagtaggcaattatttggctgttacattttctttgaaaactgcaataatttatatatttgtattgctctgcttgggaactgtatatatgcttgtctactatttttaattttacaacaataaaataagtattttgtt

SEQ ID NO: 4735 - protein, 163 aa, Homo sapien [sequence omitted]

SEQ ID NO: 4736 - DNA, 2686 bp, Homo sapien
gcgcgagaggacgtgctctgccagccagtgggaaggcaggccgcgcgcgcgggagcgcgggaggatcggcggctcgcggtcactggtccctggctcggttccccgcaccccggggctcacacttacccgcgcggaggagcagcggccgggtgtccacccccatcctgcgcccagtctcctcgattcccctcgctctgagccgggagagccgaacagctgaagagagttcactgactccccagccccaggtgggccttgtgcacatcatgaccagttttgaagatgctgacacagaagagacagtaacttgtctccagatgacggtttaccatcctggccagttgcagtgtggaatatttcagtcaataagttttaacagagagaaactcccttccagcgaagtggtgaaatttggccgaaattccaacatctgtcattatacttttcaggacaaacaggtttcccgagttcagttttctctgcagctgtttaaaaaaattcaacagctcagttctctcctttgaaataaaaaatatgagtaaaaagaccaatctgatcgtggacagcagagagctgggctacctaaataaaatggacctgccatacaggtgcatggtcagattcggagagtatcagtttctgatggagaaggaagatggcgagtcattggaattttttgagactcaatttattttatctccaagatcactcttgcaagaaaacaactggccaccacacaggcccataccggagtatggcacttattcgctctgctcctcccaaagcagttctccgacagaaatggatgaaaatgagtcatgaacacagaaagtctaagaggagaaatatgatggatgaagagctctgtagatgctgtatagacactaaataagagttgattagggtagtatattatagtcatctgttatgctgtgaaatttggaattcagtattatcattttgaagtctgtaaattgtgttagtcattaacttagtcacctgttgtattctggatctacacaaaattattttaactgctcttattaatctgtgaggattaatatacaaaaagtatcctttgagatgaagtcgtgttctcaaaataaggttatattattttctttttctgcttgattttcatcttgtgttttgctttgtttttgtaaggaaccatctcttggtttggtcacatcagttcacaacagccatttgttttcaaggtcaaggctccaggcaggttgttactggtgtttgcagcctgtcagtacttgcagtactggaataggttctaggctagtgtctgcgcgtcactgtggttttagcatgggaggacttatttgagaaatactaccttacttttctatgatttctttttacagagttatagtgtgtttactcctaagatgacagttctctttgtctatattcagcatctaagacaaatatttaaacattttaaagaaccactgtgttaagtttaggattatttacttaccaaattagaagtttgacttttatgtgttatacacaatcttaaaatttcacgaattcacctttttaatagtatccatgtacataataaaatcaaagtttaattagccattttctttgaatttttttctaaataagggaaataactgttcttgggccactttacagagataaatgtatgtgaatgtttatgataaacgcttaaatatttctaaaatattaacttcaaaaaagtctttttcagttcttaaataaaaatttatttatttaagatacttattcgacttatcttaactaaggtagctatgaatgttaagtagatgaggtaaccattcagttaagttaaattgtagcattgccaggtagtgaggctcactgtacaattttccaggtaaatgaaatttcctgtagtaagaggtccgtatttttgtaacagccttttaaaaatgcttttgggaaccctccagcctcttaccaaaagaggctttaaacctcatcttgattcagactgtcagtctattcctgggcagtagtatgtgatgtccagcaccctaaccccgactccccagccctgggactattccagtagagtgaaatatttgtccctgtacaaagtggcctgaatgactgttggagttcctgtgtctggttttcctgtttattccctgtgatgcccagagtaatggcccatccaaagatgtccagatgtccatgtgctagtctccagaacttgtaactgtgttgttatgtggcaaaggggaatgaaggctgcagatggaagtaaaatagattatgctggattatctgggtgtgcccaattgatcaccggatccgtaaaagtggaagagaggcagatcaggatgtcagcgtgatgaggtgtgagacagacttgacttgctgttgctgggaggaaggggaggtcatgagccaaggaatgtggacagtctcttgaagctggaaagtgtgcattggacatctggaagccagaaaagacaaagaaatatccagaaaggaacaaagtcttgtggacaccttgattttggtccagtgagaatatgtttgacttgttaacctacaaaactttatgatgataaatttgtgttggtcgtaagccactaaatcacagtaatttgttatagcagcagatagaaaactaatatactccctttaatataaaaaaaaaaaaaaaaaaaaa

SEQ ID NO: 4737 - DNA, 2495 bp, Homo sapien
gcggccgctgcctcctgctcgccccggcgcccgcagccccggtcccgccgcggcggggctcctcggcctggctcctggaggagctgctgcggcccgactgccccgagcccgcgggcttggacgcgacacgggaggggcccgatcggaacttccgactgagcgagcaccgccaggccctggccgccgccaagcaccgaggccccgcggcgaccccggggagccccgatcccggccccggtccgtggggcgaagagcacttggcggagaggggccccaggggctgggagaggggcggcgatcgctgcgacgcgcccggtggggacgcggcgcggaggcccgacccagaggccgaggcaccccccgccgggagcatcgaggccgccccgagtagtgcggcggagccggtgatcgtctccaggtcggatcccagagacgagaagctggccctatacctggccgaggtggagaagcaggacaagtatctgcggcagaggaataagtaccgattccacatcattccagacggcaactgcctctaccgagctgtcagcaagacggtgtatggggaccagagcctgcaccgggagttgagggagcagacggtgcactacatcgccgaccatctcgaccacttcagccccctgattgagggcgacgtgggggagtttatcatcgctgctgcccaagacggggcatgggccgggtacccggagttgctggccatggggcagatgctgaatgtgaatatccatttaactactggagggaggctggagagtcccacggtgtctaccatgattcattatttgggcccagaggattccctgaggcctagtatttggctcagttggctcagtaacggacactatgatgctgtatttgatcactcctatcctaacccagagtacgacaactggtgcaaacaaactcaagtgcaaaggaaacgcgacgaagaacttgccaaatctatggccatatccttgtctaaaatgtatattgaacaaaatgcatgctcttgaaatgtctcaaaaccttacaccctgggaataattgcatatataacttgtgtttggagaatcacatgaactttaatcagggtaatagcactttcaaacttgctagtagattttactgtaggtgtaatgccttaatcatctttttgaatgttttctcagagctggaggttgctgggcacctaaatgatgtttcatgatagctttgggtgattttactgctatttataatttgctgtataaagtgagcattacttaatttgcaagctgatttctcacagtgtaaatttgttcattcctggtagtctattttctataaaaatgtatttttgcacaacatttttaaaaactggtgtaccttcatctatgacgtgttccattttgacaaacagctttcaggcgtaaatccagagaagtgctttatatgaaatgtattattttgaacagagtttgtgatttggtagttattttatgttgttgaaatttgaatttcacaattcttagataattatttcaaatggatattgatgcattcttgttaccagatgtttggcccattccattttgatgaaacagagctgttgttttggaagtcattatttttctagaaatggcgaatcttttaaagaaaattacttaatggaaggttgtgggaaggtgtttttttgtgtttttttttgggttttggttttgtttttcctcttttaagggatagtagcaggtcttacttgaatgaaagtctgatatttgctgatggcagaatgattattctgtaccctggttgatgtgtagagtagattgtctggtgctctcagttgtttttatttacatttgtcacgttgttgtaagagaatgttaacatggtataaaactctgtgacaagataagcctcctgctttatataacttcttgaatccagctaagagatttataaactaatggcataaatgtctggagccaaccttggcagttatagcaggagaacactgtcttaatatttctttacattctttcaaaaggcaaaataggattgccctgtattgatgtagaaatgtctgtaaacagagcttgtatggtttgctgggtcaaacaatgtttccaacttaaaatcaatctcattgccactttaactacttttagtcatatttattaagtaatgcagtttgtactttttttattttgtaacattttgtgatttttttgtacaaaactgtatttgtacaatagagcaattcccagctgatggaatgaatgaataaaatgcaaaattatacttttacaatgcctttttggatagagtggtttttaaattgtgatgtttgtaggaaactttcttgcatgtatgcatgtacacaattttttttttccataaagatgccccagcaatagagaggtttcctaaattatcacatgaagaggataggctaatcatgagtaatttcaaaggataagtctgaataaaatataatttaaaagtggagt

SEQ ID NO: 4738 - protein, 338 aa, Homo sapien
GRCLLLAPAPAAPVPPRRGSSAWLLEELLRPDCPEPAGLDATREGPDRNFRLSEHRQALAAAKHRGPAATPGSPDPGPGPWGEEHLAERGPRGWERGGDRCDAPGGDAARRPDPEAEAPPAGSIEAAPSSAAEPVIVSRSDPRDEKLALYLAEVEKQDKYLRQRNKYRFHIIPDGNCLYRAVSKTVYGDQSLHRELREQTVHYIADHLDHFSPLIEGDVGEFIIAAAQDGAWAGYPELLAMGQMLNVNIHLTTGGRLESPTVSTMIHYLGPEDSLRPSIWLSWLSNGHYDAVFDHSYPNPEYDNWCKQTQVQRKRDEELAKSMAISLSKMYIEQNACS

SEQ ID NO: 4739 - DNA, 1132 bp, Homo sapien
agaaaaatgattagaaattgagaactattttacgtgtttctaagttgttggctacatcaaagagatcatctgtattctgcatatgggctggctttggtgaagctgatgactggacttctaagaaccgttttcccaaatgggttcccatattcatgcacccaaagcaatggtccccaagcactgatgaaaactaatatgcatttcccaaagacccacactatgtatcaggagcctgcaccatgccatttgaatgaccctcagcaatgtgcctccctgccctcaaattcccagttgataacagtgtttgattaaatttccactcaagccaaacatggttactaagaagagaaaaacctgatgtttgcataatattttttttcccctcgagattccatctcaaaaaaaaaaggtgggtaaagggccatgagcccaaaccactaggttgttcaccttttcatctgaaaatgctttactctgactatgtgctattgggttttatttccagaaaatatagttctccttttttctgcatgaaggatacatcgtggtgccacatgctttaagcaatttaaacaagagagataagaggaaaatgcaaccaccacatctgacttgcccaatgtagactttcctctattagattgaagtacacaacctaatatgatatattattttgtagtatctcagactttgtaaataaataccattatttttatatggaaattttatagaagagctatttctgtatacgtaattactcctgattttctgaaattgcttctggtagataacagacaagtcctaagcagtgttccactaagggtggttccaggcctgcctgccgtggagttgactgggggaattttacagttttgcgatcctaggatgcgtcccagacgctcagtcagaagtgctggaggtggggcctgggaagctgtatttgtaatgaactctggtgttttttgtccattaaagtgtatctttgtccatcctataagattaaaggaaagaaaaagcatctcaaatgagtgtaagttgttcttgagaaaaaaatgtatcagacttttatgatttgaatgaaatgtattatagaaaaaaataaacactttaaaataatgttagtctcattaaa

SEQ ID NO: 4740 - protein, 68 aa, Homo sapien
MTGLLRTVFPNGFPYSCTQSNGPQALMKTNMHFPKTHTMYQEPAPCHLNDPQQCASLPSNSQLITVFD

SEQ ID NO: 4741 - DNA, 1841 bp, Homo sapien
gtctgattgggtggtgtggcgcaatgcgcgcgaccctcaagataccaaactgtacgcatctctgaccctttcctctccttgctcctgctggtaaaccgaagcccaggagacttccaggtttgggcatctgcagagggcgaggaactggtcacggcgccgggtgggcttgcagctgtgacgcttatgtggacacctcagtgtcgctggtggttcacctcggcttcccagtttatttattgacgtcaacaaataaatgttgaataaggaagaagagttagaattgcttgaagccctctggagttttagcactagtcccgcccactcccttctacttccaggtcgggggggggcgggtccaatagaaaggcggaagccagtgtcccaggcgttctcacgcccgcaacaattcctgagtagggccttgcttgagttcttcggaaagtctcatccacccccacatcgcctctttaggaagtcacttaatgttgggcttcattattcccacatccctttccttactacttgcctgcacttcttgagaaaaagactgcagaaaggagaggtggggctttcagtagaaacaagcaaaccgcaggtccctgtggggggactctccaggaagaaggttccgcaagaaccgtgggcgacagttatggagaagcgtctgcaggaggctcagctgtacaaggaggaagggaaccagcgctaccgggaagggaagtaccgagatgctgtgagtaggtaccatcgagctctgcttcagctgcggggtctggatccgagtctgccctctccgttacctaatctcggacctcagggcccggccctcacgcctgaacaagaaaacatattgcataccacccagacagactgctataacaatctagctgttgtgaaatagggagtgtttcccttcttaatcataaaaaggcagaacattgacctgaattgcctgaattgactcctctgcagcttgtctccttcagatggagcccgtgaactacgaacgagtgagagaatatagtcagaaagtcctggaacgacagcctgataatgccaaggccttgtatcgggccggagtggcctttttccatctgcaggactatgaccaggcccgccactacctcctggctgccgtgaataggcagcctaaaggtaagcaagaagggctttgaaatggtaaagacaaaattgtcttgctggggtggatctgtggaaagggggttttattttactttgccaatgtattattttcaataagtaatacattcacatggttgagaattcgaactgaaaaagtatacgatgaacagacctttttccactcttgtgttcttgtctccacagaaaagcagtattattagtttcatgtgtagggggttgatgcttaatcagacatacacaatatatatgttggtatgtctgtttcatatatgtatgtatgcctattctaatatataaatatatgtatatcaacgtgcttttatttataaatatacagtgtatatatttatacatatacatgaatatatatataaaataggcaggccaggtggggtggctcacatctgttatctcagcactttgggagaccaaagtgggtggatcacctgaggtcaggagtttgagaccagcctgaccaacatggagaaaccccatctctactaaaaatacaaaattagccaggcatggtggcgcatgcctgtaaacccagctactcgggaggctgaggcaggagaattgcttgaacccaggaggcggaggttgcggtgagccgagatcctgggcaacaagaacgagattctgtctccaaaaaaaaaaaaaaaaaaaaaaaaaaaaaa

SEQ ID NO: 4742 - protein, 215 aa, Homo sapien
MLNKEEELELLEALWSFSTSPAHSLLLPGRGGAGPIERRKPVSQAFSRPQQFLSRALLEFFGKSHPPPHRLFRKSLNVGLHYSHIPFLTTCLHFLRKRLQKGEVGLSVETSKPQVPVGGLSRKKVPQEPWATVMEKRLQEAQLYKEEGNQRYREGKYRDAVSRYHRALLQLRGLDPSLPSPLPNLGPQGPALTPEQENILHTTQTDCYNNLAVVK

SEQ ID NO: 4743 - DNA, 4070 bp, Homo sapien
  Unsure 2506-2799: Unknown base
tggagctcagtattcaggaagcttaatactgttttgatctacaagatccaaataattatccctatcttcagaattaacttagtctgtaatgtggcttcaaaaaaagaaagcctttgacagctacatgacttacaccatacagaacagtactggacaaaaggggtgatattttaaatttactatcccagaaacagggcaacgtttttagaaacatctttagcccaaagtaactagtaaaaataaatggagtggtatcctatcttctttttttaaggaatcaatgaataataaatgtagatagacaattttcttctggtgagctgtctaaccctttgtacacattgacatttttaatatcgtaactgatttcttgatgctagtttagctatattaggaaactgcttctacctagattgaaagaaatttgactcataaacttccaagttagaacaaatatttcttcattattgttgcttttatgtgagtagcatttccctatcttgcagttctgttaacatgaaaatggcatttttccataatagctttaaaataattttttagtaattattacaaaattaaggaaaatctctattaccgttatcttttagcattttttttttcctcagtgatctcaagattgtcttagtctcaatgagatgtagctacaaaaatggcacctcttagcagtgatgaggctcaggatatcggatatcataacaccaatgtcaggataaatatctcttctaaagacgatatttaccttttacaaggttagaaaagtctcatactacctcatctttattgtggcgcttttgtagatcactgagaagcttatcttattaaccaatataccacttcctaaatatccatctttggtgaaagaaaatagtgtggtaagagtacccatgattatagttttttatcagaatttgataagattttctgtttctgtgaaacaattattttaaatatttttcttttaaaaataactttttatcagtacagaaaaacctaagggatgactagcttacaaatattctgttaaggggtagttttataaagaaaaatgatatatagttatgttgtcttttatagtgttaaaattagtatttatatgaaagtcaagatctaagtaccttttcatataattcaaactgattgcttgtgatatgttttctctggcttttttattttttcaacttcaaggtattaacagctgttaacacttaaaaagtactgccacatatgtagccttgaagtagttgatctaataaatgagagcagggaggagattcattgactctgaaatgatttttatttttcctttggtatttgctacagtgaaaagaagtttggaaagtagatacataaagacttgagaagggaattgtttaagggaaaagaaaagagtaataattttttttaaaacattaaggaattggaattcagaaaggttacccccttcctctgtgtctttgtaaggatacatttggaagaacatacagtattcagaaactaacctatataaaatgtaaacaatatattgattgcactatataaatgagtaaattttgagaggaacaatgtgggaatgtataaatttgtctaaaattttataactgttgaacaaagggaagatttgaacagtgtaaattccagagttgagaaagcatttagcatggtggaaatgtggagagcttattggtgagagaggatggagctaagagaaataagatcaaatattaaaattaggaatttaggcattacctcagggaaaagccttgacagtgaaaagaaactacttaatcgctaatagctagtctggaccagacacttaactgcgctttgggaatcatcctgggctaatcaggaaataaacttgacttttctatttttctctgaagctttacaggacatactcccactcccatttttttctaagcctacagcatcttgattcatagtataattcctgaagtatgctgaatggactttttaaggttcctttagcatttttgtatagagttatatgtgatctttctataaccatgccattcacttaaataattcatgaagggaatggtttaatttaaaggaagacctaataggaagaagattaaaggaagcttttagtcagcctgtggctagatttattgatttggtgatcaaacctgtgctatttcctgaatttcagctaatggccaactgtggtcaaagaatggctttcagttaaagttttgacttcttattataaataatataaagaatgtctcagtaattagaaatcccttaataagtagaacaaatgtggcaagtaggactcctatcggtatacaaattccatttctttttataagaaaaacacataaaccattatcatttattcatgagccaaagccattaagaagataaatccagttatcagcttcctgtctctgaagtttggatcattttatagatccacgcaatagagagcttccttcctatgaaacaaaaaccttgagannnnnnnnnnnnnnnnnnnnnnnnnnnnnnnnnnnnnnnnnnnnnnnnnnnnnnnnnnnnnnnnnnnnnnnnnnnnnnnnnnnnnnnnnnnnnnnnnnnnnnnnnnnnnnnnnnnnnnnnnnnnnnnnnnnnnnnnnnnnnnnnnnnnnnnnnnnnnnnnnnnnnnnnnnnnnnnnnnnnnnnnnnnnnnnnnnnnnnnnnnnnnnnnnnnnnnnnnnnnnnnnnnnnnnnnnnnnnnnnnnnnnnnnnnnnnnnnnnnnnnnnnnnnnnnnnnnnnnnnnnnnnnnnnnnnnngatctaactcacgcttacttttcattaaaatatttcttgtcgcttttagctattgtcagaatccaataaacagcttacgcattcattttggtaaagcaaatttcacaggaaaatagacaaaattataagagattcctggagacaacacaaggaaaacaatgtttaaaagcaaaatagcctgtgtaatgttaggtaatgtaatgcccaagtgaataaaagatttttcgtcaagcaaactactgtttctactttgggggaaaaaagtcagttttacatttgtaatttaaggaaagaacagaaagcacaaaggtttttcttttctttattaatggcctactagaaatgagcagtgcaagagtctacctgtactattctaatacagtaagatattggacacaaaatggaggtaactttttaaaatagattggcttggaagttgaaatgtagattaatggatataacccaatagaaagggattttcaaataaaaccaaagtctatttttttatttactttctaattttgaacagatgactcagtcctaaatctttgcctttatttcctataaaatgtaggtgatacttgtaactcgacttcctggagttaattcttcagcaagaggtgaccctgggagcgtactttaaaataattgctgtacagccattgagtactaacatgatgataggttttcaaaatatctttgtagtggatgctgcataattacattcacttctcttagactgtaaaagactttcttgacttgttttaacagtagagatagcagtacaatttgaatttatggtttaggctctgcaattagaggaacaattgcagtttcctcctacccttcatatggtctgtgtaaaactgatgtttgcttaacttattttaaaagttgattacgttttcagaaaataaagataatcacttttgccatggttataatcaaatctaagctttcagacttgagagccatggtgtaaaactcaaggaggtttatttaaattatgctgactttgctagaattggataaattctgtataagccaagtatgagttcacatgtactcgaatatacagttttcacaaagctattactctcatcagtcaggcttgtatgatctattccttaccacaaaagaagtagacaattgccacttttatttctaatccttaagttgaatgtttcttcttggatgtaagttcaaataaattgatctggataaattttcatttctacttaattaaaacttcctatgtaaaatccaaaaaa

SEQ ID NO: 4744 - protein, 38 aa, Homo sapien
WSSVFRKLNTVLIYKIQIIIPIFRINLVCNVASKKESL

SEQ ID NO: 4745 - DNA, 5848 bp, Homo sapien
  Unsure 2209-2353: Unknown base
  Unsure 3073-3095: Unknown base
  Unsure 5435: Unknown base
caacattaaatttaatgaaacattaatgaagtttcgtcaagactggggacccattacttcaatttcatttcgcacagatggtcatccagtaatggcagctggaagcccatgtggccatattggactctgggatctagaagacaaaaaattaatcaaccaaatgagaaatgcacactcctacagcaattgccggactgacatttctccatagagagccacttcttgtcacaaatggcgctgacaatgctcttaggatatggatatttgatggtcctacaggtgaaggccgacttttgagattcagaatgggtcatagtgctcctcttaccaatatcagatattatggacagaatggacagcagattctaagtgcaagtcaagatggaactcttcagtcattttccacggtacatgaaaaattcaataagagcttgggacatggattaataaataaaaagagagttaaacgtaaaggacttcagaataccatgtcagtgagacttccacccatcacaaagtttgcagcagaggaagctcgtgaaagtgactgggatggtatcattgcttgccatcaaggtaagctatcttgctcaacctggaattatcagaaatctacaataggcgcttactttctcaagccaaaagagttgaagaaagatgacataactgcaacagcagtggatataacttcttgtggaaactttgctgtaattggcctctcatcaggaactgtagatgtatataacatgcagtctggcatacatcgaggaagttttggcaaggatcaagctcacaagggatctgttagaggtgtcgcagtggatggattaaaccagttgacagttacaactggtagtgaaggattactcaaattctggaactttaaaaacaaaattttaatccattctgtgagcctcagttcatctccaaatatcatgttgctacatagggacagtggcattctgggactcgccttggatgacttctccattagtgttctggacatagaaactaggaagattgtcagagagttttctggacaccaaggccaaataaatgacatggcttttagtcctgatggtcgttggttaataagtgctgcgatggattgctctattaggacttgggaccttcccttctgggtgccttatagactgctttttgttggactcggctcctctcaatgtttctatgtctcctactggagactttctggcaacttcccatgtggaccaccttggaatttatctatggtccaatatttccctgtattcagttgtttcattacggccacttcctgcagattatgtcccttcaatagtcatgcttcctggtacttgtcaaacccaagatgtagaagtttcagaagaaacagtagaaccaagtgatgaattgatagaatatgattcgccagaacagttgaatgagcaattggtgactctttcacttcttcctgaatcacgatggaaaaaccttcttaaccttgatgttattaagaaaaagaataaaccaaaggaaccacccaaagtacccaaatcagcaccatttttcattccaacaattcctggccttgtacccagatatgctgcacctgaacaaaataatgatccccagcagtctaaagtggtaaatcttggagttttggctcaaaaatcagatttctgcttgaaacttgaagaaggactggtaaataataagtatgacactgctctcaaccttctgaaagaatcaggcccatcaggaattgaaacagagctgcgaagcttgtctcctgattgtggtgggtccatagaagttatgcagagcttcttgaaaatgattgggatgatgctggacagaaagcgtgattttgagttagcccaggcataccttgcattgtttctaaagttacaccttaaaatgcttccttcagagccagtactcctagaagaaataacaaatttgtcatcccaggtggaagaaaactggacccatttgcaatcactcttcaatcaaagcatgtgtattttaaattatctcaaaagtgctttgttgtaaaaataaatttgtgactaaacaaagactttcatattaaatgggttcaattgaactcatttcttattttccaagtgtcaatgtgaaaagaaaataaatgctagcactactgactagtcagtatatctccactttaaatgctaaatactttcttgaaataaaatcgcacctcccnnnnnnnnnnnnnnnnnnnnnnnnnnnnnnnnnnnnnnnnnnnnnnnnnnnnnnnnnnnnnnnnnnnnnnnnnnnnnnnnnnnnnnnnnnnnnnnnnnnnnnnnnnnnnnnnnnnnnnnnnnnnnnnnnnnnnnnnnnnnnnnnncacctgccttttgttttgaagacttaaagaatctgctcaaatgatttattttctgagtctcttcacattaacttttatatgatttttaaaaaattattacctgcttatattttttgagtatctgtttcatataaagagatgctgcatgttcactgtgaagtattgctgaattaaattgaaaatgtcagataaaactgatacatgatgtagttataaaaatgctgttatgaagaaaaaaggaatgcttttttcctcggtggcctttgataaaaatatgaatgattgactctcagagttggaggataaactaatcatcttctagcacagccctgttgtgttgcaggagaggaatcaggctaaagtctgctggtatttcagtgacagattaaaactttctaacagtggcctagtgctttctccattgtaatgtactgaaaggaagttgttcatggatcagaaatgtgggaggcccttccttgcccaaggcaagtcgctgtagatggttaaactgataccaaggataggtaagggaaattccaaattccattggaagatggccttttactgacactgcagacatgtagataacaatagtttaatgtcctctgaaaaggtaaaaattccataaatccttgcaaacaatttttagcaatattgtttattgctaccacagccaagaatgggtatttcaaagccagggttttttttattttgtttcgnnnnnnnnnnnnnnnnnnnnnnngggctacacttttttgggggggaccttttaatttgggaagaaaatgctgagtatacttttctttcacaaccattgcaaacccaggtagccctggagttttctttttttctcatcatcattgttttgttttttttatggttcaagacttttgcaatacatgaattaaaaataagcagttctttaaagcatagcgctctaaaaactattcttagtttataccctcaaaagttgggtctttcatgaaacacagtggtttgaatatgaacaccagtagcattctcgttcgttgttagggtaagagagttttgtagaatgatctccaaaagaagcagtcctcaaaaggcatttaccagtgatatcttttaatattcatgtttttatttaatgatgtaagatagaattaataaactactaaggaaataagccaatgtggttattgtactcaatttcgtttttcttttagaaatgtgtattgacttattaaagccactgacagaaatgttaatcatgacttaagttctaatttaaaaaactattttcctctttcctaaatactatattctaaattggaatatggcaaaatcccaatatataattctatacctagtaaagattgtaaataactaaaacaaaatgataagagctgtgaactgaaattgtattgcttacagaaatcatgaactgaattttcttctctttttaaagtgagcataaagacttaagtgtattgttaccagagatatatttagatagtatacatcattttggcaggtaatcttctagaacctttcatgtactgtttccatcaagggagggaaagaaatagaaaatataattttatctatattttccttaaaatatatcaatctgtgcacactctttcagttttttaattactcatgtaatatatgactacattttgcttgtgtgctttttgaaaaccatcttcagtcccaatatcctctgtagaagtaatagttttaactctcctagatcttcttttagagtgtttttatgagtgtttaatgtaggaatgtgtatatattatctacagccacaggaaatgtatagttacgatttttacatacgtgtatgtatattattgtacaacttgctatttctacttgggagttttttattttggtacattcacatttacctaatctcttgtgcactgtccaacagtactttgcctataatagacacttaaggaagttttccttctttttattcctttataattacaaacaatgctgaaaggaacatcatcctacatgagccctttttgtacatataaggctctctctgtggtatatgcttaggatttgaatttcaggccagagtataaccatttttaatttgaagagatacttccatttgggttccagaatggctgtatcaagttacagttcccctgagcaagatatgagcatctgcttccccatgtaattaatgacacttgctattggatttttgtaatttaattactctgaaaaaattattttggttttaaatcagaaatttctcactagtgaagatggacatatttttgtatgtttattttagaacatataaacatttgttaattttctttttcctctcatttttctattgaatgatttgtccttttatctcatggatttgttaggagttctcttgtattttctgtattttatgtctgttgccaatgttttctcctacttagccatttggctttaattttacatggtgtctgtttaaataaatgttttatatttgtatacaatcaaattgattaattttcatgacttatttcaggatataaagcaaattattttctaagacatttacagtgtatgttttcctatgtttacatgtgctcatttcacgtcatgtattttcctctacgacatgtttctgtgtgagtagttaacatgtagatctttagaattgatttttctgaagagtgaaacagcgctgcttccaatatctgttcaaaattcatttattgaaaagtccactcatatgtctgatttgaaatgctgtttcattatgtgttaaattctttcactgagctcttccatattcctagtaaatgatgcattactttggtatgttctcagatttgggtaaagccttcctcatgttctataaaaattggttaactgctggtgagcacatctcttgaagttttgatatgggttgcacaacatttataggactgatttggagagaccgacaataccgagtgcagtcctcccttggtatctagttccaggacccctgtggataccaaaatccaagcaatgccctgcagatcatgggacctatgcatatgaaaagtcggtccttgtatttganggttttgcatccctcaaataccatatgttttatttgtgtttggttgaaaaaagtttgcatataagtgaaacttagcatttcaaacctgtgttgttcaaagatcatttgtatttctcttcaagaacaatgaatgtcttcattaaatcatcttttgtgggagagcttttggtttcatagattttcatatatatatatgatataataaacactttttgacattctgggagttttacttttgttactataaggaaatatccttttctaatgcatgttataattggttgtttctgtttgtggtaaaatgacttaattttgatattccaatccgtcatgacactgcagaaccctttgtcaatacagtcttactagaaaatccaagagaattctatcttctgcaattgatgagactgtat

SEQ ID NO: 4746 - protein, 406 aa, Homo sapien
MHTPTAIAGLTFLHREPLLVTNGADNALRIWIFDGPTGEGRLLRFRMGHSAPLTNIRYYGQNGQQILSASQDGTLQSFSTVHEKFNKSLGHGLINKKRVKRKGLQNTMSVRLPPITKFAAEEARESDWDGIIACHQGKLSCSTWNYQKSTIGAYFLKPKELKKDDITATAVDITSCGNFAVIGLSSGTVDVYNMQSGIHRGSFGKDQAHKGSVRGVAVDGLNQLTVTTGSEGLLKFWNFKNKILIHSVSLSSSPNIMLLHRDSGILGLALDDFSISVLDIETRKIVREFSGHQGQINDMAFSPDGRWLISAAMDCSIRTWDLPFWVPYRLLFVGLGSSQCFYVSYWRLSGNFPCGPPWNLSMVQYFPVFSCFITATSCRLCPFNSHASWYLSNPRCRSFRRNSRTK

SEQ ID NO: 4747 - DNA, 2518 bp, Homo sapien
gtggggtttgcagaggagacaggggagctttgtgtacccggagcaatgaacaagcggcgacttctctacccctcagggtggctccacggtcccagcgacatgcaggggctcctcttctccactcttctgcttgctggcctggcacagttctgctgcagggtacagggcactggaccattagatacaacacctgaaggaaggcctggagaagtgtcagatgcacctcagcgtaaacagttttgtcactggccctgcaaatgccctcagcagaagccccgttgccctcctggagtgagcctggtgagagatggctgtggatgctgtaaaatctgtgccaagcaaccaggggaaatctgcaatgaagctgacctctgtgacccacacaaagggctgtattgtgactactcagtagacaggcctaggtacgagactggagtgtgtgcataccttgtagctgttgggtgcgagttcaaccaggtacattatcataatggccaagtgtttcagcccaaccccttgttcagctgcctctgtgtgagtggggccattggatgcacacctctgttcataccaaagctggctggcagtcactgctctggagctaaaggtggaaagaagtctgatcagtcaaactgtagcctggaaccattactacagcagctttcaacaagctacaaaacaatgccagcttatagagatctcccacttatttggaaaaaaaaatgtcttgtgcaagcaacaaaatggactccctgctccagaacatgtgggatgggaatatctaacagggtgaccaatgaaaacagcaactgtgaaatgagaaaagagaaaagactgtgttacattcagccttgcgacagcaatatattaaagacaataaagattcccaaaggaaaaacatgccaacctactttccaactctccaaagctgaaaaatttgtcttttctggatgctcaagtactcagagttacaaacccactttttgtggaatatgcttggataagagatgctgtatccctaataagtctaaaatgattactattcaatttgattgcccaaatgaggggtcatttaaatggaagatgctgtggattacatcttgtgtgtgtcagagaaactgcagagaacctggagatatattttctgagctcaagattctgtaaaaccaagcaaatgggggaaaagttagtcaatcctgtcatataataaaaaaattagtgagtataaaatggtggcaaatctactttgtttaaaacagtatgaatgcctattctcagatcactacatttaaggcattagaaacttttaaaaagttatcttaaaaatatacataaaatttgaacaacttaaaaattgaactaatttctaaaatatatcctataattatataatacacagacatttgttaccatctaagcattttgtatatgaaaaaattatgcaatttacaagaaaatattttacaaaataatctggaatacttgctaaagctgtataaaaagtatactaaattttaggctgggcgcagtggttcatgtctgtaatcccagcacttcgggaggccaaggtgggcagatcatttgaggtcaggagtttgagaccagcctggccaacatggtgaaaccctgtctgtaattaaaaaaatacaaaaattagccaagtgtggtggcatgcgcctgtaatcccagctactcgggaggctgagtcagaagaattgcttgaacccaggtggtggaggttgcagtgggtcaagattgcaccactgcactggcacggagaagcgagactcctttgggggagaaaaaaacatactcaatttaaaaaatttaatctatatttgacaatgtagcctaaggtgcccattagttgatacatcattatagggcaagtgaaattctagattaattcttgaacagaaataagattaagctgtaaatatatttagacttttcactgcctgatcttgaatatcagtttcttttggaaaggagaaaatgcaacttttctggccactgttaacaactgcaatctaaaattttttacatcaaatattgtaaaaagttaaatttccaagacaaagaccaagaacagtatcattactttgcaaaggaaagaaatataaagaatacaacttaaaattaacctgtggatctgaaatataaaatgttattaaaaataaattaatgttaaggctagaactgaagattatagtaaccggaacaattatagccatttattgcaaagtttggaagatatcaagcttagtaacattctgttcatttgcataaatgtcatgcagaacaataacaagtagcactgttgaaaaatatagacatttattataaaatcaattggtttgataagaaagcaattatttaaaaagtttaatacaaatacatgttaagtgtacaaattaggattcttttgggcaaacaagttgttatctaaagaagaagcaaaacctccttaacagttgtaataaaacctatgcctgaaaagttggtggctattaaaaaa

SEQ ID NO: 4748 - protein, 372 aa, Homo sapien [sequence omitted]

SEQ ID NO: 4749 - DNA, 3555 bp, Homo sapien
tttattcctactttattgcagcagtattgaaagtttttaaagaatataaccgtgtgtgttggtaacagacagaagaatggaagcattccaggaacttcgtaaaccatcagcacgtttggagtgtgaccattgcagtttcagaggcacagactatgaaaatgtacaaatccatatgggtaccatccatccagaattttgtgatgaaatggatgctggtgggctaggcaaaatgatattttaccagaaaagtgcaaagttatttcactgccataaatgcttcttcaccagcaagatgtactctaatgtatactatcacatcacatccaaacatgcatccccagacaaatggaatgataaaccaaaaaatcagttgaacaaagaaacagatcctgtgaaaagccctcctcttcctgaacaccagaaaataccctgcaattcagcagaaccaaaatccatacctgccctttcaatggaaacacagaaacttggttcagttttgtctccagaatcgccaaaacctactcctcttactcccctggagcctcagaaacctggctctgttgtttctcctgagctacagacacctcttccttctcctgagccttcaaaacctgcctctgtttcttctcctgaacctccaaaatcagtccctgtttgtgagtctcagaaacttgcccctgttccttctccagaaccacagaaacctgcccctgtatctcctgagtcagtaaaggctactcttagtaatcccaaaccccagaagcagtctcatttcccggaaacattggggccaccttcagcctcatctccagagtcaccagttctagctgcttccccagaaccttggggaccatccccagctgcatctccagaatctcggaagtcagcccggactacctcccctgagccaaggaagccatccccttcagagtctcctgaaccttggaagccgttccctgctgtctccccagagcctaggagaccagcccccgctgtgtcaccaggctcttggaaaccagggccacctgggtcccctaggccttggaaatccaatccttcagcatcatcaggaccttggaagccagctaaacctgctccatctgtgtctcctggaccttggaaaccaattccttctgtatctcctggaccttggaaaccaactccatctgtgtcttctgcatcctggaaatcttcatcagtctcacccagctcctggaagtctccccctgcatctcctgagtcatggaagtctggcccaccagaactccgaaagacagctcccacgttgtctcctgaacattggaaggcagttcccccagtgtctccagagcttcgcaaacccggcccaccactatccccagagatccgtagtccagcaggatctccagagctcagaaaaccctcagggtcaccagatctttggaagctttctcctgatcagcggaaaacttctcctgcttcacttgatttccctgagtcccagaaaagttcccgtggtggttctcctgatctctggaagtcttccttttttattgagcctcagaaacctgtcttccctgagacccgaaaaccaggtccttctgggccatctgagtcccccaaagcagcctcagatatctggaagcctgttctctctatcgatactgagcctagaaaacctgccctgtttcccgagcctgccaaaacagcccctcctgcttctccagaagcacgcaaacgtgccctttttccagagccccggaagcatgcccttttccctgaactccccaaatctgctctattctcagaatcacagaaggctgttgagcttggtgatgaactacaaatagatgccatagatgatcaaaaatgtgatattttggttcaggaagaacttctagcttcacctaagaaactcttagaagatactttatttccttcctcaaagaagctcaagaaagacaaccaagagagctcagacgctgagcttagtagtagtgagtacataaaaacagatttggatgcgatggatattaagggccaggaatcaagcagtgatcaagagcaggttgatgtggaatccattgattttagcaaagagaacaaaatggacatgactagtccagagcagtctagaaatgtgctacagtttactgaagaaaaagaagcttttatctctgaagaggagattgcaaaatacatgaagcgtggaaaaggaaagtattattgcaaaatttgttgctgtcgtgctatgaaaaaaggtgctgttttgcatcatttggttaataagcataatgttcatagcccttacaaatgcacaatctgtggaaaggcttttcttttggaatctctccttaaaaatcatgtagcagcccatgggcaaagtttacttaaatgtccacgttgtaattttgaatcaaatttcccaagaggttttaagaaacatttaactcattgtcaaagccggcataatgaagaggcaaataaaaagctaatggaagctcttgaaccgccactggaggagcagcaaatttgataacacagtgtgaatatttgttctacaaaggtgtttgttggaaccattctttgtaagtatagcttatcagatagcatagttggatcagtagatgacatgtatggtgtaccgtgtttcactgtctcagttgtgttactaagaatgagcatttgatcatttttttctggtctctgtctatgtgactatcttgtaagtcaataaatttctgtatagtccagatggattaaacttctcatttcttttaaatatgtatgaataataatacaaggaagtaggcattccatttaataatcaagagcaagttgtactcaaagcattcagttaaagtgtatctgtgtgtggaactaatttcagacaatagaaaatattagttgaaatgtttaagaattaggcatgaaaaataaatttgagaaattttgtttccttacatgtatttttaaatcataagagttattttctatctgatgtaaaattagtttataaatcttaatcagcttctagatgtttattagcttttatgtcatgaaatgttggagtctcagggttgctgattttctgctaatgggaaaaattgactaagtctttaaaatagtttgcagccttctcccacaggagacaagtgaaagataagtgtgattttagatctttcttgtccatagttgttttcagtggagtcttccattctgtatcttaccctaagatctggttcttccctccccatccccaccccccacccaccgcctgccagctcacactaatagatgattcttaattgccaaatgtgttagagtttgtatatcctactcctgggccttacatgtcgcctgttggggcttaagaccaggttgataagtaggaactgaaagtcttccagattcacagtagaaaattttatagacatttctgttaaagaaatatatcgattttatgtttttcaattatgttactgtaaataccttgtacctgttcatggattattttattctaaaatattttgtcaaatgtgtatcaaccaaattaaaaagaaaggttttcatgtc

SEQ ID NO: 4750 - protein, 821 aa, Homo sapien
PCVLVTDRRMEAFQELRKPSARLECDHCSFRGTDYENVQIHMGTIHPEFCDEMDAGGLGKMIFYQKSAKLFHCHKCFFTSKMYSNVYYHITSKHASPDKWNDKPKNQLNKETDPVKSPPLPEHQKIPCNSAEPKSIPALSMETQKLGSVLSPESPKPTPLTPLEPQKPGSVVSPELQTPLPSPEPSKPASVSSPEPPKSVPVCESQKLAPVPSPEPQKPAPVSPESVKATLSNPKPQKQSHFPETLGPPSASSPESPVLAASPEPWGPSPAASPESRKSARTTSPEPRKPSPSESPEPWKPFPAVSPEPRRPAPAVSPGSWKPGPPGSPRPWKSNPSASSGPWKPAKPAPSVSPGPWKPIPSVSPGPWKPTPSVSSASWKSSSVSPSSWKSPPASPESWKSGPPELRKTAPTLSPEHWKAVPPVSPELRKPGPPLSPEIRSPAGSPELRKPSGSPDLWKLSPDQRKTSPASLDFPESQKSSRGGSPDLWKSSFFIEPQKPVFPETRKPGPSGPSESPKAASDIWKPVLSIDTEPRKPALFPEPAKTAPPASPEARKRALFPEPRKHALFPELPKSALFSESQKAVELGDELQIDAIDDQKCDILVQEELLASPKKLLEDTLFPSSKKLKKDNQESSDAELSSSEYIKTDLDAMDIKGQESSSDQEQVDVESIDFSKENKMDMTSPEQSRNVLQFTEEKEAFISEEEIAKYMKRGKGKYYCKICCCRAMKKGAVLHHLVNKHNVHSPYKCTICGKAFLLESLLKNHVAAHGQSLLKCPRCNFESNFPRGFKKHLTHCQSRHNEEANKKLMEALEPPLEEQQI

SEQ ID NO: 4751 - DNA, 4699 bp, Homo sapien
cagggctggcttttttttttttaataagatagctggtgcccaagattgttttccaccttaaggataaaacctgttaagaaagcctgaacaattacaaaaaaggaagaaaaggagacttggccaactggtgtcaggagtcttaacaaggtcatagtttgccagcccctgccctaaacaaataattcttgaatgcctactgtggtgtgtaagatatgagtaaataccagggatacacagagaacaaaagagaaaaactgctattcttgtgaaacttggaagttggaggagacttggaagatgcagaactggatgactactcattctcatgctatagccagttggaagtgaatggatcgcagcactcactgacctgtgcttttgaggacccagatgtcaacaccaccaatctggaatttgaaatatgtggggccctcgtggaggtaaagtgcctgaatttcaggaaactacaagagatatatttcatcgagacaaagaaattcttactgattggaaagagcaatatatgtgtgaaggttggagaaaagagtctaacctgcaaaaaaatagacctaaccactatagttaaacctgaggctccttttgacctgagtgtcatctatcgggaaggagccaatgactttgtggtgacatttaatacatcacacttgcaaaagaagtatgtaaaagttttaatgcacgatgtagcttaccgccaggaaaaggatgaaaacaaatggacgcatgtgaatttatccagcacaaagctgacactcctgcagagaaagctccaaccggcagcaatgtatgagattaaagttcgatccatccctgatcactattttaaaggcttctggagtgaatggagtccaagttattacttcagaactccagagatcaataatagctcaggggagatggatcctatcttactaaccatcagcattttgagttttttctctgtcgctctgttggtcatcttggcctgtgtgttatggaaaaaaaggattaagcctatcgtatggcccagtctccccgatcataagaagactctggaacatctttgtaagaaaccaagaaaaaatttaaatgtgagtttcaatcctgaaagtttcctggactgccagattcatagggtggatgacattcaagctagagatgaagtggaaggttttctgcaagatacgtttcctcagcaactagaagaatctgagaagcagaggcttggaggggatgtgcagagccccaactgcccatctgaggatgtagtcatcactccagaaagctttggaagagattcatccctcacatgcctggctgggaatgtcagtgcatgtgacgcccctattctctcctcttccaggtccctagactgcagggagagtggcaagaatgggcctcatgtgtaccaggacctcctgcttagccttgggactacaaacagcacgctgccccctccattttctctccaatctggaatcctgacattgaacccagttgctcagggtcagcccattcttacttccctgggatcaaatcaagaagaagcatatgtcaccatgtccagcttctaccaaaaccagtgaagtgtaagaaacccagactgaacttaccgtgagcgacaaagatgatttaaaagggaagtctagagttcctagtctccctcacagcacagagaagacaaaattagcaaaaccccactacacagtctgcaagattctgaaacattgctttgaccactcttcctgagttcagtggcactcaacatgagtcaagagcatcctgcttctaccatgtggatttggtcacaaggtttaaggtgacccaatgattcagctatttaaaaaaaaaagaggaaagaatgaaagagtaaaggaaatgattgaggagtgaggaaggcaggaagagagcatgagaggaaagacagacaggaaaataaaaaatgatagttgccattattaggatttaatatatatccagtgctttgcaagtgctctgcgcaccttgtctcactccatcctgacaataatcctgggaggtgtgtgcaattactacgactactctcttttttatagatcattaaattcagaactaaggagttaagtaacttgtccaagttgttcacacagtgaagggaggggccaagatatgatggctgggagtctaattgcagttccctgagccatgtgcctttctcttcactgaggactgccccattcttgagtgccaaacgtcactagtaacagggtgtgcctagataatttatgatccaaactgagtcagtttggaaagtgaaagggaaacttacatataatccctccgggacaatgagcaaaaactaggactgtccccagacaaatgtgaacatacatatcatcacttaaattaaaatggctatgagaaagaaagagggggagaaacagtcttgcgggtgtgaagtcccatgaccagccatgtcaaaagaaggtaaagaagtcaagaaaaagccatgaagcccatttgatttcatttttctgaaaataggctcaagagggaataaattagaaactcacaatttctcttgtttgttaccaagacagtgattctcttgctgctaccacccaactgcatccgtccatgatctcagaggaaactgtcgctgaccctggacatgggtacgtttgacgagtgagaggaggcatgacccctcccatgtgtatagacactaccccaacctaaattcatccctaaattgtcccaagttctccagcaatagaggctgccacaaacttcagggagaaagagttacaagtacatgcaatgagtgaactgactgtggctacattcttgaagatatacggaagagacgtattattaatgcttgacatatatcatcttgcctttcttggtctagactgacttctaatgactaactcaaagtcaaggcaactgagtaatgtcagctcagcaaagtgcagcaaacccatctcccacaggcctccaaaccctggctgttcacagaaccacaaagggcagatgctgcacagaaaactagagaaggggtcataggttcatggttttgtttgagatttgttgctactgtttttctgttttgaattttcttctttgttctgtttttactttatttagggggactaggtgtttctgatattttagttttcttgtttgttttgttttgtgttgtctgtgaatggggttttaactgtggatgaatggaccttatctgttggcttaaaggactggtaaaatcagaccatcttattcttcaggtgaatgttttactttccaaagtgctctcctctgcaccagcagtaataaatacaatgccataatcccttaggtttgcctagtgcttttgcaattttcaaagcacttccataagcattccttccacctccttgataggcatttatggaaagcctgctacatgtcaatcatactgttaggcacaggggacctaaagacacataaaaggatggcattctgcctcataaattgcaaaacctaatgaaagtgactgcttggtaaacaaattattattatattataaaatgctataaaagagccatattgaaagtgccctgttggagacagggcaaatgccacaaaaatgatgtaaatttacatggaggaaaagtagaatctgcctggtttgtaggcagcagaagacatttttcatcagtgggcaggtgttctttaccttttgtagaaatgggagtcaagtctcaaataggaggctccacaaaatctcatgccaggtctctgataccttattcacagaagttctttgaagtatttattgttattttctttgacttatgggaaaactgggacacaggaagacaggtaaattacccaacctcacacgttaagtcagaactgggagccataattttgtatccctggtataaatagacaatctcttgaagaaatgaagagatgaccatagaaaaacatcgagatatctccagctctaaaatcctttgtttcaatgttgtttggcatatgttatctttggaatttagtgtctgagcctctgtctgttactgtagtatttaaaatgcatgtattataatcatataatcataactgctgttaattcttgattatatacctagggacaatgtgtaatgtaagattactaattggttctgcccaatctcctttcagattttattaggaaaaaaaaataaacctcctgatcggagacaatgtattaatcagaagtgtaaactgccagttctatatagcatgaaatgaaaagacagctaatttggtccaacaaacatgactgggtctagggcacccaggctgattcagctgatttcctaccagcctttgcctcttccttcaatgtggtttccatgggaatttgcttcagaaaagccaagtatgggctgttcagaggtgcacacctgcattttcttagctcttctagaggggctaagagacttggtacgggccaggaagaatatgtggcagagctcctggaaatgatgcagattaggtggcatttttgtcagctctgtggtttattgttgggactattctttaaaatatccattgttcactacagtgaagatctctgatttaaccgtgtactatccacatgcattacaaacatttcgcagagctgcttagtatataagcgtacaatgtatgtaataaccatctcatatttaattaaatggtatagaagaac

SEQ ID NO: 4752 - protein, 296 aa, Homo sapien [sequence omitted]

SEQ ID NO: 4753 - DNA, 478 bp, Homo sapien
  Unsure 59: Unknown base
ttctcttctagtgatgtggcacggtgtccgtgagcttgtgactgcagcgatacgctgcnttgtggcgtgtcggccaggtggcgactacagcagggactggctgccaacccctccggctacgggccccttaccgagctcccagactggtcatatgcgggggtatgatcctgcttaattggataattggtgactgaggaagatggtgaagattttttctacttgttatttactatggccgccctgctcccccaatgaaaggccagcttcgaagaaaagctgaaagggagacgtttgcagtgagtgagacgagttgtactgctgtcacaggaaatggacgctggattacaagcatggcagctcaggcagcagaagttgcaggaagaacaaaggaagcaggaaaatgctcttaaacccaaaggggcttcactgaagagcccacttccaagtcaataaaaagcaactcctgcctcccttcctc

SEQ ID NO: 4754 - DNA, 3748 bp, Homo sapien
ggtctcttaaaaaaaagggagtaggggaggaggtggaggatccctaaagaattcttaatgaggtgatataatcattgtagtccatgacaaaatggaccagccaggtttgcatagcagtagacatattcctactgtacatttatccttcccaaatatgtcacattctaaaatagttgacaaattattttgtggaaagaggaagaagctggattggagtgggagatctaatctggaggagcaaagaggtagttgtttattgctatgttcctggcccatcaaatggccactttccaaactgacccacattttaggaaataaaccaatctggacctgtttcaaaaggatagagatgcttttagattgtcaattctcacttttaagttaaacaatcacaaatatctttagaaatagggaaagacatttgcttcaaaatcaaagaatgagtgtggatctttttaatttttttttgtttcaagtcctacagtcatcttacatttagaccttcatggtagggtgatatgagtgctaaaaaaatttctttctagtagccaggaaacagatagataagataaaagcaaatgttccagatttaagacttcttaggatgagtacaaggaagagagaaatagtatggaaaggacattttttagcaatttataattttaaaatggaatttgccaaacaagggagaggaaaaaaagtcaaaggggaatttttatctcaagatatttagatatggtttataaaaaaataatattttctaccactaaaaacactggtattatctcagcatcatgggcaatttttctttattacatgccaatatttgtacaaaaagggcccccaaatgtgtgaaatataatcctaaaaaagaaaataattggaacacatggatctgttacaattctacacagggggaaacaagctaagcaaagaaaaaaaatctgaaatgaaaatctctgtatcaaaatggtttcctgtatcttttaattgagaggtaaactttagctcctaataacagttttatagaccgttctcttcccaaattcctaatgctttgaatctatttgtgccatgattaagtgtgctggataatttcctgctcatattctagcctcagttcattcccagtcatcttagagatcatagtagctcttggccttagaaagacttgggtttgctgtgtttaaaagtcataagggttttattttgtatcatcaaaatattctataaggtcccaaatactctttttcaacccatgaacagtaagaatttgtgaattctgataatgaaaaaagttttcctccaggtatgtttgtttcacattcagtcctaaagccttgagctatgtgtacttccctcacacaggaacaccagctgtcctgtctgtgctctgcctgcgcccaaaactcaatattttctctcagcacagaagtcaaaaatgagatatgccccttataaaaccccttcgattcctgagaaaacataataaagccatatgttgcttccttgttggggctcctccacaatgctcccaacacctgtgacccctaggaagacagggagcaaggtggatctggccaggagtcacaggatatacacccattctggagctttcctctgttgttctagaagatgttatttgattagttggggctgggagcaggggatatatgattttgtggaaaaggtatcagataatcaaatcaggtctgcctctgctatagccagtgtgctgctgcattaaaagggaacaaaaggaaggtgcaacgtaagagcagacacaacctgagatgcccttgagatttaggagaacaggagggcgccctttctgttgtgacctgactcttaaaagaaatcttctaaaagaattctttaatttggtaatgagttgaagtccagggtaatggaagctctagggcagagaacaaaagaattgcaaaatgtattcagcaccaaacaatgctaaaccaagaaacatccaatcacaaaactaggaagtttggcaagaagtggttagagaaatctctgggcttttccatgggcagggtcgacagactctcttttcagtgatttctggctctgagaaacctctttactcactagaaaagaactttatttaaatggccaattttgttcctcagaaaaagaaattaaaaaaaaagaaaaataggatactgaagacagaaccatgtgacttggtgacaaacaaaaggaggggtgcactagaatttcaataggctccctaattccatagaaaaagcaaagcaacccaatgcctcctgagcctgcagtgcatgaagagagtgcttgagctgacccagccaccaggccttctggggctagacataacttcccactggaacagcagcagcctctttcccctctttgtgttttcatgaagaaaacggctgttctcttaggtagccaggaaatagattacatggggcaaactttcaaaagcaatctctaccctggtgctcaggctacatacagaggcagaaaaggggcacggaagagcccttgctcttgagagagagtattttcatattcccaagggctttccgtgtagagttgctatttctgatatcacttaaacctttacaagaaaaaaggctgtggtgactcagtgttcctataaattcagaatgtggaaactactaatccaaagcatcatttctagcactgagtatcaagacgatcagcctgaccaaaatattgcaaagagttttctaagtctctgaagatttttttctccttgaacactgagtctatagcagtcagcaatgtaccttagccgatccctgggaatggttatggaacagtagggcttgtttccatcctttttagagtgaagagatagaaaattagggctacctagtgtgggttctttttcagaactatgtattttctcctcactgcatgatgggtaaaaatgccctgggttgaaacaagaaacattatctttccacaccactgactaaaacacctgccagtggtttctttaggctccaccttttgctccgtaaactgtagactttcagactgaaatctaatcttaagtgacctcaattaaggtattttcacaaaaggctacttatagtgtagcattattgccttaaatcagaaagccctgggaagaggataaaagatatagaaatgagaaggctctgaagttataggcatttcttgctgtttaatagttacattatcacaaaaacaagccctattcatgattgaggactatggaaatagtgacttcttgaggaggcaccaaactttcctagaactgggtactctcagatagtggctgctatttcctattctatttcagtgacgtaggttggggctgaatgtaaaatagacatcatattactaaatagaatcctataaaatgcaatcacaggtgcccgggagtactagttttaaacatttccttaacaaggagaacaatccagcaaaaagctttctttctctatacagtgtatatctctaaactttttttcctcagttttagagaacatctgttttatctggtggttctttgtttgaatgcaaactcataactttcaagtctccggtgcaagagcataatctacagatcatgggcaaaatctagccacagtcctgagagtccaggcttctgggatgcccagctgggtataaaagtccctactaaccctgtttcaaattcagaggtttctttggtttagaatgcctcaatgagattttgatacatccaagagag

SEQ ID NO: 4755 - protein, 14 aa, Homo sapien
SLKKKGVGEEVEDP

SEQ ID NO: 4756 - DNA, 2459 bp, Homo sapien
cggctcgagaataaaactgctcaacagttaatcagcagtgaatcatcttgcagctatgcaatttaaaaaaaatacagattaccagtttcaagtgctgccagctaaaataactgttttaacgggtatcttttgtttgttcttttcacttaattattttattgtgctttgcatctccaggcagttctctcacatttgggtaaaatgtttagcaggctgtaaacttaagaaaagggtaaaataaaattttctggagaggaacttggaatttgagggagattttatatacctttaaaaactgtaatttaattgggatgccaggtttatagcaatttgcaactttaattttccagataatctggaggttagcatttgataaatgactttttaaagtagatatgaagattttgttaatttataatttattcatgtgttattactgtaattgaaaatgttatagacacttttaaattcagtttgtgtagaaagaaatgtgttaaacaaaattatgttaataaatattcccacataatacatctgaatggttaaaaatactggaagagttgtcagggctacaatagtgaatgtccttttttttaatatcaaaaatatcgataagtaggttttgtgttttcaacgtagggaaaatgttatcagtgaataggtggtgtactttacttggtataatttaaagttgcacagtaagtactgtttccttattttaatctttctttactcataatgtatttaagaatttgctgttttatttaacgctgctactcttaatcttctctaaatttttccccctactttcttgcttctgtttcacattttttaaaagggcaagtacaggagcaactgctgctacccagaaaaatgtgtgtattataaataattaaagagtttttaattgctttctgtatgattccagctcagataacattttccctgaagttatgctgtgaaatgccttttgttatgctgcaattgctaaaggaatccaaaacctccattgtgacagctgaaggcacagtttaataggtgcttttttactagttatgaaaaatattcgtcccttaaggaaacgattctttttctgtttttttctgttaccatgaagtcttaatttgatttcattttatttcacatttttgattttgtaagctttcataccctcctgctcaaccccctcaagtaaaacctcttagaatgtgaataattggttcattttctattgctggtatactcttgtgatgagaattattttgttgtcttccattcttaaaggaagagatttattacagctgtggggattaactgtattctcctggaagttgattttctgataggttaatgcaaaagtcattgcaaaaactgctattacttttgcgccaatttaatagttcacttgtttactttttaacctatattggcttaaattcactttttagcccctctttgtcataaggttctgtgctgcatttgctacaatagaagctcctatggttttaaagaaagttcagtgttttgtcagtgtcaagtgctacttgatgattatatttgtctggaacagtattcacttaagtctgtttatagcaatcccttttttgacaaaatttacaaagttggcatttttactttaaattccatctctatcagtgacttcctaaaaagagcaacttagaaattgggggaaaaatgtttttaaagcccaaatgctccagtttttattcaaagtcaaagtcgttattctggaaaatacaagtaatgttctatataatgtcacttaaaatattcgtaaatctattttgcaaacactgaatagtataagtaagatataaaatcacaatagatatttaaatactaagctgaaacttctgacaactaattattatgggggacacaataaagattgaaagcctaggttaccaagttggttttagctttctagaatctttgtaaatactcacgttcaaataagatcacacgtgcatatatagaaagcaatatgttctgaaatttcactttagtgccactgtttgtccataatggatttattgccaattttgaatcctcatcttactttgatctggctttttttcccccccttgccagaatgtttaggagaaagtaaaattattccgttttactttggctttttgccagagatacaaactaagaatagtctgaatatgtgtttttcagatctggttacaagacggattatagattgtgttttagagcaatgttgtgattgaaatataaataatggtataacttttttgtgttagcaaaaacaacattaaaaaggttatgttacataatatgtaggttttggtttcttagtgcaagacttatatttctcttaaatgttgtataattatttcagttttcactcactagctactttactaaaatgtagccccaaaatgacgggccagcctcagcgtatctgcatatgt

SEQ ID NO: 4757 - protein, 30 aa, Homo sapien
MLYNYFSFHSLATLLKCSPKMTGQPQRICI

SEQ ID NO: 4758 - DNA, 5188 bp, Homo sapien
  Unsure 3801-4077: Unknown base
tagcccaactgccaatactactggtactgctactacttcctcaaccactgtgggtgcagttaagcaagaacctctccactctacttcatatgcagtaaatattctggaaaatataagctcttcagaatcctcaaagcccattgaacttgatggtcttccttcagaccagtttgcaaaaggacaggacactgttgccatagaaggttttacagatgaggaggacacagaaagcggaggagaaggccaatacagagagcgtgatgaatttgtggtaaagatagaagacatagagacttttaaggaggctttaaaaacaggaaaagaacctccagctatttggaaagtacaaaaagctttattacagaaatttgttcctgaaattcgagatggtcaaagagaatttgctgctacaaatagttatcttggatattttggagatgcaaagagtaaatacaaaagaatatatgtgaagttcattgaaaatgcaaacaagaaggaatatgtcagagtgtgttctaaaaagccaagaaataaaccttcacaaactatcagaactgttcaagctaagccaagtagtagcagtaaaacttctgatcctctagcatcaaaaactacaactacaaaagccccttccgtgaaacccaaagttaaacagccaaaagtaaaggctgagccaccaccaaagaaacggaaaaaatggaaagaagaattttcatcatcccaatctgactcatctcctgagatccatactagtagtagtgacgatgaggaatttgaacctcccgctccctttgtcactcgctttttgaacacaagagcaatgaaggaaacctttaagagctacatggaattgcttgttagcattgccttggaccctgacacaatgcaagccttagagaagagcaatgatgagctacttttacctcatatgaaaaaaatagatggcatgctaaatgataaccgaaagagacttcttttgaatcttcatttggatcaatcattcaagaatgctttggaaagttttcctgaactaacaataattactcgagattctaaagcaaagagtggaggaactgctatttctaaaatcaaaatgaatggcaaagcctataataagaaaactctaaggacttctaaaacaaccaccaaatctgcacaagagtttgctgtcgatccagagaaaatacagttgtattctttgtatcattcactccatcattataagtaccatgtttatctgatatgtaaggatgagatttcttcggtgcagaaaaaaaatgaagatttaggacaggaggaaattgttcaactttgtatgaaaaatgtaaaatgggtggaggacctctttgaaaaatttggagaacttctaaatcatgtacagcagaaatgttcctgacttttccacaaaaatcccatctttttatagcactaatgaaatggcagatatggggtggtcaaagataatcagatgtcaagtagtggccttctgcaggccggccgcttccatcatggaactgtcattaccacctctgctgaaggacagtggtgcggcctttaggaacgaagttagtcctctggaaatggacctaaatcccaccacatttttaccctaatgaatgatttttctattttgtaaaccattgggtaacttgagtcatattttcagaaacattttttgacaaatgatgaagcatgcactaagtataatttttttttattgctagagaagtaacacttaaagtaacgattttttttttctgactccggctaaacaccagaatgacagagaagtggcagaaaccatatgtttgtactcacatctggccacaaaaccagaaatactgtacattatgtaaagaggtctggtgtggtgtgacatcctgtataagaatatcatcaatttaaaatataaaatttggaaactattctgctttacagactccttttactcttaacatgttcaggaaactggatgtggaattggtgcaattctctgactgctttttgtgtcaaattatattgtgataaaaaaacaatgacatactattttccctatcgcaaagaaaagtattttcgtttatactgttttttcctttggaaaattttcaattgtacattttatttcactgatagttgtatttttcacaaggaaaatgttgtggttataattacgtttgatatatctctacaacaccttttgttattttcagtaaatcttagttatatgttgaatttctaatgtgaattctatcttgaggtaaccatttttttcatacagatttgcttcagtgttatccagaatatgcattcagtactagaattagtttagctttataaatagggctgtgttagacactgcagtaattttctaattcataaaataaacttcttactaaactagcacttgattaacttgttgaggtaaaaatctaactacatttacattttgaagaataaaactgataattagactatttgcagtgttaaacacagcttccttaactcttagaactggaagttgtagagctctccttttggtgcctttccagcctttatacacactattgtagctttcttaggtttgataggtagcgtttcaagtagtttagctgagacagtgaatgtattaggttcaacatgaccttgtgttttatttgtgtttgccaacaggatgccttatttgtttgagaaaaagatgtactagtgtcattctaaactatctccttttttaggattctaaagaagttaatcatcatccttttgtttattttaccaccatttagtgccttaaatcctatcaagaaagcagtgttactgctcaatgcccaaataagacacgcggatattgctattgtcttgcttttgagttaacaggccaactttttatacttaaaacctcagtaaactggcaaagaattgaaggtaatgtgatttgatttgagaataaaacattgtagcattgggtgaaaaatgagtatttgagttaagcttacatatttatttctgatggttatcttattaaaagcaataatccttaatactgtacttgccattagactaggtactcagtaatggaagtttctctcaagggttaaatgttccatttttgaaagttttaaaaaacctgtttgggtggtttattttgaaaacaaaagtaacctattagattcattttgcctaactcatatgagagatgcagagtatcaacagtgggagcatcataaaatgaattttccaagtggagaggagtaggaagcagccatatgatagtattgactctggacagaattgatgtctttcgtttccaaagtgcagagtagggaactacatttcctaatgtggcattgtaaatatacatctttatattactcttccagcctacgttcctaaatcattgataatttaaatattttttaaagccaccttaatttaggtagctcttggaatcgatgtttgaattcactagccacattttcttcatgatatgcctcgtggcaaacaaagatgtttccttaagatgaatcttacatttcccatagaaaataacccatttcctttggcactgcagttgccctcaaactgcttgcagttgtattcattttagtacaacaaaggttttcataatatgggaggccaagtctatgatactgcctcaaagagaccctattgtgtagatgcatcatcttctctcatttgatccatagagcataggcaaagatgtcaacctcaggccttagagaaaagtggaaatgttattatgacagccgtccatgagttatcgctttgtatgaagttaaatannnnnnnnnnnnnnnnnnnnnnnnnnnnnnnnnnnnnnnnnnnnnnnnnnnnnnnnnnnnnnnnnnnnnnnnnnnnnnnnnnnnnnnnnnnnnnnnnnnnnnnnnnnnnnnnnnnnnnnnnnnnnnnnnnnnnnnnnnnnnnnnnnnnnnnnnnnnnnnnnnnnnnnnnnnnnnnnnnnnnnnnnnnnnnnnnnnnnnnnnnnnnnnnnnnnnnnnnnnnnnnnnnnnnnnnnnnnnnnnnnnnnnnnnnnnnnnnnnnnnnnnnnnnnnnnnnnnnaaagttgtaatgcggcgcatgactataaatacctagctggttagcatttacattccttgccagggagtttgaaatttatactatagaaataactttaggttttaggtagagttaaagaggtaaagcacatgttgccacaacccaggaaagtatttttaagaaagattggattttcctacctttagagatctaaaaaaaatttaatataaaaaatcattttgtgttggtgtttattactagttcagatgagtggctgctgaaggggcccccttgtcattttcattataacccaatttccacttatttgaactcttaagtcataaatgtataatgacttatgaattagcacagttaagttgacactagaaactgcccatttctgtattacactatcaaataggaaacattggaaagatggggaaaaaaatcttattttaaaatggcttagaaagttttcagattactttgaaaattctaaacttctttctgtttccaaaacttgaaaatatgtagatggactcatgcattaagactgttttcaaagctttcctcacatttttaaagtgtgattttccttttaatatacatatttattttctttaaagcagctatatcccaacccatgactttggagatatacctataaaaccaatataacagcagggttattgaagcagctttctcaaatgttgcttcagatgtgcaagttgcaaattttattgtatttgtagaatacaatttttgttttaaactgtatttcaatctatttctccaagatgcttttcatatagagtgaaatatcccaggataactgcttctgtgtcagtcgcatttgacgcataactgcacaaatgaacagtgtatactcttggttgtgcattaacttacatgtataatttttggcatctgtgttcacaaatgcatgtgttagcaaatcacctttatttataagtgacaataattgaagttaaggatataaagaaacctgcatttgtagtccagcgttttcatttggtccataacacaatgtatggaaatgtgaaagacaattttgtacatttgtttgttactaactcagatcattaaaatgaaaacaatttttttaaacaag

SEQ ID NO: 4759 - protein, 464 aa, Homo sapien
SPTANTTGTATTSSTTVGAVKQEPLHSTSYAVNILENISSSESSKPIELDGLPSDQFAKGQDTVAIEGFTDEEDTESGGEGQYRERDEFVVKIEDIETFKEALKTGKEPPAIWKVQKALLQKFVPEIRDGQREFAATNSYLGYFGDAKSKYKRIYVKFIENANKKEYVRVCSKKPRNKPSQTIRTVQAKPSSSSKTSDPLASKTTTTKAPSVKPKVKQPKVKAEPPPKKRKKWKEEFSSSQSDSSPEIHTSSSDDEEFEPPAPFVTRFLNTRAMKETFKSYMELLVSIALDPDTMQALEKSNDELLLPHMKKIDGMLNDNRKRLLLNLHLDQSFKNALESFPELTIITRDSKAKSGGTAISKIKMNGKAYNKKTLRTSKTTTKSAQEFAVDPEKIQLYSLYHSLHHYKYHVYLICKDEISSVQKKNEDLGQEEIVQLCMKNVKWVEDLFEKFGELLNHVQQKCS

SEQ ID NO: 4760 - DNA, 4700 bp, Homo sapien
gtgaggtgccggcggatggcgggcgcggagtcttcggcgagacctaccgggccctgtctgtgccggccgtgagctgcggcaggacggctggagattacttctctaacaggatcaccagtttgctccacaaagcacaatgtctcgatcacgacaacccccccttgtgaccggcatctctccaaatgaagggataccatggacgaaggtcacaatcaggggagaaaatctggggactggccccaccgacctcataggcttgaccatttgtggacataattgcctcctgacggcagaatggatgtctgcaagtaaaatagtatgtcgagtgggacaagccaaaaatgacaaaggagacattattgtcaccactaagtcaggtggcagaggaacctcaacagtctctttcaagctactcaaacctgagaaaataggcattttggatcagtctgctgtgtgggttgatgaaatgaattattatgatatgcgcactgacaggaacaaaggaattccgcccttgtccttacgtcctgctaacccgcttggcattgagattgaaaaaagtaaattttcgcagaaggacttagaaatgctattccatggaatgagtgctgattttacaagtgagaatttctcagcagcctggtatcttatagagaatcactcaaacaccagttttgagcagctcaaagtggcagtcaccaacctaaagagacaggctaacaagaagagtgagggcagcctggcctatgtgaaaggcggtctcagtacattcttcgaagcacaggatgccctctcagccatccatcaaaaactagaagcagatggaacggaaaaagtagaaggatccatgacgcagaaactggagaatgttctgaacagagcaagtaatactgcagacacattgtttcaagaagtattaggtcggaaagacaaggcagattccactagaaatgcactcaatgtgcttcagcgatttaagtttcttttcaaccttcctctaaatattgaaaggaatattcaaaagggtgattatgatgtggttattaatgattatgaaaaggccaagtcactttttgggaaaacggaggtgcaagttttcaagaaatattatgctgaagtagaaacaaggattgaagctttaagagaattacttctggataaattgcttgagacaccatcaactttacatgaccaaaaacgttacataaggtacctgtctgaccttcatgcgtctggtgaccctgcttggcaatgcattggagcccaacacaagtggatccttcagctcatgcacagttgcaaagagggctacgtgaaagatctgaaaggtaacccaggcctgcacagtcccatgttggatcttgataatgatacacgtccctcagtgttgggccatctcagtcagacagcgtccctgaagaggggcagcagctttcagtctggtcgagacgacacgtggagatacaaaactccccacagggtggcctttgttgaaaaattgacaaaactcgtcttgagccagctgcctaacttctggaaactctggatctcctacgttaatggaagcctcttcagtgagactgctgagaagtcaggccagattgaaagatcaaagaatgtaaggcaaagacaaaatgattttaagaaaatgattcaggaagtaatgcactccctggtgaagcttacccgcggagccctgcttcccctcagcatccgggatggggaagccaagcagtacggaggctgggaggtgaagtgcgagctctccggacagtggctcgctcacgccatccagactgtaagacttactcatgaatcgttgactgcccttgaaattcctaatgacctgttacagactatccaggatctcatcttggatctccgagtacgttgcgtaatggccacgttgcagcacacggcggaagaaataaagagattagctgaaaaagaagactggattgttgacaatgaaggactgacttctctaccatgtcagtttgaacagtgcatcgtgtgttctctgcagtcactgaagggggttctggagtgcaagccgggagaggccagtgtcttccaacaacctaaaacacaggaggaggtttgccagctaagcatcaatataatgcaggtttttatatactgtctggaacagttgagcaccaagcctgatgcagatatagatactacacatctctctgttgatgtttcttcccctgacttgtttggaagtatccatgaagacttcagcttgacctcagaacagcgccttttgatagtcctaagtaattgctgctatctagaacgtcacaccttcctaaatatcgcagaacattttgaaaagcacaacttccagggaatagaaaaaatcacacaggttagcatggcctcattgaaagaactagatcaaagactctttgaaaattacatcgagttgaaagcagatcccatcgttggctccttagaacctggaatttatgcaggatattttgattggaaggactgcctgcctccaacaggtgtcagaaactatttaaaagaagcactggtgaatataattgccgtgcatgcagaggtgttcaccatttccaaagaactggtccctcgggtactatccaaggtgatagaagcagtttctgaagagctcagtcgactgatgcagtgtgtttcatccttcagcaaaaatggagctttacaggcgagacttgaaatctgtgctttgagggacactgtggctgtttacctgacacccgaaagcaagtcaagttttaagcaggctttggaagccctgccccagctttccagtggagcagataaaaagttactggaagagctcctgaacaagttcaagagtagcatgcacttgcagctcacctgtttccaagcagcttcttcaaccatgatgaaaacataaatatctgccacataaaagaagtccaggaaaataacacgtaataagactgttcactctctaagtaccctaaaggtatttggtgtattaaacattgggtttgccatttttctcttttttcttcctctgacttcgaaaattgttggtatacatttcaaccaaaatgacctcatttgaaatgcccaggaagtatttgttttgccattcttactagatcagatcctgtatgactttaaaatacattttaaaatatattttgcatctcagcagaaggttgagtgctgcaggaagagctgcttctgcagggagttttctggaatggcgtggcacatattgaagcatttctcagtgtcccgttcacggaagcgcaggcagctcccacgacacacggagagactgactgatacgagatttggaaagctatgtagacatctttggagctcttactgtcctaaactgtacagctgtgcttaaaaccctcatttcatataaatggccttaagttttctaattcaagcgggtttttggaaaaatttatggtctccattaaaatacatattacaactggggtagattatttgtggtccaggtgtctgtgatttaactttgcgttttgctatctgatttttatttttcacagggctaagcatgagctttcattctcactcactcttaatttgtcgtgcgtcactacacatgcacgtgttgcagtccctgaggccctgtgtgttatctgtgatggagtgtgaatgtgtaacgggcactgtgttacactctcaggtgttggcggggcggtcgcagacttcagggtcccctaacggaaaggccaggctccgcgtggacggccaactccctgcccgctccttcagcaggtgactgtctctgccacttcttacctgctgaaggatcttgctcagtagctggaacaatgctgctgtcacacagtctcttctctgaaacttcaggatgctccttggtcaccaggcaatgggagctgtagaccagccgcatgcacttgccccacattcactgctgactggcttcactggaataggttcaggtcaccgggacttctctcagagtcagcagcccacccaactccctcataccgtcgcatctgaaaattttcagagaggaattctctttgtagtcggcttgtcagggttttcaagtttttctatggttatttttaaatctctttttttaaatgctaaaattaatgtcctcattaatgcaagtaattttagagcacagtgtagccatgtacagtttccattatttaaaataaataaatgtgttggttcatttggtgtatggggggacatcatggtaactggaaatgaaagtttaatctttcacaaatgtgcttgataaagctgttaagaattgtctttcctaagtatgttaactgttgtatctaactcaactgtgagctaagtttaaaaactgcaatcatgaatgtttgtgatattttaaatatctactacagcacattcagccaataaagaatctgcctttaatgtaagttgtaatttacttgacatttttccctaagtgtctttatttcaacattttcatatttctactgttaacactcaaaatacttacattctggttaaccctgtattggtaaacacattgtcagaaaccatctgtcaggtcctgctaattctgtttgctggggacttaccatgtgcgaggcacaccatgaagtgcctcgttgaatcctcacaacagccttatgatacatgtgggctagctttaacgcacgtccatttagcagaggaaggaa

SEQ ID NO: 4761 - protein, 924 aa, Homo sapien
MSRSRQPPLVTGISPNEGIPWTKVTIRGENLGTGPTDLIGLTICGHNCLLTAEWMSASKIVCRVGQAKNDKGDIIVTTKSGGRGTSTVSFKLLKPEKIGILDQSAVWVDEMNYYDMRTDRNKGIPPLSLRPANPLGIEIEKSKFSQKDLEMLFHGMSADFTSENFSAAWYLIENHSNTSFEQLKVAVTNLKRQANKKSEGSLAYVKGGLSTFFEAQDALSAIHQKLEADGTEKVEGSMTQKLENVLNRASNTADTLFQEVLGRKDKADSTRNALNVLQRFKFLFNLPLNIERNIQKGDYDVVINDYEKAKSLFGKTEVQVFKKYYAEVETRIEALRELLLDKLLETPSTLHDQKRYIRYLSDLHASGDPAWQCIGAQHKWILQLMHSCKEGYVKDLKGNPGLHSPMLDLDNDTRPSVLGHLSQTASLKRGSSFQSGRDDTWRYKTPHRVAFVEKLTKLVLSQLPNFWKLWISYVNGSLFSETAEKSGQIERSKNVRQRQNDFKKMIQEVMHSLVKLTRGALLPLSIRDGEAKQYGGWEVKCELSGQWLAHAIQTVRLTHESLTALEIPNDLLQTIQDLILDLRVRCVMATLQHTAEEIKRLAEKEDWIVDNEGLTSLPCQFEQCIVCSLQSLKGVLECKPGEASVFQQPKTQEEVCQLSINIMQVFIYCLEQLSTKPDADIDTTHLSVDVSSPDLFGSIHEDFSLTSEQRLLIVLSNCCYLERHTFLNIAEHFEKHNFQGIEKITQVSMASLKELDQRLFENYIELKADPIVGSLEPGIYAGYFDWKDCLPPTGVRNYLKEALVNIIAVHAEVFTISKELVPRVLSKVIEAVSEELSRLMQCVSSFSKNGALQARLEICALRDTVAVYLTPESKSSFKQALEALPQLSSGADKKLLEELLNKFKSSMHLQLTCFQAASSTMMKT

SEQ ID NO: 4762 - DNA, 2586 bp, Homo sapien
  Unsure 358-483: Unknown base
tgcaaacatgagaactaatgaaccaaggcggctgccaccaggaaggaacagaacgcaggcattcaaccatgacgtctgcacagtgttagtaacatgtcattgtggtttcgttctcactgtggtaaaatttatttctgagcacttaaactgtgttgcatacccctaattttttttttttctgtatcttccttgccctcaaataccctgaggtgataaactgttccagttgtagccaactaccactgcgcccggccttaaataaaatattgtagtcattaatggtgtgtttgaattgaagagataccaggagatagaggtgaagtgcagtacttttattctttaagaatatagtctttannnnnnnnnnnnnnnnnnnnnnnnnnnnnnnnnnnnnnnnnnnnnnnnnnnnnnnnnnnnnnnnnnnnnnnnnnnnnnnnnnnnnnnnnnnnnnnnnnnnnnnnnnnnnnnnnnnnnnnnnnnnnngtttcccattcatattaactccatcttttaaaaatgtcatgattacaaagtgaaaagatttggctttcttagaggctcaatcacagaggtgaaagtgaccttggaaatcatatactctatccccatgttacacagattagaaaaactgaggttatggcactgacttaggcacccccagcaaggcaacccagggactacaactggcaatcccaactcctgggctagggctttttctacctttttttgcattggcctcttaaagaggcaatgaatactaattcctggcatcagaaaaaaaaaaaggcatgaggtgggaggattcttttttccctgatgggaaacagtgaataagaaaaatctcatcattcgatggaagaggtgacttaataattttattaatgaatttgatgtcccatgttttgtagttttgttatcattgaaccatgggggctggaatctgcctaaataattttatcttggtagccagcaattatgttggtattttatgtgggccttcccagattttcatattaatgaaatgactaatagtcgtacttaagaggtaactctactaaagcagaatgagatctaatatgttgtggaaataaaagagtttgcagtggaatgatactctcactccgtgcttgtaaaattgagttctattcaagacggaactgctatgactggcctattcaaggcttcatatttttatacagactatttcacagaccatagatttattttaaaagggaaaatctcacacataattaagcagtggaaaatgtgctcaatgctatggtgcgtcaggccctctgtctaccaggtttctcccctttctgcagagctgtggaccctgtacgtaccaaacaggtgaacttggtccatctttccttcttcctttttttgcacatttgcatttatatcttcctgtactaaaagaaacaaattatttataattggggtgacaatataaaggaacaaaagatggggcaatagttgcttcctagctggagctgtaagtccatgttacagaaactcactatttaaaaagttttaaaagatttatgaaccttgtcctacaattcgctgaatacttatttgtcttttaaactcccctcggtgtatggatcatcttcgtcagaatgccgttgtttcattgtgaatcaggggaaaatgttaatcatttggagactgttttcttattaccaaatgtacaatccataagacaactgaaagcaacaactgctgggttcactgacaaagattataaaaatcatcacgttcaaagtagagtttttagccaaggtcaagaactaacctggggctgagtcagcgtctctacccacttaaataacagcgtaaagatctttcactaaattcgttatgtggtctgtctggatgtaaacctatatatttccttttgaaacagaatcatatcctgcagactcttggcactcctgcatagctttgaccgaatgttcactctcatcgtaatggaagatttctatctatgcagataatacatgtttttaaatactgttttctgtttagtcctcaatcttcctaactcaaattggggactgaggagagagaaaggtggttacccctgttaccgtgccatattcttcttgctgcttttcaaccccacgtgattgttgattgacggttctgctataatgtgcgtgcccttcaagtttcagaaaactttcccaatcatttcacttcaatcttaattgaacccaagagtcaaagttattattttctccgaacgtgtttgtgatcttctgttatattttggggcatgttacctttatggtatataagctgtagtgcatactctttgtattgcaaaaaactggtcagtaatttatgtacatgtattccacattttagtgtgcttgaagtgacaatccatagtttgtagtagtttgttatttgtcaactttaccctgtgttttaaggacatctaaacattccttgtcctatcaagatgacaaaagcagaatgtaatttttttttggaagcttcgtgattacctgtaacaagttctgtttttaaaacgaatacaaataaagttagtaactatttttaaatcagaaaaaa

SEQ ID NO: 4763 - protein, 54 aa, Homo sapien
ANMRTNEPRRLPPGRNRTQAFNHDVCTVLVTCHCGFVLTVVKFISEHLNCVAYP

SEQ ID NO: 4764 - DNA, 1107 bp, Homo sapien
cgggcgagaagggcagacgggacatgcagcctcttccgcctgagccccggaagtgatgtggctgcggcatcgcggcctcgctatgtctgccattttcaattttcagagtctattgactgtaatcttgctgcttatatgtacctgtgcttatattcgatccttggcacccagcctcctggacagaaataaaactggattgttgggtatattttggaagtgtgccagaattggtgaacggaagagtccttatgttgcagtatgctgtatagtaatggccttcagcatcctcttcatacagtagctggggaaaatgccagaatgtagttgccatcagatttgattgtgaacaaggactgactgcagaaaataatggaaaggatgtttaactcttttatctccgaacattgaatgagataaatttccagatgctgttctctattttaatgttattggaccaatgttctgtataaacaattaagatgtaaccatttaatagtctgtaacaatcaacctcagtactgtcactacaatattacattctgcaaatgttattctgttgtatcagatacaaaattttagtgaggtatctctaaggcacatagtagaaaacaaaattggttaattactcaagttcctttcactgtgatttggaaatgatttaatctttatagaatgagaaccttttttggactagcttttttattaaaatggctcaatttgtgttgataaggattgcattaatatttaatagtgcttgcttttcctctgggcacaccattttgatcattaaccagagtacctctactcttagcaaactctagtttatgacaagtatttaaaatatttaaaacaagcttatgcagttcttaaggacgaaggtaaatgagatgtaacttaaaaatagtattgggaaaatgttgatagttaacattagtggatttagactagccaaatgacatagtaggctctgaaacatcttgtcaagtatatgtattttgtgcatgaatttttgctggaaagctgtctttctctgaaaaacacaacgttcttagaatgaaaagaacaattataaaataaaaaaaaaatttaaaaaaaactgggcggggg

SEQ ID NO: 4765 - protein, 72 aa, Homo sapien
MSAIFNFQSLLTVILLLICTCAYIRSLAPSLLDRNKTGLLGIFWKCARIGERKSPYVAVCCIVMAFSILFIQ

SEQ ID NO: 4766 - DNA, 725 bp, Homo sapien
aatatcaagaatggttaaagaaaaaaaatgctgaagaatgtgagaggaagaagaaagaaaaggaaaaagaaaaacaacagcaagctgaaatacaggagaaaaaggaaatagcagaaaaaaagtttcaagaatggttggaaaatgcgaaacataaacctcgtccagctgcaaagagctatggttatgccaatggaaaacttacaggtttttacagtggaaattcctatccagaaccagccttttataatccaattccgtggaaaccaattcatatgccacctcccaaagaagctaaggatctatcaggaaggaagagtaaaagacctgtgataagtcagccacacaagtcatcatctctggtaattcataaagccaggagcaatctttgccttggaactctgtgcagaatacaaagatagcgtatgtggaaaataacatgcttttatctggagctatttaatttaaaaatcagaaattgttttttactgctcagtcaataactcaacacttaatgtgattattgacaaatagcaatttttgcatttgtatatggagtccttagagttgaggaagatattttctggattttggtttttataaacttttcaaggttgatcttggcatgttgttttgcagaataagtggctgaatatgtaagaattgtgtttgtatttagcttgtattaaaagtacactgtaataccaataaaactaacaatttttctt

SEQ ID NO: 4767 - DNA, 912 bp, Homo sapien
ggcacgaggcagacactactgctgacgctactatccgtaaagatggagaacaatcttgctgagtttgaaagaagggcagaaaagaatttattaataatgtgtaaggagaaggagaagctacagaaaaaggcccacgagctgaagcgcaggcttctcctctctcagaggaagcgggagctggcagatgtcctggatgcccagatcgagatgctcagccccttcgaggcagtggccacacgcttcaaggagcaatacaggacattcgccacggccctggacactaccaggcacgagctgcccgtgaggtccatccacctggagggagatgggcagcagctcttagacgccctgcagcatgaactggtgaccactcagcgcctcctgggagaacttgatgttggtgattcggaagaaaatgtgcaggtgctggacttactgagcgaactcaaggacgtgacagcgaaaaaggaccttgagctccgaaggagctttgcccaggtgctggaactctccgcagaggcaagcaaagaggcagccttggcaaaccaggaagtctgggaagagacccagggcatggcgccccccagccggtggtatttcaatcaagacagtgcctgcagagaatctgggggagcacccaagaacacgcccctgtctgaggacgacaacccgggtgcctcgtcagcccccgctcaggccacgttcatcagcccaagcgaagatttttcttcaagcagccaggcagaagtcccgccctctctctctcgttcagggagggacttgtcatgactcatggttacattcaggatacttgagcactttatatactaccgtagcactgtagctattttttatgtgataatcttgtttgataaaaaagtaaacctgttttgcaaaaaaaaaaaaaaaaaa

SEQ ID NO: 4768 - protein, 248 aa, Homo sapien [sequence omitted]

SEQ ID NO: 4769 - DNA, 1088 bp, Homo sapien
ggaattcggcacgagcccgattccgcgcccgccatggccgacaaaatggacatgtctctggacgacatcattaaactgaaccggagccagcgaggcggccggggcgggggccgcggccgggccggctccagggccggccgccgcggtggggcgcaggccgccgcgcgagtgaatcgaggcggcgggcccatccggaaccggccggccatcgcccgcggcgcggccggcggaggcggcaggaaccgaccggcgccctacagcaggccaaaacaacttcccgacaagtggcagcacgatcttttcgacagtggcttcggcggtggtgccggcgtggagacaggtgggaaactgctggtgtccaatctggattttggagtctcagacgccgatattcaggaactctttgctgaatttggaacgctgaagaaggcggctgtgcactatgatcgctctggtcgcagcttaggaacagcaaacgtgcactttgagcggaaggcagatgccctgaaggccatgaagcagtacaacggcttccctctggatggccgccccatgaacattcagcttgtcacgtcacagattgacgcacagcggaggcctgcacagagcgtaaacagaggtggcatgactagaaaccgtggcgctggaggttttggtggtggtggaggcacccggagaggcacccgcggaggcgcccgtggaagaggcagaggtgccggcaggaattcaaagcagcagctttcggcagaggagctggatgcccagctggacgcctataatgcgagaatggacaccagttaaacagaccagcaaatccgcgtgcggaacaggacccaggcgtctcctcttgctccctggttggggggcggtggctggggctgtgcgcccaatgatggatttgtttcttttatgttttaaaataggatttaaaaactcatgtaaaggttttttttttttcttttttttttttttaattctgaaacagacctgttttgtaccgagttatttttgggataaattttactggttgctgttgtggagaaggtggcgtttccaccttttccataataaaatagaaatgtgtgtaa

SEQ ID NO: 4770 - protein, 255 aa, Homo sapien
MADKMDMSLDDIIKLNRSQRGGRGGGRGRAGSRAGRRGGAQAAARVNRGGGPIRNRPAIARGAAGGGGRNRPAPYSRPKQLPDKWQHDLFDSGFGGGAGVETGGKLLVSNLDFGVSDADIQELFAEFGTLKKAAVHYDRSGRSLGTANVHFERKADALKAMKQYNGFPLDGRPMNIQLVTSQIDAQRRPAQSVNRGGMTRNRGAGGFGGGGGTRRGTRGGARGRGRGAGRNSKQQLSAEELDAQLDAYNARMDTS

SEQ ID NO: 4771 - DNA, 1088 bp, Homo sapien; identical to SEQ ID NO: 4769

SEQ ID NO: 4772 - protein, 255 aa, Homo sapien; identical to SEQ ID NO: 4770

SEQ ID NO: 4773 - DNA, 2781 bp, Homo sapien
agtgatttataattcctacaacagaggccaagaaatagattaaaatattttcaagaccccaaaataatgtattatggttgggaagtcagtagaacactggaataggtgaagacctgacagtaatttttgtcttaagaatgctttctttaggacagaccctttaacctcacctctgtgcatctgtttttaaaatgattatatttgcctctgatatttgaaagcacttttgtagttttgatgatgaaaaatatattaaacgtgcatattaccattatttaggaaataattccttatatactgtgataaatcattgctgttacatacagtaacatgccttaattacatttaatgccttactgctttatgtaagtaaatccaagtttcagaattaaaaataagcattatttcatatggtccaatcagattcgttacataggctatataaatttgtctccattttcaccatcaagcacaaataattgggtcaaaactgcctttgaggtctgttgaagaaaatggttcattaagcaaaaaagagtagaggtattttatattagcagtaacagacaaattatttagtaatcccttaacctctgtttttcaaagagaaaatatccaatttagacttttttcctgatctctatatatagcatcaagttgggaaacaaaggccaaaggtgtatagattgcttgaaagggggtggtagtgcctctttttaagatctgttgagtcggctacagtctggctaagtaagaagcatttgcatactgattccatcatttaatctttaaaagtatgtgttttaaaaatgtaaccagaatgattcttcaatagaaatgagatttggtggagtctggattgcctgttttgtatataatatatacttaagatatataataccacctcattttctgggcattatttcctaattgttgatgtttcaggcttttgataagtcattttatatatttcaaatttaactcagaataagtaaatatttatggcaaatgcagttttatgtactttcaggagaagaccatcaggaaaagacaggacaaagaagtcaaacattaaagcccttgcaaatattagaggaccttagacaattaccaaaaagtgtttaatagggaagttgcaaatgattctcttagtaaattaaacatttaaaaagtagttttaatgtgccttgggcatcttgaaaagaagagtgtgatataatttatgcttagtgttaactggtcattttacattgtatttattaagtctgctgaaaaatgaggttttaaggaagaaaatgcagattattttagggtaaacaggccaggtgtcctttgaagaactttgtttacatcaaattgatgaaattacagtcagtgattccttactttttttgctagttgtactttgaaattgttatgggttcgttttccaaaatatgtaacttattttttaaaggaataaggtgtgctgtgtatttgttgattaaaaatcatttgtcttgcagagtatccttttttgaaggaaatatacatccttataacacatcaggtagttttcttttttctgtatttaaattatatatttgaattaattgaatataatttgagttacatataattctatataaaggttacatattgaattatggttctaatctgtttaggaaagaaatgaattttctaagcatttaatacatttggaataattttagtttctaaaaagtactaatgtaagttaagtttatatcaaatgcaaattaccttgtataactaacaagcacagttattgtttaacattatggattttaattgtgttgacacccttctttgaatttgttgctttacatgtgtgtctgtgtgtgtgtctgcatgtgtgcacgcatgtacttgtatgcaatgtaaaagtaacagcagaatcattgcatttggtttacttaaaattttggagttagcaagtaaacaaaaagctgatagttttatgaagtctcggttaaaataaaatttctttgctatctcactcctaggaagttatggagttcatattttcaaaagatatgttaaaaatggttacacactctgctggccacattaaaaattagaagactcatgttaaattatctcctccaaaggactttttatttacagcttttcttttcctggactctacctgcttggttcagtgtcctgaagagttatttaaatgaaccactacttagtaattagttcttttttaaagtatctacttctaaaattacctagttgaaaatatgaaggatatgcttagttttagaaatatcatgaagcaaggatctagtcagtgttacagggtaaaggtggagttttttaaagtctgtatttaaatggtgcactgatggattcatttttaatttgcattacaaaaatgttgctcaggtaatcagtattttcttccacgtatgtgcatattgcactgttagatcatagaaatatctgaatgctttaatttttatgtatgcaaaatctataaatcttttgtataatgtattttatacaaatgtaactgtagaacattgttagcatgtgtatctgtaaaaccagtttttaaaattttttgccccttatttttcatattttgaaagatctccaacatgtaataaagtttctcttattcaatctaaaatggaagccagtgaatttaattgaataaagcaaagcttttctccactttcaaactatctaatatagagatattatgtaagatagagcagattgccaaaggtttaccaattcagatttcttatt

SEQ ID NO: 4774 - protein, 13 aa, Homo sapien
VIYNSYNRGQEID

SEQ ID NO: 4775 - DNA, 963 bp, Homo sapien
cccgctcaacttcatcctgggttgaggcggaggagaacttccagaattatggcgaagtccgggctgaggcaggacccgcagagcacagctgcagccactgtgctaaagcgggcagtagaactagattcggagtcgcggtatccgcaggctctggtgtgttaccaagaggggattgatctgctcctgcaggttctgaaaggtaccaaagataatactaagagatgtaatctcagagaaaaaatttccaaatacatggacagagcggaaaacataaagaagtacttggaccaagaaaaagaagatggaaaatatcacaagcaaattaaaatagaagagaatgcaacaggtttcagttatgagtcactttttcgcgaataccttaatgagacagttacagaagtttggatagaagatccttatattagacatactcatcagctgtataactttcttcgattttgtgagatgcttattaagagaccatgtaaagtaaaaactattcaccttctcacctctctggatgaaggcattgagcaagtgcagcaaagtagaggcctgcaagaaatagaagagtcactcaggagtcacggagtgctgttggaagttcaatactcttcttcaatacatgaccgagaaattaggttcaacaatggatggatgattaagattggaaggggacttgattattttaagaaaccacagagtcgtttttcccttggatattgtgattttgatttaagaccatgtcatgaaacaacagtagacatttttcataagaagcatacaaaaaatatatgatgggtggtagcctaatttgtattatgtctactttaagtgaatattggattttttttaaaagatcacttttataatgtatgaatttaacaataaacttttatatttctactaaaaaaaaaaaaaaaaaaaaaaaaaaaaaaaaaaaaaaaaaaaaaaaaaaaaaaa

SEQ ID NO: 4776 - protein, 249 aa, Homo sapien
MAKSGLRQDPQSTAAATVLKRAVELDSESRYPQALVCYQEGIDLLLQVLKGTKDNTKRCNLREKISKYMDRAENIKKYLDQEKEDGKYHKQIKIEENATGFSYESLFREYLNETVTEVWIEDPYIRHTHQLYNFLRFCEMLIKRPCKVKTIHLLTSLDEGIEQVQQSRGLQEIEESLRSHGVLLEVQYSSSIHDREIRFNNGWMIKIGRGLDYFKKPQSRFSLGYCDFDLRPCHETTVDIFHKKHTKNI

SEQ ID NO: 4777 - DNA, 6595 bp, Homo sapien
aagtgggaagaccgatgggaatggttaagactgattctggaggtccatcagttctcaagagacgccagtgtggccgaggcctggctgcttggacaggagccgtacctatccagccgagagataggccagagcgtggacgaggtggagaagctcatcaagcgccacgaggcatttgaaaagtctgcagcaacctgggatgagaggttctctgccctggaaaggctgactacattggagttactggaagtgcgcagacagcaagaggaagaggagaggaagaggcggccaccttctcccgagccgagcacgaaggtttcagaggaagccgagtcccagcagcagtgggatacttcaaaaggagaacaagtttcccaaaacggtttgccagctgaacagggatctccacgggttagttaccgctctcaaacctaccaaaactacaaaaactttaatagcagacggacagccagtgaccagccatggtctggactgtgaagttcactaccatttgtcaagaatcaccctttccaaatcctctgggttttgactttttggcttccacttcacccaaaatgttaaaatttttacttaattcatagccttccttggtttcatatttgtttgcatttaattcatgtttgagtctcttaactgatggatgcccacttgccttaaagcagcatacttattttttgtttatttattgtgagctttttactttattaagattttacagcgaaacccttacatgagtaattgaaatgaaattaaatgagattacagcataatgaagaagaaaactagaatctaacaggtatgacacattcagttattctaacagggcacagtactgtgctatatgtagccgcctttacagatgttattaacctatagtagtttactattaactaggaagactggtgtatgaggagggagacattctgtaataagattaaaacctaaagtcagctgtgtaacattccatgaaagatgcattcatttattgaagatgacaaaaaagggagtcagatatattctggaagctattttaattttaggcacacaatctcatacattttgagacccttgggtcatttattactttttacaaactagttcctctctttttttctgccaagtcctgaattgaaaactgtaggcttccttgcacagatgttgcagccagcctcaggagtaaagtgcccgctgactgctgccgccacctctgtctcgctccctgtcagtgctgctggcacgtgggacgcggcaggtgacagccgttctcagcatgttttagaagcttgcctcacagacttccatgcctctccattcagccgatgacttcagggtgtcaaactgttttaatttttcaaacaaatggaacagaagccattgtggttcatcctgattacttgaacgttgcacttggtggaccgtgcctgggagcgctcgcatgccccctggcttcagaagtcatgtcagtgtctctgtagacaaactccactgtacatcttggattaatcttctgattcattgttcattttctcaagactttttgtggaattctctgataaaggaagcttttaggatggtatctatcaggccaccagcaggaattgaaaatgttttcacaaaaatccttttccttagaaataaaagctggtgacagagatggtttccttgtaccgataaaaacaaaaccaaatccatattatacatcaaaaccttgtgagacattcacttgctcttttgccatatttagatgtgttagtggaatcagaaacctgttttgatatgtgttctccatgagttaagtctgatttgtctttttatttcatgatgcatgtcttttttttcttttgtcaggataacgtcatatagcatcttgtttgtttttccttatctctatgtacatatctatctacttctgactgtagatgggtatatagatagatgccaagcttcttatgttctgggggtagtatgcatcattattgggtctctgccttaaaacacatcaaaattcattttagacaaaaaaacttctgctttgtctttggtcattagggagctctaatgtgtgtttgtggctccaagttacattttgtgtttcattgatctatatgtatatatgtgatgttttcatatatatatgtgtgtgtgtttaaattttgtatcatcaggactgacacccaatttgacactttttgtatctagaagaccctccaaaaaaggaaccacataagcacacaagaaaagagtgctatgatgttcttagcatttgctatcatgcctatttttatctagatttttaaatgtagcttgtcataacaaaattttaattacaattggcttgtatgagaagaaaaagtatttttattgttttgagtgatgacgcagagactcaatgaacttgaaaatagcattgcttcgtgcactttgaataccaatcaggtgttttctgtgctactagttgtcacgttgcattcatgttcacctcctgatttaagtatctcgggtgtgcccagccactaaagcactctggactaatcgctaaagagaagcaacgtggggggtggggttgcgagggatgtgttcacatgtacccatcatttgatcatagcactgtgattgcttttgatgtgtgtctctagtggtgtgttgtctgttggcatgcttaaagcacatgtccattaaaattcattttgttccttttattttccttgttttcttggttagtgattcatttgcataaacattaatgatctctgcatactggtttggggttttctctttccttctaactctaaagaaaaaatttttgctgcagaattatcctcagaagaggcttccctggccttcatctaccttgcagtctgaccaagtatgataaattttagccgttttcaaggaaacatctctctacccaggtcattgctgtcactagcagctttcaagtcaaacctgcagcactaaatttttttttatcctggtttctctacatactaaccccatgtctctctggactcacacctggctcaggccttccagaccaaactcatacttcctcctcaccagaagtttccgaatctcacactagagaagatttgtcacctttaaagtccactcacattattttgactcagggttttgttttttgtctatttcccctcctgcaactctcctttaaaagtgaaaagagagagaatggtttaagtagtctgttgctcataagcacgtgtctgcagtctgtcacttgcaaggccttggtgatcaccatgcagcacttgtgcgcacacacacccccacaagtcttttttcctaataatccattttccacattgccatgagggtaaagggttccaatcaaaaccaccattaaactgcatagtttctagtcttccctcagccctgatgctaattatgatagtttgcatagacataacttaaacttgtgattctccctccttccagagctttttgtagccctttttccccccaaaattagttttgttcaaaatcaagcattgggcccagccattaagataagacctaataagtgagagatacagttcccaagagtttacagatccaggtgttcacatggtggtggccagtctaccgtttatcttgtcaaggttgttactgctaatttggtgtcactttggtcttgggcagcagtggtgggcgacgtatctaatgagcgtgccattgacttctccatgtttgtctgtgtacgaggggtgcaggttgtctgtaatccactaaagtgtcagccacacccagctttagtaactcgctaatcgcacaccctgggtgtatcagccaggggctgctacagttaatggtacacagttgatggtacacaggctgaaaatgataatgaatcaagaccctactacatttccaaagccgaaaagccatgagggttacaatttaaatgagcttgggaaggaacgctcccgaagacgtctccagcctgaagggtcagagccgctggaagcctggctgtctctgggctttctcgtctcagtgcagcaaggcaccgtgatcaaccaacccgtgatggggaaggccctggttctgtctttgtttgggggtaaatagctgtgtggtgttgagtgactgtgattggcttttccagctcctttaacacaaactacaacccactcacgatacaacttcggcagatgtggtcaaattgatgtttgttgacttgcctcatttccttccagctcttaagttccaaagtctaactgggatggtagatgtgaaatgcatgattgtcgtcctaatttctgcatgtgtttatgacaatgtgttgaggggagggggaggagagccagagagcattttcaggaaccgaggtctttccttgtcttactctgggggaatgccatgtagctctgatagagttgtctatcggtctgtttgtgaatgccctttcgcttaaacttccagcccttctggtggcatccttggttgtaaggtggctgctgtataacgtccactctctttcatatttaatatgtgtgattgttactgttgtctttttgttttaaagtaaccataagaggagatgatctgagttatatttattgatcagaggaatagagtgcagtaaaactcatactggcatttcgcttttctcatttccctgtaaatgggcgggtattaatccattcccaccttctaatgtccttgatgtccagctggctttgtgggtgtgcaatggttttactgtactgcctcgatctgtgccaggcatttatacacagccacatgtgcgagtcaggtagagcgtatgtggtcacccccatggctcacggagttagctgaatggcctctccgctgtccctagatggcagaaacggtggacacaagcgaaatggtcaacggcgctacagaacaaaggacgagctctaaagagtccagccccatcccctccccgacctctgatcgtaaagccaagactgccctcccagcccagagtgccgccaccttaccagccagaacccaggagacaccttcggcccagatggaaggcttcctcaatcggaaacacgagtgggaggcccacaataagaaagcctcaagcaggtcctggcacaatgtttattgtgtcataaataaccaagaaatgggtttctacaaagatgcaaagactgctgcttctggaattccctaccacagcgaggtccctgtgagtttgaaagaagctgtctgcgaagtggcccttgattacaaaaagaagaaacacgtattcaagctaagactaaatgatggcaatgagtacctcttccaagccaaagacgatgaggaaatgaacacatggatccaggctatctcttccgccatctcctctgataaacacgaggtgtctgccagcacccagagcacgccagcatccagccgcgcgcagaccctccccaccagcgtcgtcaccatcaccagcgagtccagtcccggcaagcgggaaaaggacaaagagaaagacaaagagaagcggtttagcctttttggcaaaaagaaatgaactcctttccttcacctcctgcccttctcttaccttttcagtgaaattccagcatgcaagctcagaaccaacacattactctctgtgcctaatgttcctcaatgtggttgattttgagcttgcatgctggaatttcactgaaaaggtaagagaagggcaggaggtgaaggaaaggagttcatttctttttgccaaaaaggctgaaccgcttctctttgtctttctctttgtccttttcccgcttgccgggactggactcgctggtgatggtgacgacgctggtggggagggtctgcgcgcggctggatgctggcgtgctctgggtgctggcagacacctcgtgtttatcagaggagatggcggaagagatagcctggatccatgtgttcatttcctcatcgtctttggcttggaagaggtactcattgccatcatttagtcttagcttgaatacgtgtttcttctttttgtaatcaagggccacttcgcagacagcttctttcaaactcacagggacctcgctgtggtagggaattccagaagcagcagtctttgcatctttgtagaaacccatttcttggttatttatgacacaataaacattgtgccaggacctgcttgaggctttcttattgtgggcctcccactcgtgtttccgattgaggaagccttccatctgggccgaaggtgtctcctgggttctggctggtaaggtggcggcactctgggctgggactcggcttcctctgaaaccttcgtgctcggctcgggagaaggtggccgcctcttcctctcctcttcctcttgctgtctgcgcacttccagtaactccaatgtagtcagcctttccagggcagagaacctctcatcccaggttgctgcagacttttcaaatgcctcgtggcgcttgatgagcttctccacctcgtccacgctctggcctatctctcggctggataggtacggctcctgtccaagcagccaggcctcggccacactggcgtctcttgagaactgatggacctccagaatcagtcttaaccattcccatcgacttcc

SEQ ID NO: 4778 - protein, 224 aa, Homo sapien
MAETVDTSEMVNGATEQRTSSKESSPIPSPTSDRKAKTALPAQSAATLPARTQETPSAQMEGFLNRKHEWEAHNKKASSRSWHNVYCVINNQEMGFYKDAKTAASGIPYHSEVPVSLKEAVCEVALDYKKKKHVFKLRLNDGNEYLFQAKDDEEMNTWIQAISSAISSDKHEVSASTQSTPASSRAQTLPTSVVTITSESSPGKREKDKEKDKEKRFSLFGKKK

SEQ ID NO: 4779 - DNA, 1353 bp, Homo sapien
  Unsure 217-238: Unknown base
  Unsure 684-747: Unknown base
  Unsure 1287-1307: Unknown base
aaaagtgcaaatttttataggtcctaattattttgtttgcctaatgaagtgttccctctattttattgtttttatatgctacaaagtcccatcttctgcagttatggaaacagtgtggctgtatgttttagtaattatttcataatctgtagcacttttcactttaagtgcaatgaatagtccagcttcattcactgtattactaatacgcatcccnnnnnnnnnnnnnnnnnnnnnngcttagtcagatttggggatgcagccaaacccttctgttgctgtggtttgaacatacagtctaatgagcagggagaccattagctctttctggggcagtgggacaggaaagaataccttggaccttagggctactctagttgtaatgtattagtgagttatcactagagaagttccacagtttaatattatctatacctatatctatatatctacctatatagatagatatatgttagatgcttcaacaactagggtctacacttaatatactgacatctaaggatgcggccaagaaaagctgtaattaggctgaattttattgccaaagttgttcttttttcatttagtcctttaataaaagatgatcttcataaattacagaaagtttgcttaccctgtttgaccttttgcagaaaagaacaagagggaagacagaccttcagnnnnnnnnnnnnnnnnnnnnnnnnnnnnnnnnnnnnnnnnnnnnnnnnnnnnnnnnnnnnnnnnttcctggttttaggcccttttccacaatttctgatggaaatacagaaaccttgccatcattcttactgctggtttgcatctcatttatggtgtatctgggatttcttctcatgaacagaaagattcagtggctgttatatgccttgtcaatttaatgtattgccctatcctctttttgatcaaagatagagactaagactgggaattatgacagaaaaagtcatatttttctttaaatgattttgaaatgttaaaataggccaatatgagtcaaagtgcaaattttttggtgagtaggttgacaaaaaaaaaaaaaaatccaggaaaaaaagtgcaaatttttataggtcctaattcttttgtttgcctaatgaagtgttccctctattttattgtttttatatgctacaaagtcccatcttctgcagttatggaaacagtgtggctgtatgttttagtaattatttcataatctgtagcacttttcactttaagtgcaatgaatagtccagcctgggtgacgagcgaaactccatcccnnnnnnnnnnnnnnnnnnnnngcttagtcagatttggggatgcagccaaacccttctgttgctgtgg

SEQ ID NO: 4780 - protein, 112 aa, Homo sapien
  unsure 54: unknown amino acid
  unsure 55: unknown amino acid
  unsure 56: unknown amino acid
  unsure 57: unknown amino acid
  unsure 58: unknown amino acid
  unsure 59: unknown amino acid
  unsure 60: unknown amino acid
  unsure 61: unknown amino acid
  unsure 62: unknown amino acid
  unsure 63: unknown amino acid
  unsure 64: unknown amino acid
  unsure 65: unknown amino acid
  unsure 66: unknown amino acid
  unsure 67: unknown amino acid
  unsure 68: unknown amino acid
  unsure 69: unknown amino acid
  unsure 70: unknown amino acid
  unsure 71: unknown amino acid
  unsure 72: unknown amino acid
  unsure 73: unknown amino acid
  unsure 74: unknown amino acid
  unsure 75: unknown amino acid
MRPRKAVIRLNFIAKVVLFSFSPLIKDDLHKLQKVCLPCLTFCRKEQEGRQTFXXXXXXXXXXXXXXXXXXXXXXFLVLGPFPQFLMEIQKPCHHSYCWFASHLWCIWDFFS

SEQ ID NO: 4781 - DNA, 709 bp, Homo sapien
aatctgttaaaatttgatatagtaggcactgacaaaagaggtcaaatgcaggactgatttctaagcttgcaatctatctaaatgcagatgctaatttagagtgcataattattacacaagtacagacctaggttagggcttaaatttcattatgtgcaataaaaaggttaagtgatggttaagcaaggtgtagattatccttacctctcctaatgacatgggctcacattggcattcctttcatacttttacgtataaagtgggcagttgtttctgaatgactgttgctggagcctcaggcctgctttgtgcttggtgctttccagactttctcctttattcctatcaccatatacgtactcacaaaagagcagtgtaaaccaggtattacatttccacaagggaaagtagaaccaggaatagccacatgatacttaccgaaagcttcactttccctatagagaaagcaagcaacatgaatcttctgatttggggcccagcctgctgctgtatacagaggttggcattattggtgatagaaatgtctgataggagtcttttaattatactctggagtgtggaggtggagtgcaaggctgcttcctttattactgcaagtgttattttctattatctcaggtttcgttttgtgtaataaactgcttcttgttaaacaatgtcttctgcttcattatttttttgggggtgg

SEQ ID NO: 4782 - protein, 75 aa, Homo sapien [sequence omitted]

SEQ ID NO: 4783 - DNA, 2012 bp, Homo sapien
gcggctgtccagtcgtagcccggccgcccgcgcctgtccggtccggtccggccacggaggcagcgcagcggcgggactccgagcctaccccgccgagtgagctgcgccgcaccgtgccgtcccacccggcacccaccagtccgatggggccgcagcggcggctgtcccctgccggggccgccctactctggggcttcctgctccagctgacagccgctcaggaagcaatcttgcatgcgtctggaaatggcacaaccaaggactactgcatgctttataacccttattggacagctcttccaagtaccctagaaaatgcaacttccattagtttgatgaatctgacttccacaccactatgcaacctttctgatattcctcctgttggcataaagagcaaagcagttgtggttccatggggaagctgccattttcttgaaaaagccagaattgcacagaaaggaggtgctgaagcaatgttagttgtcaataacagtgtcctatttcctccctcaggtaacagatctgaatttcctgatgtgaaaatactgattgcatttataagctacaaagactttagagatatgaaccagactctaggagataacattactgtgaaaatgtattctccatcgtggcctaactttgattatactatggtggttatttttgtaattgcggtgttcactgtggcattaggtggatactggagtggactagttgaattggaaaacttgaaagcagtgacaactgaagatagagaaatgaggaaaaagaaggaagaatatttaacttttagtcctcttacagttgtaatatttgtggtcatctgctgtgttatgatggtcttactttatttcttctacaaatggttggtttatgttatgatagcaattttctgcatagcatcagcaatgagtctgtacaactgtcttgctgcactaattcataagataccatatggacaatgcacgattgcatgtcgtggcaaaaacatggaagtgagacttatttttctctctggactgtgcatagcagtagctgttgtttgggctgtgtttcgaaatgaagacaggtgggcttggattttacaggatatcttggggattgctttctgtctgaatttaattaaaacactgaagttgcccaacttcaagtcatgtgtgatacttctaggccttctcctcctctatgatgtattttttgttttcataacaccattcatcacaaagaatggtgagagtatcatggttgaactcgcagctggaccttttggaaataatgaaaagttgccagtagtcatcagagtaccaaaactgatctatttctcagtaatgagtgtgtgcctcatgcctgtttcaatattgggttttggagacattattgtaccaggcctgttgattgcatactgtagaagatttgatgttcagactggttcttcttacatatactatgtttcgtctacagttgcctatgctattggcatgatacttacatttgttgttctggtgctgatgaaaaaggggcaacctgctctcctctatttagtaccttgcacacttattactgcctcagttgttgcctggagacgtaaggaaatgaaaaagttctggaaaggtaacagctatcagatgatggaccatttggattgtgcaacaaatgaagaaaaccctgtgatatctggtgaacagattgtccagcaataatattatgtggaactgctataatgtgtcattgattttctacaaatagacttcgactttttaaattgacttttgaattgacaatctgaaagagtcttcaatgatatgcttgcaaaaatatatttttatgagctggtactgacagttacatcataaataactaaaacgctttgcttttaatgttaaagttgtgccttcacattaaataaaacatatggtctgtgtaaaaaaaaaaaaaaaaaaaaaaaaaaaaaaaaaaaaaaaaaaaaaaaaaaaaaaaaaaaaaaaaaaaaaaaaaaaaaaaaaaaa

SEQ ID NO: 4784 - protein, 520 aa, Homo sapien
MGPQRRLSPAGAALLWGFLLQLTAAQEAILHASGNGTTKDYCMLYNPYWTALPSTLENATSISLMNLTSTPLCNLSDIPPVGIKSKAVVVPWGSCHFLEKARIAQKGGAEAMLVVNNSVLFPPSGNRSEFPDVKILIAFISYKDFRDMNQTLGDNITVKMYSPSWPNFDYTMVVIFVIAVFTVALGGYWSGLVELENLKAVTTEDREMRKKKEEYLTFSPLTVVIFVVICCVMMVLLYFFYKWLVYVMIAIFCIASAMSLYNCLAALIHKIPYGQCTIACRGKNMEVRLIFLSGLCIAVAVVWAVFRNEDRWAWILQDILGIAFCLNLIKTLKLPNFKSCVILLGLLLLYDVFFVFITPFITKNGESIMVELAAGPFGNNEKLPVVIRVPKLIYFSVMSVCLMPVSILGFGDIIVPGLLIAYCRRFDVQTGSSYIYYVSSTVAYAIGMILTFVVLVLMKKGQPALLYLVPCTLITASVVAWRRKEMKKFWKGNSYQMMDHLDCATNEENPVISGEQIVQQ

SEQ ID NO: 4785 - DNA, 2125 bp, Homo sapien
aggaaaaaaaggaagagagacagaaaggaaaacaaggcagagacaagaaaagggagaggaagaagggctcgatgcgatcggcgctcgggtaatcaggcgtcgactgctagggttctgacgcggtccccacccccgtcccgccccctgtccttccctccgccccgcgccgcggctggcagggtgtgcgtgagtttggtggcggccggctgtgcagagacgccatgtaccggctcctgtcagcagtgactgcccgggctgccgcccccgggggcttggcctcaagctgcggacgacgcggggtccatcagcgcgccgggctgccgcctctcggccacggctgggtcgggggcctcgggctggggctggggctggcgctcggggtgaagctggcaggtgggctgaggggcgcggcccggcgcagtcccccgcggcccccgaccctgaggcgtcgcctctggccgagccgccacaggagcagtccctcgccccgtggtctccgcagaccccggcgccgccctgctccaggtgcttcgccagagccatcgagagcagccgcgacctgctgcacaggatcaaggatgaggtgggcgcaccgggcatagtggttggagtttctgtagatggaaaagaagtctggtcagaaggtttaggttatgctgatgttgagaaccgtgtaccatgtaaaccagagacagttatgcgaattgctagcatcagcaaaagtctcaccatggttgctcttgccaaattgtgggaagcagggaaactggatcttgatattccagtacaacattatgttcccgaattcccagaaaaagaatatgaaggtgaaaaggtttctgtcacaacaagattactgatttcccatttaagtggaattcgtcattatgaaaaggacataaaaaaggtgaaagaagagaaagcttataaagccttgaagatgatgaaagagaatgttgcatttgagcaagaaaaagaaggcaaaagtaatgaaaagaatgattttactaaatttaaaacagagcaggagaatgaagccaaatgccggaattcaaaacctggcaagaaaaagaatgattttgaacaaggcgaattatatttgagagaaaagtttgaaaattcaattgaatccctaagattatttaaaaatgatcctttgttcttcaaacctggtagtcagtttttgtattcaacttttggctataccctactggcagccatagtagagagagcttcaggatgtaaatatttggactatatgcagaaaatattccatgacttggatatgctgacgactgtgcaggaagaaaacgagccagtgatttacaatagagcaagattttatgtttacaataaaaagaaacgtcttgtcaacacaccttacgtggataactcctataaatgggctggtggtggatttctgtctacagtgggtgaccttctgaaatttgggaatgcaatgctttatggttaccaagttgggctgtttaagaactcaaatgaaaatcttttacctggatacctcaaaccagaaacaatggttatgatgtggaccccagtccctaacacagagatgtcttgggataaagagggtaaatatgcaatggcgtggggtgttgtggaaaagaaacaaacgtatggttcgtgtagaaagcaacggcattatgcttcacatactggaggggcagtgggtgccagtagtgtcctgctggtccttcctgaagaactggatacagagactataaataacaaggttcccccaagaggaatcattgtttctatcatatgtaacatgcaatctgttggcctcaatagcaccgctttgaagattgcccttgaatttgataaagacagatcagactgataaccttaacaccataggtgcaaaatgagttgttctgaggtttttttgaaacattaaagttccaaaacatgacatttttaagaataaatttgaaatagagtataattgaatgcagagaattatgtacctctaattgcttaattttgtaatggtcttttattgtagaattggttctttatactcagggaagtaattatattgtttttactttttgaaaaaagtgttaactcttgaaataaaatattctgataaaatatgtaa

SEQ ID NO: 4786 - protein, 620 aa, Homo sapien [sequence omitted]

SEQ ID NO: 4787 - DNA, 3804 bp, Homo sapien
  Unsure 343-382: Unknown base
  Unsure 1239-1264: Unknown base
gctcatttgggggcatgaatgttctccttactaacctctcatggagtcatgtgataacagccatgtcatgtgtatggatgccaccattcttgaatttctgctagaaataagtaggttgctatgcacttagagtcatctttgcaagggactcattccaaaccaattccaatcgacctgaaagtcccttgcactaaagaaatgtgatttttttttaacccaaggagaaagttggttgtaacaatttttcaccagaattagcaatctgatagaataggcttttttaacaggaattttaaactggcggtgccagttgcagtgaaggtgaagtggctattgctttatnnnnnnnnnnnnnnnnnnnnnnnnnnnnnnnnnnnnnnnncctgaagatagagcgttgaacaaacccaatggtcttggccctcaaaaagctttatgtgacatagagcatccagctcgacaattagcaaacccctgatattattcatggacttgacatgaggtttggactattcatgagcaacagcagaaggtccatgacccctacaaatttacatttttctatggcccatatttgaaaacctcacattcggagcaggccactttatattcgtgagtgatcccaagctcactgaccaacagaaaagatgctaaaaaaatgtgtcctatcatgtgcctgctccaactgatgggtaatgtctgcctttaagccccagaatggattctccaggcacagtgtggaagagtgctgtggttgattagcaatgtctgccttgggtgaggaaaggggaacactcctcaagtgcctcctactgtcatctccattcagcctagcaccacatccccatgtagaagtgttgtcttctactgcttgccacgtacaagtgtgaaatgccaaggtgagactcgtacacttggggatttgcaatggtttttacccctcatgaaggtcagaggtggactatttgtacacatacacacatgcacaccctctcacgtcctccagaggctgaaagaccatcagcatcttggtaactgccatgcatgagcagcaaggacagccttccataatccatgccccatttcctctggaagcctggaaacttttcatttcctgttccttgctaattaacatctaaacatgcttctcatttccagccattgctgatgcttctcagttgaagtttgagccacatccctcttacagctagtgaatgagttggtagcagatactgtatnnnnnnnnnnnnnnnnnnnnnnnnnnaggggagggtgggatggggtgtgggtaagttttgccttttgttttgtttttgatgccgtatatagtgaaggggtgaggatattctaaacaaacaaaaattgaataatttattcacagaaactattaagattgtattgtaaagctcacagcaagctcagtgggcagcagctgcaacatctcaccggggaaattattttatttaacgtgagtgagatgtgggccggagaaggtagctgaagctatttataaaacgttgtgtaccttcttccgagctctctcccctttgtgaagggcgcagcaactatacccttgatggatggagatttatgcaatgtgttttactgggtagagtgacagaccttggctgtccctggaattgagaatctggaccttatttccaggcagagaacactgtcctcagaaatgggacttctgataatgaaacaggttgtccaacattttctaatacgcattctacagaacacaggttccaggaggcatcaggttggtgtgatgcagactaagggttttgtggtcaaatatccttaagaaacaaagttaagtcagtttcctttctgcaaggacttttcagccttcaatgtgtgctgtgcatggtgaatccccaaaaataatccttgagtctgtagcatttcctgaacttacatgaccaggatactctattttgcagatcaccccacagagctagggttccaccgagtatactttgcttaggttgacttagcatatctgaggtcttcaaggataaaaactgccaccccaacacccttccattaaaaaaaaaaatacaaaatagcaccacagtctccatctggtttatagcaacagaggtactttatttaatgaagcaatggttctaatcctggatactgccacggactacaattctatccctcccagagggagtggaggaagtcttgggtggtgtggacagaaggaagagaggagagggtgagtggggtatagggcccagggtggctccctactcctcaggctcaaaaggatgctcagtgggaacagatgatctcttgatgagtgcttcttcagtttcatagtttggaatcgttcactgtgtgctttttggggggttttcaatggaaattcacgttgctttgcatttctgtgtccgtctttggtcagttgtgcaagcctgctcactgtcatgtgaagatggcctttcatctggcttctctctcttaagtgagaaagattgtccttcaggggacatgacatcaataggtttctggaatgagggactctttctccccgtgttttgctttgtgttcacattttcttttctaatggcattgaaactttaaaaaaaatggattcaactgtttttgcagaatgtagaaagtattctgtgtccttggttaaagaaatccacttgtgaagtgtgcctggaaaatgaaagtttgtgttttttaaagaggaatatttgaaactgctttctatgcatgcttagctggagaaaagtacaggcaggcgtcccatctcccagccacttctcaaaggtgctgctgtgttttaaagaccaggtacagccagggcagtatttgcaaggacattcctgcttactttatccctttggttggaaagctctagatgattcccgcagctcctccagaccccgcctccctgccctccccagctggtctgggaagaggtggtctgctgacctgtggtatctcagaggggacgttcctcctcctccctgtgcaccaggtgggctgcaccctcctgcctattcaggatgtggatgccacaggagagcagcaggcagtggaaacttcagttgcactggttctcctggtggcaaaggcatgaagcacaggggtcgattaatccaggctactagaaagctccagagcaaagtgtgcgggtcccacaaatgcttggctggtggggtctggatcagtgctgagatagagttggcagaagaagcagaggcactctgcttgctttcctagccagtcctcccctaacaacacaacacaacaacacacacaatctcagctgcgccattctgtgcaatcccagtgaccaaatcccttccttgcccacctctatgtcagcaggactgaccacatcactcccccgagttcccaccaccagcatttcctccaacctttttccatcacaaccagttagaaccctacaggcaacaaggccttctagaatccgcttaacccttggctgataacaggcaaatttcagtctgctacactttgttaggtccagaaggagctgcccatactactttcttatgagcatgctcagtatggcatatggacatgtaatgtcacatctttgtggagtgtgattttctttttttacatatttgtatgcagtagagagcctgttgtagaaaacgctccctgtatcttgctgtactgttaaagaaagctgaattccacattgccaacaaaagcgtgaaaatgttcatgaaccttcctccaggaaaagccattcaagcctgattatttttctaagtaacttcaattaaattgaagaaaaaagag

SEQ ID NO: 4788 - protein, 170 aa, Homo sapien [sequence omitted]

SEQ ID NO: 4789 - DNA, 1061 bp, Homo sapien
cttctgaagaagctgcacagctgccagatgtccatccagctactacagacaaccaggattggagttgctgttaatggggtccgcaagcactgctcagacaaggaggtggtgtccttggccaaagtccttatcaaaaactggaagcggctgctagactcccctggacccccaaaaggagaaaaaggagaggaaagagaaaaggcaaagaagaaggaaaaagggcttgagtgttcagactggaagccagaagcaggcctttctccaccaaggaaaaaacgagaagaccccaaaaccaggagagactctgtggactccaagtcttctgcctcctcctctccaaaaagaccatcggtggaaagatcaaacagcagcaaatcaaaagcggagagccccaaaacacctagcagccccttgacccccacgtttgcctcttccatgtgtctcctggccccctgctatctcacaggggactctgtccgggacaagtgtgtggagatgctgtcagcagccctgaaggcggacgatgattacaaggactatggagtcaactgtgacaagatggcatcagaaatcgaagatcatatctaccaagagctcaagagcacggacatgaagtaccggaaccgcgtgcgcagccgcataagcaacctcaaggaccccaggaaccccggcctgcggcggaacgtgctcagtggggccatctccgcagggcttatagccaagatgacggcagaggaaatggccagtgatgaactgagggagttgaggaatgccatgacccaggaggccatccgtgagcaccagatggccaagactggcggcaccaccactgacctcttccagtgcagcaaatgcaagaagaagaactgcacctataaccaggtgcagacacgcagtgctgatgagcccatgactacctttgtcttatgcaatgaatgtggcaatcgctggaagttctgctgatggaacagccagccatgaacaaggtgaggaagaagaaagaggaagcgctgaattatctgaactggagaagcaataaaaattaaagtgaaggaaaatac

SEQ ID NO: 4790 - protein, 320 aa, Homo sapien
LLKKLHSCQMSIQLLQTTRIGVAVNGVRKHCSDKEVVSLAKVLIKNWKRLLDSPGPPKGEKGEEREKAKKKEKGLECSDWKPEAGLSPPRKKREDPKTRRDSVDSKSSASSSPKRPSVERSNSSKSKAESPKTPSSPLTPTFASSMCLLAPCYLTGDSVRDKCVEMLSAALKADDDYKDYGVNCDKMASEIEDHIYQELKSTDMKYRNRVRSRISNLKDPRNPGLRRNVLSGAISAGLIAKMTAEEMASDELRELRNAMTQEAIREHQMAKTGGTTTDLFQCSKCKKKNCTYNQVQTRSADEPMTTFVLCNECGNRWKFC

SEQ ID NO: 4791 - DNA, 3555 bp, Homo sapien
  Unsure 1438-1515: Unknown base
ctggctcagtcattccccacttagcctcccaagtgttgggattataagcgtgagcaccatgcctggccccaatttaaaatgtggaattcagttggtgtccaagacttatcttgagactcttaaaagcatcagtctgtaactagaacaaatacagtcttagatttacccaagtgcctagatatcattttataatgattagaattgagtattgtgggtcccctaattctgtgggtgccttaagtgagaatttctaaatgattttcacattctaaatgactttgggttttgaactctccatctagtttacttctaaaatgggaacttgaggcaattcaggtatccaggcaaatctttgtatatatttttttgtgtacatgcacacatctcgaaatccatttccgtgtttaatgttagttgtttatgtgttagtattcctgtgtctactgttttgttgttgttaatatgggtaaagtgagccctgaaatacatgctaaacaagacatgaaatgcagaaaggtacatagtgtttcaagtgcatggtagtttgatctgtgttttactttattgtgttttcttgagtgtaaagaaagaataaatcaaagttcttcatacccattttgacaaagtggaacagtggagctgttttttgcttttgtttttatttattttttgccactggtgatgatagatttcaaaaaacaaaaggtggcagcagcacaatgttcatggtgaattatctcatagtatctagattgatcaagatctgacagaaggaatgcacaaaggattctatattcttaatgatttattaattaccaggatccttttctaaattgaatgtacttttgaattactaggtttcttctttttttttgttctgcaatagtgaaagaaaactcagtagtttagtttcagtttctcatggaaattggtaaatgttagttttgacttcatctattttttatttgtttttattagcgtagagtaggaagtctcatattctactgttctatctaggatggtgaaattccaaaggtgcctaacttgagtaagggatttgtgacaagatagtacacattactataagggctattatttcctgaactggatgtccctaaaagcaaataaactgcccactatctctactctagtgctctctttgtccttatcaacatatacctccaataagtaattacataattcaccgttaaacatggacccactctaggtaaaattaccctcatggaaacattttcactgtgagaatgatgaatttaaaaattatgtttgaatcacctaaaatgtatgtgcagcttctagatggccccttagatctgctgggctctagctgtgtactttaaaaaaacaaaaacagctttattgatatataatttacatattatgtaatttacccacttttaagtatctaattcagtgnnnnnnnnnnnnnnnnnnnnnnnnnnnnnnnnnnnnnnnnnnnnnnnnnnnnnnnnnnnnnnnnnnnnnnnnnnnnnnccttttgtcttttttgcagactcatacctaacacaaatctaaagtttatcactgttgccaggataattacagcaggttatgtttggtttcatttttaagagtggaggtgttcatgattctaagctcaggaatcttgtgatcatgtattaaatatgttatctcatactataatgataaaaaagcttaatgatgtgggttgggatggatattaacataaataattgagtccgctgcttctatagcaatgctgtaggatagaacaataatgtaagtgatatatgtaattaaaaaattctagaagccacattaaaaaataaaataaacagctgaagttaattttaatattttatttaactccactacatccaaaatgttatcattttaacatgtaattgatgtaaagatttattctgatagtttgtactatttcttgtactaattttttgaaatctggtatgcattttacaaatttgggcaagccacattttaagtgctcattagccacatgaggccagtggatactgtattgaatagcacagtcctatagcatatttattaatttgtcttgtagtaagatgaaatagacaataatacggaataatatcttaaatggaaatctttgttagtctctagagccttcattgcttgataaataggacatctaaactttagatataaatcagttgtcaatgagataaaattattgccagcaaatattttccttcaaagataagtaacttttgatatggcagttggtgaaatgaaagaatataatctgccttcttgttaaatggttgactattctgtagcttgtaggtagtacgtattagaaacttgtgtatgtgggaaatatttggcataatactgttttcagtatatagtagctattttttaaggaaattagtttcatacaagaaaaagattattataaaagtgatacttttgcatgaaatattagtttgtgttgataactcttagttaacccttaaagtttaaaacagtactcaaaaaaaaataatgagaatctagtattctgtagttaactaatctataagataaattgctaaagtactagggagcttgtaaatcttaaaaatctttttatttcagtgttcattcaggttggatatatttgaaattgtagatttctatctgtacaacatctcctagttaatagaatttttttccttcccctcccttctctctcctcctccttttctaaccaaagggcattttatcaacaatcatgctgaattcaattaatatctcaagctaaaaaactatgtaattgaggttgtatctggagaagatgggaaaacattgtataatttaagcccttaattgtctgttgagcttttagggctgagtaattgcctttcatacaaataaaagctttaactcttttctcaagagtgtaccaccgtccttagaatcaggtgttttaaatccagtttcttttaattaaatgggactgtagtgatccctaccctgtagagaaatcaacagaactagagaagctaagggcttgatcaggtttcccctagaacctgtgttgcctgcctgctgtatcttccatgtctttcttattcaacttctagaagtagagaaggttgggacttgagtgtagaagaaacatcagaataatttcaaaaaacaggaagttggaactataatttttaaattattgtattgtttttacggattttacatgtatagttaaatattaaaattcatctcttgcagttcaataaaagctatagtatagattttatttttaagaagtttatataattcttttgtgaaccaatatgtaaaactagaatatttattaaactaataatatgtattagtatcaataaaatatgtatttatttttaaattggtatgaaacaaaataaaaatttgtagacactcttaaaattggtcattgatattatctttgtaatttaacattaagtactatttagtgtcatatgcctgaatttaaaggatggaatttaacctcccggaatcttaccaaaggggaattttaacccggga

SEQ ID NO: 4792 - protein, 45 aa, Homo sapien
WLSHSPLSLPSVGIISVSTMPGPNLKCGIQLVSKTYLETLKSISL

SEQ ID NO: 4793 - DNA, 813 bp, Homo sapien
ggcacgagatcattttctgtcccctcctatcttaggctgaccggttccctgatgtgttacctgcttctgctactgatccaaactgcagaacttctcattcatccccaaggcctccaggcagtatccaatggggaatcagctctaaaaggaaccagaccaacgttttccagccccttcattctggtgactgaggggaggaaagaatgggagggggtattcttgtctagtggatggaaaggaaacacactgtcaaattactatatctccttggttttctattacagtagaattctccagccatatttttattgtctatgggggaagttggagatggtgaccttgattagaagtgtctggagggggataaatggaggggataagatttcagttggttttggaaaatgttaaagtcttaaaataatgcgtcccatctgaagaattttttctaaaaccagagtttataaaaatatcactgatacagcctgccccctcatttccctgccacaggagatgtcttggactagagacacttgtttaataatagcttgtctctgatattcccagtagcttccctctgtgtgaggaaaggatagaaatgttcaggacatcatcatacaggctcctcatctacaaagttccagtagcagtgacgcctacacggaagacttggaactgcaaacaggctggggtcacctcagtgacatctgacgctgtccaaccagaagttcgatttttgttctgggggtgaaggaggaaacagactgtactaaaggactaaaataatttgtctatactaaaaaaaaaaaaaaaaaa

SEQ ID NO: 4794 - protein, 135 aa, Homo sapien [sequence omitted]

SEQ ID NO: 4795 - DNA, 1999 bp, Homo sapien
gtttacatccgccgggtgcgcggttcgccgcccgaggtcgttcggctcgggtaccatcctccgcgccatggacaccagcgacctgttcgccagctgcaggaagggggatgtgggccgagtgcgaccatgaacccgtcctgacccaggctctgacctccttcctgcccaggtacctgctggagcagcgagacgtggaggtactatgcctgcttgtgtgggcacgaggagctggtactctaccttctggccaatggagcccgctgcgaggccaacaccttcgatggtgagcgctgcctctatggggcactgagtgaccccatccgccgggctctacgcgattacaagcaggtcacggcttcctgcaggaggcgggattactatgacgacttcttgcagcggcttctagagcagggcatccacagtgacgtggtctttgtagtacacgggaagccattccgggtgcatcgctgcgtcctgggtgcacgtagtgcctactttgccaacatgctggacaccaaatggaagggcaagagtgtcgtggttctcaggcacccactgatcaaccccgtggcctttggggccctgctgcagtacctgtacacaggccgcctggacattggcgtagagcatgtgagtgactgtgagcgcctggccaagcaatgccagctgtgggacctgctcagcgacctggaggccaagtgcgagaaggtgtctgagtttgtggcgtctaagccaggcacgtgtgtgaaggtgctgaccatcgagcccccacctgcagacccccgcctccgggaggacatggcgctgctggccgattgtgccctgccccccgagctccgaggtgatctttgggagctgcccttcccttgtcctgacggcttcaacagctgccctgacatctgcttccgagtggctggctgcagcttcctctgccacaaggcctttttctgtggccgcagtgactacttccgagccctgctggatgaccacttccgagagagcgaggagccagcgacctcagggggccccccagccgtcaccctgcatggcatctcacccgacgtcttcactcacgtgctctactacatgtacagcgaccacactgagctgtcccccgaggcagcctatgatgtgctgagcgtcgccgacatgtacctgctgccaggcctgaagaggctgtgcggccgcagcctggctcagatgctagacgaggacactgtggtgggtgtgtggcgcgtggccaagctcttccgcctggcgcggcttgaggaccagtgcactgagtacatggccaaggtcattgagaagctggtggagcgggaggacttcgtggaggcggtgaaggaggaggcagcggctgtggcagcccggcaggagacggactctatcccgctggtggacgacatccgcttccacgtggccagcacggtgcagacctacagcgccatagaggaggcgcagcagcgtctgcgggcactcgaggacctgctcgtgtccatcggtctggactgttgagcccctggctgggcagccccaggggccaggagctctcttggagacaagcatgtgtatgcgtttgtgtgcagctcttcttcctgctccctgcacattgagggcttcatggggggtgcgaggggctcagtggggcttctcttccctccatgagcctggagaccccaggggaggatccatttgggatgagccccctccccccaatgcacaagccagcccccaagaccctgggggtggacaccactcagggaaacctggggtgggggtgggctttggtcttagcactttccttctccagatcccccctacccaccccagtcccaaatccagtcctctggcccttgcctagccctgaattgcttctctaagctggtgttcccatgcacagggccattcaggaagggctgggggagtgtgtgtggcaataaagcttgaaggcaccgtgggaaaaaaaaaaaaaaaaaaaaaaaaaaaaaaaaaaaaaaaa

SEQ ID NO: 4796 - protein, 336 aa, Homo sapien
MLDTKWKGKSVVVLRHPLINPVAFGALLQYLYTGRLDIGVEHVSDCERLAKQCQLWDLLSDLEAKCEKVSEFVASKPGTCVKVLTIEPPPADPRLREDMALLADCALPPELRGDLWELPFPCPDGFNSCPDICFRVAGCSFLCHKAFFCGRSDYFRALLDDHFRESEEPATSGGPPAVTLHGISPDVFTHVLYYMYSDHTELSPEAAYDVLSVADMYLLPGLKRLCGRSLAQMLDEDTVVGVWRVAKLFRLARLEDQCTEYMAKVIEKLVEREDFVEAVKEEAAAVAARQETDSIPLVDDIRFHVASTVQTYSAIEEAQQRLRALEDLLVSIGLDC

SEQ ID NO: 4797 - DNA, 2935 bp, Homo sapien
cacggctttgttccggaaagcccttaggtggagagcgatgtggggcgcggcagggggatcgcgtagaggaaccttcgcgcaccgcctctccgggtctgggaatctgctgaactccttgcctctcttggggtccctcgaacgccccagctaagaagggcgggggccttgccagggcgcgagcaacatgacgttcaaggtcttcctgtggcttctgtaaagaaatgttcacgtgggagcctgtccacatgggctgtactaaggatctggcacgaggaagaaatatcactgcagaacctgaagccctccgttggaagggtcgttcactcgagtacctattctaagtaacagtgacacaaaacacatgttagaaaaaaacaaaaagtatggtaggttatactgttttttaaaagaaacttttatttatgccttttgctgttaagtcctctaattttacattggaactgagtcattcttggagcaaaactagaataggtttgtatttgttttctttttggatgtgtatctaaattgtacataattaagaaaaagcaagtaatggaaaagctggagatgtagaacttagttccttctaacttagtatgcaattgaaagcctcaagtcaagactcctgtgtattgttttgtattaggactctattgtacaaatatttgagtaccttaatatgagtcagttactttttctagatcttggatccatgccagacaacgcacattctgcagacactggttactccagtggctccttactggaaacataatatcagtgataagtgctgtgaagaaaataaaacaatgatgtgctggtatggatttttaacttttttatgtgatgaaccacagaatgatggttttaaatgtatgaaatacatagaattgcaacagaaaccagttatgaaataatgaagatattaaatatgacatctatattttagtaaagcattagtgaggactgtaaatgatctttaaagaatttggcttaaatttaatctaaaattgctatcaggtatttcacatcgctgtaatttttgcctgcattcgtaactgaagagataagtaaatgtcagaggttaagataaatctttttctttttttacctgtccatatttacaaacattctgcgttccgtacatagacgcctggataagaacccctgtgcaagaatgactttggtgctactttaaaaaaagtggttggggaagacctcataggaaatgacatcaataatagattgcatgataacctatactagttcttactgttaccaatttaaattctaactgcttaaaagctaacacggtccttccctttttttgagcacctgatttgaagtactttgagtaggcctcaagtgtcgtatgcaagtactaatctagggggtgtgcctttttcaaaagtgatttttggagaagataggatgtagtattatagcaaggaaaattcagcatctgggatgatcatttccttctgattagagaaatttaccttgttaatattctgttcacccaacccttctaccctcagtgttgaccaatactggaaaaaatttagggctttggagtgaaattttaaaagttcaaaaccttgatctattaattagtttgcttaccttgaggaagttgcttatcttaatcttctatttgaacttcaagtacaaaaaccctactcacggacttaactgtgaccattaaatgagataaccaaaaggctgaagatgatagtgagttgattttaccttttttctacatacagatgtttcagttctttcattagtggttgaaggtctgcgttctttttctccctccactccctccttgactacccccagaatgagctttgatggtctctactgggcctttgggggggatacattatcctgttgtttttgttctgttacttatatataatactcatggatttatttctacttctcttccattttctaatttataataacatgtgcatcttgttttccctgccaaactaaatttcgtgagggggtacatactgcacagttttttttgtcacatactgcttatgacacatgaatatgcagagcttgtcaagctctttaattaagtttaaaatgctaattgagtgaatcaaaacttaaccattatggttaggctaaaaatgtcagcttgtgtttatatagtgcttacctcagtattggaaatgccatgagtttagtatcagaaggacattattactagtgcattttaaagtgataccagtcatagttgcaaaagaaagtacacaatgggaaatggaagagaaatgtagggaatcaaaacaactagttttttcctttataacggaagttttataattcatcttttatgtaagtgtaattctcattaaaaataccctaaagcttaaagtttgcaaggctgcccagcctaacccacaacagtttgatgctgccccctagcgtttgattcccttcaccttttgctaaaataaggtaatgtttaaattacaattagatttacttactgctgtaaatctggtctattttagtttcctctgggtagttagtgttgctaataagatggacgtaagtgtttttgaactggtgaattctgattgcttttagcccccagttttccaaataggggtgaattttgggtagagatagaacaatcaccaagttaccttgctccaaaaaagaaatttacgtatgggattgttttcaaagcgggaagttagctgtgtaaataacaacaattttatatatttaatctgggcttctccttatcttgaatgatataaaaatctactttctagattaatttagttccatataactttgtattgctttgactgtactgataataaagtttgaaagtgttaaaaaaaaatctatgtcgggtgcggagaaagaggtaatgaaatggcaggaattcgatatcaagctt

SEQ ID NO: 4798 - protein, 49 aa, Homo sapien
TALFRKALRWRAMWGAAGGSRRGTFAHRLSGSGNLLNSLPLLGSLERPS

SEQ ID NO: 4799 - DNA, 1276 bp, Homo sapien
ggcaggcgcgtggccgggccgcggcgcgatgagtggggcccgggcggcgcccggggccgcgggcaacggcgcggtccgggggctgcgggtggacgggctgcccccgctgccaaagagcttgagcgggctgctgcactcggcgtcgggcggcggcgcgtctgggggctggcggcacctggagcggctgtacgcgcagaagtcgcgcatccaggacgagctgagccgcgggggcccgggcggcggcggggcccgggcggcagcgctgcccgccaagcctcccaacctggacgccgctctggcgctgctccgcaaagagatggttggtctccgccagctggacatgtccttgctctgccaactgtacagcctctacgagtcgattcaggagtacaagggggcatgccaggcagcctccagcccagactgcacttacgctctggagaacggcttcttcgatgaagaggaggaatatttccaggagcagaactccctgcacgacaggagggaccgaggccctcctcgggacttgtcactgcctgtctcctccctctccagcagcgactggattctggagtccatctagagggtcttgggagggatgtgactgttgggaagcccttcctactggacacgctgtcatcatttgctgcttctcttgcaagaaagcacctccgttgtggacggtcctcgggcacaggggatgagcgctaccagtttcatttgtaggcagggagttctccgcggatgcatggtggcagtctgctttgatggcagcagttatctgcttaggtgacctagaggtcctcagcagtatcctccacacctatttattgaggtgcacctgctggggattcataatgagaatataacaagaggatctcggtgaaaggccttagtgggtgttttgtgtgaggtggcttgtagctagctacttccttacagatggtagagtattccaatcctctttgtgttagggttcttgcttccagtttgggatgtattaaaaccaccatttcactgcttcccttcctcaatatgctctgcagcttttcttgctgtttaaacctctcgcctcagctttatttatttgtaagctgcattactaactgcccagtgattcggtgaaagctttttactgaaaaagttaacatttctagtcatcccaatcaactggcttttttcaaccaaaattttatatcattctttgtctatcagatacgagaggaaggaagataatacgaagacatgttgaatagtgaaaaaaaaaaaaaaaaaa

SEQ ID NO: 4800 - protein, 184 aa, Homo sapien
MSGARAAPGAAGNGAVRGLRVDGLPPLPKSLSGLLHSASGGGASGGWRHLERLYAQKSRIQDELSRGGPGGGGARAAALPAKPPNLDAALALLRKEMVGLRQLDMSLLCQLYSLYESIQEYKGACQAASSPDCTYALENGFFDEEEEYFQEQNSLHDRRDRGPPRDLSLPVSSLSSSDWILESI

SEQ ID NO: 4801 - DNA, 1506 bp, Homo sapien
ggcacgagggaatggcggcggctgcggactcgttctcaggcggccccgcgggggtgcggcttccgaggtcgccgccactcaaggtgctggcggagcagctgcggcgcgacgcggagggcggcccgggcgcgtggcggctgtcacgggcggcggcgggccgcgggccgctggacctggcggccgtgtggatgcagggcagggtagtgatggcggaccgcggcgaggctcggctgagggacccgagcggggacttctcggtccgcggcctggagcgggtgccgcgcgggcggccctgtctagtcccaggaaagtatgtgatggtgatgggagtggttcaggcctgcagccctgagccctgcctgcaggctgtgaagatgacagacctttctgataatcccatccatgaaagtatgtgggaactggaggtagaagatttacacaggaatattccttagagtatgttggaactgtcgttaaaaacaaccaaaatcccgaaactatttagaagcttataatgatgtgggtttcatggacacttttcaatgcgtatttttcaaatgcttctcagagagccttgctttggttgaccaaggagtccggatgtaggaatgtttaaatcctcggatacttcagtgacacagcctctgctgccccttgctttgcctgtgtttgctgatgaaaagcagatgcttgtgtttcattttccttcctggtttgtgtgtgttaattctctctctctctctcagacacagaagtctcatgttgcattttccaaattttatgagtgatgatactttttccattactgctgcgtccctgttttacaatgcaaaatttaagtacggtcattgcccatggtgattaaagtgtggttatgggcaggaagacagactgtgtaaaaaaggaatgacatcctggctcctcatcttcttcatcagcaactaccataaccagtttgcgagtcaaatggcatttcctaacggcaggcatggcggcccctgaaagacaacagctccctttctgcttcggacaccactcaaacatttagacgcagctctatcccttttcctagctagagaaggtgatgccttcttccattactcagagatgttgagacgttttcagaatttcttgttgaaatgaaaaacatcaagataaaggacgcctttcaggcattagctaaacttccacttcataactttcggcgagacgtggtgagcctcctggtgtagagttcttttgtctttgtatggaatgactttttgctgtgatggttttgaatgttgggtttctgctgtctgcttagtacccatgcctgaattttttgagattgtaaatatcaaaggagttagattgtgtcctgacatggttgtagactttcacctggattattgatattctacctctaataaatttttaataggcaaaaaaaaaaaaaaaaaaaaaaaaaaaaaaaaaaaaaaaaaaaaaaaaaaaaaaaaaaaaaaaaaaaaaaaaaaaaaaaaa

SEQ ID NO: 4802 - DNA, 4356 bp, Homo sapien
ggcggagccgcctcggacgataaggaaattgagatttggagaagttaaataaccaagacttcacagacaaagtctcactccttttgcccaggccggtgtgcattggggtaatctcggctgactgcaacctccgtcccctccgagttcaagtgattctcctgcctcaacctcccgagtagctgggattacaggcaaagccatgactacagtagtggtacatgtggactccaaagctgagctcactaccctgctggagcagtgggaaaaggaacatggcagtgggcaggacatggtacctatccttaccaggatgtctcaattgattgaaaaagaaactgaagagtatcgtaaaggggatccagacccatttgatgatcgacatcctggtcgagctgatccagagtgtatgctgggccacttgctgagaatactcttcaagaatgatgatttcatgaatgcactggtgaatgcatatgtgatgacaagccgagagccccctttaaacactgcagcttgcagactcctattagacatcatgccagggctggaaactgctgtcgtctttcaagaaaaggagggaattgtcgagaatcttttcaaatgggcccgagaggccgatcaaccattgaggacatattctactggactgttaggaggtgctatggaaaatcaagacattgctgccaactatagagatgaaaattcacagctggtggcaatagtgcttcgaagactgagggagctacagctacaggaagtggctttgcggcaggaaaacaagcgtcccagtccacggaagctctcttctgaaccccttttgcctctggatgaggaggctgtggatatggactatggtgacatggctgtagatgatgctgaaattcagaagtcagcacttcagattatcatcaattgtgtgtgtggcccagataaccgaatatccagtattggtaaatttatctctggtactcctcggagaaagctgcctcagaaccctaaaagcagtgagcacaccctggccaagatgtggaatgtggttcagtccaacaacggcatcaaggtgctcctgtccttactgtccattaagatgcccatcacagatgcagaccaaatccgggccctggcctgcaaagccctagtgggcctgtctcgcagtagcactgtccggcagatcatcagtaaactgccccttttcagcagctgccagatccagcagctgatgaaggagcctgtgctgcaggacaagcgcagtgaccatgtcaagttctgcaagtatgctgctgaactcattgaacgggtgtcaggaaaaccacttctcattggcactgatgtttccctagcacgactgcagaaagcagatgttgttgcccagtcaaggatctccttccctgagaaagagctgcttttgttgatacgaaaccatcttatttctaaagggcttggagaaacagcaaccgtgctgacaaaagaggctgacctgcccatgactgctgcctcccattcttctgcctttaccccagtcactgctgctgcttctcctgtctctctaccccgaacccctcgtatcgctaatggcattgcaactcgtctgggcagccatgctgctgtgggtgcctctgcgccttctgcccctactgctcatcctcagccacggcccccccagggtccgctagctctgcccggcccatcttatgcaggcaactcccctttgattggtagaatcagttttatcagagagaggccatcaccctgcaatggcaggaaaatcagagtgttgcggcagaagtcggaccatggtgcctacagccaaagcccagccataaaaaaacagctggacagacatcttccttccccacctacgctggacagtataatcacagagtatcttagagaacaacatgctcgctgcaagaatccagttgccacctgcccacctttctccctctttactcctcaccaatgtcctgagccaaaacagaggcggcaagcgccaataaactttacgtcaaggctaaaccgcagggcatcatttccaaagtatggaggggtggatggcggatgctttgataggcaccttatctttagcagattccgtcctatttcagtgttccgggaagccaatgaagatgagagtggcttcacctgctgtgcattctcagcacgggagcggttcctgatgcttggcacctgcacagggcagctgaagctctataatgtgtttagtggacaggaggaggccagctataactgtcacaactcagccatcacacatcttgaaccttccagggatgggtccttgctgctgacatctgctacttggagccagcctttgtctgcactttggggaatgaagtcagtatttgatatgaagcattccttcacagaagatcactatgttgagttcagtaagcactcccaggatcgggtcatcggcacaaaaggagacattgcccacatttatgatattcagactggcaacaagctgttgactctgtttaacccagatcttgccaacaactacaagaggaactgtgccacctttaatcctacagatgatcttgtcttaaatgatggcgtcctctgggatgtccgctctgcacaggccatccacaagtttgacaagttcaatatgaacatcagtggtgttttccatccaaatggactggaggtgatcattaatactgagatttgggaccttcgaacttttcatcttttgcatactgttcccgctctggatcagtgtcgcgtggtgttcaatcacacgggaacagtgatgtatggagctatgttgcaggcagatgatgaagatgacttaatggaagagaggatgaaaagcccctttgggtcatccttccgaacatttaatgcaactgactacaaacctatagcaaccattgatgtgaaacggaacatctttgacctgtgtacagacaccaaagactgctatcttgctgtcattgagaatcaaggcagcatggatgccctgaacatggacacagtatgcaggctgtatgaagtgggcaggcagcgtctggcagaggatgaggatgaagaggaggaccaggaagaggaagaacaggaggaagaagatgatgatgaagatgatgatgacaccgatgatttagatgagcttgacactgaccagttgctggaggcggagttggaggaggacgacaataatgagaacgcaggggaagatggggacaatgacttctctccctctgatgaggagctagcaaaccttctagaggagggagaggacggggaggatgaagactctgatgcagatgaggaggtggaactgatcctgggggacactgacagctctgacaactctgatttggaagatgacatcatcttatctctgaatgagtgaggagccatcactgcttggaagagattcttggcaggcgagaaactgagtcaaatgaattcagaacatattcccttctctttctcccagggctgtctgtcttttaaggagctgcatgccctgcattcagaagattatggcttagagagcctcattggcacccgagggtccttccagaatcaataaccaccacaaaaatgacaacagggactaggccctactctgcaccccccacatccaccccccaccatttcctaggatggacatatctttcaaggggaaaaaaaaaccatgtctctggggtatttcacaatatattttctttgtatagtgttctttacttaaagaacaagaaatagttttttataaaactttaaaaaggaaaaaaaaacaggcatttataactgagggtatgaacttatatccaccaggtctcttgtccctgcacttcattttctttggaagaaaatgatgtctaaagaacaatatagaggcatttttacatacgtatttaaatgaaaaggaaaatcgtggtttcttaaattgataaggattaagaatattttattataaatataatatatgattttttaacctgttttgttgcctcatatgctgtcaggttaatttgttttccttcgtgccagaggtggggaggaaggcactctgtctgctgggtaaatgcctaaattcactcaccttcatggtttgggggcagcatggtcattgtggatattggttttgtggagttgagggaacttaggatataagttcactccctctatttttctttgtgattcagtttttcaaaaatctttttttcttccctttctccccattgtggaaattacaaatcaaaggcctttttctttaatgtaaagtgtatttatttaaaaaaaatacaaaataaactacaagtctgtctttgttaaaaaaaaaaaaaaaaaaaaaaaaaaaaaaaaaaaaaaaaaaaaaaaaaaaaa

SEQ ID NO: 4803 - protein, 1058 aa, Homo sapien
MTTVVVHVDSKAELTTLLEQWEKEHGSGQDMVPILTRMSQLIEKETEEYRKGDPDPFDDRHPGRADPECMLGHLLRILFKNDDFMNALVNAYVMTSREPPLNTAACRLLLDIMPGLETAVVFQEKEGIVENLFKWAREADQPLRTYSTGLLGGAMENQDIAANYRDENSQLVAIVLRRLRELQLQEVALRQENKRPSPRKLSSEPLLPLDEEAVDMDYGDMAVDDAEIQKSALQIIINCVCGPDNRISSIGKFISGTPRRKLPQNPKSSEHTLAKMWNVVQSNNGIKVLLSLLSIKMPITDADQIRALACKALVGLSRSSTVRQIISKLPLFSSCQIQQLMKEPVLQDKRSDHVKFCKYAAELIERVSGKPLLIGTDVSLARLQKADVVAQSRISFPEKELLLLIRNHLISKGLGETATVLTKEADLPMTAASHSSAFTPVTAAASPVSLPRTPRIANGIATRLGSHAAVGASAPSAPTAHPQPRPPQGPLALPGPSYAGNSPLIGRISFIRERPSPCNGRKIRVLRQKSDHGAYSQSPAIKKQLDRHLPSPPTLDSIITEYLREQHARCKNPVATCPPFSLFTPHQCPEPKQRRQAPINFTSRLNRRASFPKYGGVDGGCFDRHLIFSRFRPISVFREANEDESGFTCCAFSARERFLMLGTCTGQLKLYNVFSGQEEASYNCHNSAITHLEPSRDGSLLLTSATWSQPLSALWGMKSVFDMKHSFTEDHYVEFSKHSQDRVIGTKGDIAHIYDIQTGNKLLTLFNPDLANNYKRNCATFNPTDDLVLNDGVLWDVRSAQAIHKFDKFNMNISGVFHPNGLEVIINTEIWDLRTFHLLHTVPALDQCRVVFNHTGTVMYGAMLQADDEDDLMEERMKSPFGSSFRTFNATDYKPIATIDVKRNIFDLCTDTKDCYLAVIENQGSMDALNMDTVCRLYEVGRQRLAEDEDEEEDQEEEEQEEEDDDEDDDDTDDLDELDTDQLLEAELEEDDNNENAGEDGDNDFSPSDEELANLLEEGEDGEDEDSDADEEVELILGDTDSSDNSDLEDDIILSLNE

SEQ ID NO: 4804 - DNA, 2135 bp, Homo sapien
ggcacgaggggcgtttcctccaaggctgcccaccagaaggacctgcccgagagggtagagggcatagggtcaagatcaagataaggcagctccagcccctggaaggccagagacttgccagtgtcccactagcgggctcttcgcaagaatccccccgggcccgccgcagccaggcggcggccggcagagggcgctgctcgggcatggcggaggagcggccgggggcctggttcggcttcggtttctgcggcttcgggcaggagctgggctccggacgcgggcgccaggtgcacagccccagtccgctgcgggcgggcgtcgacatctgccgcgtgagcgcgagctggagctacaccgctttcgtgacccgtgagcactccccgccccgtccccacttattccagccgcgctccccagtcgcctccccgcaccgctgtggccagtccagtttgtctcccccgttcaggccgccagccccacattctgggttggtccccaattcgaccccttcccaggaacaccccgctccccccatccccgccgcctccattctggccaccctgctccaatccgccccgcaggtggaggccgcttggagctgtcgggctcagccagcggcgcggcgggccgctgcaaggacgcgtgggcctcggaggggctcctcgcggtgctgcgcgccgggccggggccggaggcgttactgcaggtctgggcggccgaatcggcgctgcgtggggagccattgtgggcccagaatgtggtgcccgaggccgaaggggaagacgatccggccggtgaggcccaggctgggaggctacccctgctgccctgcgcccgtgcctacgtgagcccgcgggcgcccttctaccggcctctggctccggagctgcgggcacgccagctggagctgggcgccgagcacgcgttgctgctggacgctgctggccaggtgttctcctggggcgggggcaggcatggacagctgggccatgggaccctggaggcagagctggagccacggctgttggaggcgttgcagggcctagtcatggctgaggtggccgcggggggctggcattctgtgtgtgtgagtgagactggggatatttatatctggggctggaatgaatcagggcagctggccctgcccaccaggaacctggcagaggatggagagactgtcgcaagggaagccacagaactgaatgaagatggttctcaggtgaagagaacgggtggggctgaggatggagcccctgcccccttcatagctgtccagcccttcccggcattactggatctccccatgggctcagatgcagtcaaggccagctgtggatcccggcacacagctgtggtgacacgaacaggggagctctacacctggggctggggtaaatatggacagctgggccacgaggacaccaccagcttggatcggcctcgccgtgtggaatactttgtagataagcaactccaagtaaaggctgtcacctgtgggccgtggaacacctacgtgtatgctgtggagaaagggaagagctgacatgtgtacgtatatgtatatgcaacacctgtgagacccccattcaggtcaaggaaaaccattgcctgcaccccaagggccccatatttgcccctccccatcacagtcctgcccttcaccctcaagcacggtcctaaacttgtctgcactttagaaacacctggagagcattgaaaactctgctgcctaaggtcagcatcaatcaaaacaatgaaatcaatgaaacaatgaaaccagagcttctaggtgtgtggcctggatagtggtagattcaaagctccacccacctcatcccaggtacatttgatgtgcagctgagattggggcacattccaggtcatcgtcttctgtcagtcatttccctgctttcgtttgaattttaccattcttgtatgcagccttatacgacatagttgtgtttgcttttgagtgttagataaatggaatcctgtgtatgtgcttttgtgtcgtttttgtcactcagcattgtataatccatccttgttgggtcctggagttcatttttaatgctatatggtgttctgttgtatgaataatacctcaagtgatacaaaaaaaaaaaaaaaaa

SEQ ID NO: 4805 - protein, 165 aa, Homo sapien
MAEVAAGGWHSVCVSETGDIYIWGWNESGQLALPTRNLAEDGETVAREATELNEDGSQVKRTGGAEDGAPAPFIAVQPFPALLDLPMGSDAVKASCGSRHTAVVTRTGELYTWGWGKYGQLGHEDTTSLDRPRRVEYFVDKQLQVKAVTCGPWNTYVYAVEKGKS

SEQ ID NO: 4806 - DNA, 5991 bp, Homo sapien
accatgattaaaacagattttctaccaaaagcaaagcaaagagaagggactttttcaaaatctgattctgaaaaaatagtgaagggaactaagagatcaagccggagagctggtaaagctgaacaaacagggaataaaaggtctaagcccttaatgagatctgagccggagaaaaatactgaggaatctgttgaaggcattgtagtcttagaaaataacccacctggtttgcttaatcaaacagaatgtgtgtcagataatcaggttcatctttctgaatctacaatggagcatgacaatacaaagcttaaagcagcaacaatggaaaatgctgtattattggaaactaatactgtagaggagaaaaatgtagaaattaatttggaatccaaagagaatacacccccagtagtaatatcagcagatcaaatggtaaatgaggatagtcaggttcagataactccaaatcagaaaacccttagacggtcttcaaggcgacgttcagaagtagtagagtctaccactgaaagccaagataaggaaaatagtcatcaaaaaaaggaacgacgtaaggaagaagaaaaacctcttcagaagagtccattgcatataaaagatgatgtgttacctaaacaaaaactgattgctgaacaaactctacaggagaatttaattgagaaaggaagtaatttacatgagaagactcttggggaaactagtgctaatgcagaaactgaacaaaataaaaaaaaggcagaccctgagaacattaagtctgagggggatggtacccaggacattgtagataagtcctctgagaaactagtcagaggccgaacacggtatcaaactagaagagcatctcagggtttgctttccagcattgaaaactcagaatctgatagttcggaggcaaaagaagaaggttctaggaagaagagatctggaaaatggaaaaacaaaagcaatgaaagtgttgacattcaagatcaagaagagaaagtggtgaaacaggaatgtataaaagctgaaaatcagtcacatgattataaagcaacttctgaagaagatgtaagcataaaatctccgatttgcgaaaaacaagatgaaagtaatactgtaatatgtcaggattctacagtaacttcagatttgttgcaagttcctgatgatttaccaaatgtgtgtgaggaaaaaaatgaaactagcaaatatgcagaatattcctttacaagtctacctgtgccagaatcaaatctaaggactagaaatgccattaagagattacataagcgagactcttttgataattgtagtttgggagaatcctcaaaaatagggatatcagatatttcttcgctttcagaaaaaacttttcaaacacttgaatgccaacacaagagaagtaggagggtgaggagatctaaaggttgtgattgctgtggggaaaaatcacaacctcaggaaaagtcactcattgggttaaagaatacagaaaataatgacgtagagattagtgaaacaaaaaaggcagatgtgcaagcacctgtaagcccatcagaaacttctcaagctaatccatattctgaaggacaatttttagatgaacatcatagtgtgaattttcatttgggtctcaaagaggataatgatactattaatgattcattaattgtttctgaaaccaaatcaaaagaaaacactatgcaagaatctcttccttctggaatagtaaactttagagaggaaatttgtgatatggattctagtgaagcaatgtctcttgaaagccaggagtcacctaatgaaaattttaaaactgttggcccgtgtttaggagactcgaaaaatgtttcacaggaatctttggagacaaaagaagaaaaaccagaagaaaccccaaaaatggaactgagtctagagaatgttactgttgaaggaaatgcatgtaaagtaacagaatccaatctagagaaagcaaaaactatggaattgaatgtaggaaatgaagctagctttcatggacaagagagaaccaaaactggtatttctgaagaagcagcaatagaagaaaataaaagaaatgatgactctgaagcagacacagctaaactgaatgccaaagaagtagcaactgaggaatttaattcagatattagtctttctgataatactacacctgtaaaattgaatgctcaaactgagatttctgaacaaacagcagctggggaactagatggaggaaatgatgtatctgatctacactcatctgaagaaacgaataccaaaatgaaaaataatgaagaaatgatgatcggcgaggcaatggctgaaactggccatgatggtgaaacagagaatgagggcataactaccaaaacctcaaagcctgatgaagctgaaacaaacatgttgactgcagaaatggacaactttgtttgtgacacagttgaaatgagcactgaagaaggaatcattgacgctaataaaactgaaacaaatactgagtatagtaaatctgaagaaaaattagataacaatcaaatggtaatggaaagtgatattttacaggaagatcaccatacttcacagaaagtggaggaaccatcacagtgtctggcatctggaacagctatctctgagctaataatagaagacaataatgcatctcctcaaaaactaagggaacttgatccttcacttgtgtcagcaaatgacagtcctagtggcatgcagacacgctgtgtctggtctcctttggcttctccgtctacgagcattttaaagagaggactaaaaagatcccaagaagatgaaatctcatcacctgttaataaggttcgccgtgtctcctttgcagatccaatataccaagcaggattggcagatgacattgatagacggtgctctattgttaggtcccattcttccaatagttctcccataggaaaaagtgttaaaacttctcctactacacaatctaagcataataccacttcagccaaaggatttctgtccccaggatcacgtagccctaaatttaagagctcaaagaagtgtttaatttcagaaatggccaaagaatccataccatgcccaacagaaagtgtttacccaccattggtgaactgtgtggcaccagttgacatcattttacctcagattacatcaaacatgtgggcaagaggcctgggacaactcattagagctaagaatataaaaactattggtgatttgagtactcttacagcatctgaaataaaaactcttcctatccgttctccaaaagtgtccaatgtaaaaaaggctctcagaatatatcatgagcagcaggtgaagactcgtggactagaagagattccagtttttgatatttctgaaaaaacagtaaatggaatagaaaataaatctttgtcacctgatgaagaaagacttgtctcagatataattgatcctgttgctttagaaattccattatccaaaaaccttctggcacagattagtgctcttgctcttcagctggattcagaagatcttcataattattcaggaagccaactatttgaaatgcacgagaaactaagttgtatggcaaactctgtaataaaaaatctacagtcacgttggagatcaccatcccatgaaaattctatttagtattttcagagaaaattgaaggtttttttaaacatcactggatttcttgattgaggaaacaagttctgaaataatagcacaatttcaaagaagagactctttgcaaagttgataacatttcaaaccctgaaggacagtgacttattatgtaagttcaattttgtaagttcattatgtaagatccttttttttttcataatatgtattcttggctgctatgcgtggtttttcaggaaatttaattatcttactgagatgtgaaagcaaaactagtaacagaacttacattttatttcatgctttcttaaacccgtgcatattctggtgaaacatgtaaaatactttaagtaaaattgaacatttttatttgaatttttgctgaactgataaaggtgtttatatttttgtttgttggtttgtttaattcatgtttgttgggactgaggtttaggaagtttgttactggttaaaaacctcaaatgaaatgcgaaagaatttgaatttttcctgcatatgtcaactttggacagctttcaagaaaaatgagaaaagtttcaacttctggcggttaaaatattaatgcagaatttactaagattttattcatttgcattagcaaatattcatgcagcagcagttgactgaaaatttattcttatgagacgtatagtattcatttttaaatgcatgattgtacattatgtatagacgacaatgtttttaatttataaatttcattctttgttaattgcatgggtttttctgcagcttattgtgaataccttggttctgttcaatagaaacattttgtatatattaaatactgaaatatcagtatcgacggtggaagtgcttcatgggcttgctgcacatatttgtaggatactgtatctgcaaatgcaacaacaaatagttttgtacttggttaacagtcttagttaaaacatgagtttattttctaaaagtatccagaataagtaaaattatagaaataagaaaatgttacacaactttgctgttcatacccttaccttcttactacttttggtttggaggagggtatcaccactagaaagtgtgcctccttaagatttcttaaaggaaagttagtttcagtatttcacagcaagttggactacaaaatctagagttgatctgctttttaaaccttcatttaaaagcaaacttggaagaaatttgaaactgatgtttttaatatatgtctgtgttgcctaggttttctttttttaaagaggtatgtaattaaaacctttgtaaaatttgccaactaatattagtgcctgacttcccatatttgtttcatctttttaactgacagtatatctcacttcttctttgaatagaatgagtgagtgatctcagttttcacattttattcagaagctaatccctacttagcaaggcacacattctacagcaagtcatagaaagtttaatccttgtgcctccttagctctcgtatattcagggatctctataaaagttggtgtcttttttcatcatcataaattcatcataatcacagatatttttgggtctaagatattcatataccaaggatggttttgtaaagaattctgggatcattgaattaaggattgtggcttgaagtaactaaagaaaaatactaatttccttaaaaggaattataattatgatttacattttacatcattaatttcccaaattatatttaaccgtaaggaggtgcacatgagtttttagcaaacaggtatgaataagcagctatgtatatgtgtttggggcagaggggagcagattactttaacacacttcagaattaaaatcagttcgtttcatgactctgtgccttaacgtttgtgtgaactaaacttgctgattgaatgaaattcttgggaagccgaacagtaatagcagaaaatgtgaccaaatgagtatcatgtacttaaatcactgaattttatataagcacaagtattaattttaaaaacattatagtttaataaagctgcatttaaaaatatttgggagcaaagacaagcatgctaaatcttcattttgctatggctataagcatatatttttggcaacttatttgcaatattcttgccttaaagtttcctgcaaatttcccccttagtaattcccgaatagcaaaacattaatattccatgattagctctactgtgttgtctcactattaaaatggaattcgttttttcaaatcttttctaatggttaataaaacaaatgtcagatcataataacactcaaatgtgtcttaattgtcttgtgcatatttaagaagaaaaaactagtggcatacaggat

SEQ ID NO: 4807 - protein, 1218 aa, Homo sapien
TMIKTDFLPKAKQREGTFSKSDSEKIVKGTKRSSRRAGKAEQTGNKRSKPLMRSEPEKNTEESVEGIVVLENNPPGLLNQTECVSDNQVHLSESTMEHDNTKLKAATMENAVLLETNTVEEKNVEINLESKENTPPVVISADQMVNEDSQVQITPNQKTLRRSSRRRSEVVESTTESQDKENSHQKKERRKEEEKPLQKSPLHIKDDVLPKQKLIAEQTLQENLIEKGSNLHEKTLGETSANAETEQNKKKADPENIKSEGDGTQDIVDKSSEKLVRGRTRYQTRRASQGLLSSIENSESDSSEAKEEGSRKKRSGKWKNKSNESVDIQDQEEKVVKQECIKAENQSHDYKATSEEDVSIKSPICEKQDESNTVICQDSTVTSDLLQVPDDLPNVCEEKNETSKYAEYSFTSLPVPESNLRTRNAIKRLHKRDSFDNCSLGESSKIGISDISSLSEKTFQTLECQHKRSRRVRRSKGCDCCGEKSQPQEKSLIGLKNTENNDVEISETKKADVQAPVSPSETSQANPYSEGQFLDEHHSVNFHLGLKEDNDTINDSLIVSETKSKENTMQESLPSGIVNFREEICDMDSSEAMSLESQESPNENFKTVGPCLGDSKNVSQESLETKEEKPEETPKMELSLENVTVEGNACKVTESNLEKAKTMELNVGNEASFHGQERTKTGISEEAAIEENKRNDDSEADTAKLNAKEVATEEFNSDISLSDNTTPVKLNAQTEISEQTAAGELDGGNDVSDLHSSEETNTKMKNNEEMMIGEAMAETGHDGETENEGITTKTSKPDEAETNMLTAEMDNFVCDTVEMSTEEGIIDANKTETNTEYSKSEEKLDNNQMVMESDILQEDHHTSQKVEEPSQCLASGTAISELIIEDNNASPQKLRELDPSLVSANDSPSGMQTRCVWSPLASPSTSILKRGLKRSQEDEISSPVNKVRRVSFADPIYQAGLADDIDRRCSIVRSHSSNSSPIGKSVKTSPTTQSKHNTTSAKGFLSPGSRSPKFKSSKKCLISEMAKESIPCPTESVYPPLVNCVAPVDIILPQITSNMWARGLGQLIRAKNIKTIGDLSTLTASEIKTLPIRSPKVSNVKKALRIYHEQQVKTRGLEEIPVFDISEKTVNGIENKSLSPDEERLVSDIIDPVALEIPLSKNLLAQISALALQLDSEDLHNYSGSQLFEMHEKLSCMANSVIKNLQSRWRSPSHENSI

SEQ ID NO: 4808 - DNA, 1844 bp, Homo sapien
gaacaccatcgcgctcagctggtggcctgtcttttgcccatcctcatttccttccttttggatgaaaattctctgggatcagcaacttccataatgagaaatttacatgactttgctctacaaaatctcatgcaaattggacctcagtattcatctgtttttaaaagtttagtggcttcttctccagccctaaaagcccgccttgaggctgctataaagggcaatcaggaaagtgtcaaagtcaagataccaacatctaaatatactaagagtcctggaaaaaactcaagcatccaattaaagaccagtttcctctgattttttttttggaatagtaagcaccttaatataataaatacttgatcattgcctttggtgacaaaagggacattgtagacacaagtgcccttagaggtctagttgattgttttaccttaaatagctgtgactcttcaaagtaacagcatacttaacatttttgtgtgtgtgcgtggggtttgtgttttgttttgttttgtttttctatttaaaaagacaatggagctaacttgccaggaattttaagaaagtgctaaagaactaaacttactaaacaatccactgctttaaaaatgaaatgaatttcttctaacagtccatacatatgtggtatacttaatactgtgacagatataaatatgactctagtgtaaattatctgcactaatattgtatcccaattgctgatttaaaattctgctttggcccggcacagtggctcatccctgtaattccagcactttggaaggccaaggcgggcggatcacgaggtcgggagtttgagaccagcctgaccaacatggtgaaaccccgtctctactaaaaatacaaaaattagccgggtgtggtggcacacacctgtaatcccagctactcaggaggccgaggcaggaaaatcgcttgaacctggcaggcagaggttgcagtgagccaagattgtgccactgcactccagcctgggcgacagagtgagactccatctaaaaaaaaaaaaaaaaaaattctgccttattcagtaattgtattaaactttctctgatttctccaagaagataaaatgattggagagctatttaggaaacctggtctaggattatccagtatacaatagtacaaattacttacagccttacagtgcaacataagatttggtgtctatatcatggttttccaccatcttttggtttagtttatattgggttcagaaattgagtcttactcattttaaatagaataagccatttccactatttttcaaatggatttttctgtttacctctgttcttaccaattttgttcattttcatttgtggcaaacatttgtatcaatgagttttaacctaggttcatatctacattgtatttagatcaactatgggtttatataaatgccaaatttagtacaacaaatttaggtcatcaggtgaatacaagtattttttttaacaggaaacattttattatagaaaaaagattaatgataaagtcatattggttgaaaaatattttttaactgtgttcatgattgttgattctccttctacttcagtgttatactgtgtgaatcaagcactgtgtcaaaacagagcatttccctcttaaaaattacaaaccgaagtgatagaagcatgtcagaattgagaagacattttgaagcaagaacaatgtgatgtacctattttattatgtttgtatataaatactattgtaaattgttcagagtgaaaacatttgacaaactctaacactacaatcattttttctaaattacataaataaagctatttttcattataaaaaaaaaa

SEQ ID NO: 4809 - DNA, 3241 bp, Homo sapien
ttccagctcacttgcggtggcagcacaacttagggaaataataccatccagtgctttgcctaatggcacagttcagcatatcctcatgccagatgatgaaggtgaaggtgaattgtgttggaaaaaagtagacttaggggacatgaagaatgtggatgtcttatctttcagtcatgctccttcattcaattttctttctaattcatgttggtctaaaccaaaggaagataaagcagtagatacatcagatttggaagttgcagaagatcctatgggcctccaaggaatagatctgatcacagcagcattgcttttttgtctaggagattctccaggagggaggggtatatctgatagccgcatggctgatatttatcacattgacgttgggactcagactttttcacttccatctgcaatattagctacaagtacaatggttggggagatagcttcagcttcagcttgtgatcatgccaatccacagctttcaaatccaagtccgtttcagacacttgggctggatttagtattggaatgtgtcgctaggtaccaacccaagcagcgttcaatgtttacctttgtgtgtggacagttatttagaaggaaagaattttcttcccactttaagaatgtgcatggtgacattcatgctggactcaatggctggatggaacagaggtgccctttagcttactatggttgtacctattctcagcgtagattttgtccatcaatacaaggagcaaagattatacatgaccgccatttgaggtcatttggagttcagccatgtgtatctacagtattagtggagcctgctagaaactgtgtgttgggattacataatgaccatctaagtagtcttccttttgaggtcctgcagcatattgcaggctttctcgatggcttcagcttatgtcagctctcatgtgtatccaagttaatgagggatgtgtgtggcagcctgcttcagtctcgtggcatggtcatactgcagtgggggaaaaggaagtatccagaaggaaattcatcatggcagataaaagaaaaggtatggcgatttagtactgcattttgttctgttaatgaatggaaatttgctgacatcctaagcatggcagaccacttgaagaaatgcagttacaatgttgtcgagaaacgggaggaagcaatccctttgccatgtatgtgtgtgacacgagaactcactaaagaaggacgttcactacgctcagttttaaaacctgtactttaaaagttgtaatattactagcacatatatgcaagcacctagtataatttctttgtaatatgtgaaactttattaatgtattaaatattacaactagctaaatttattgtcactgtgtatataatgttttgaagtgacatctatttttataaagtactgtttagttggaaaaagttgccttaatgtttgaaatgtgtgaaatttttggaacttgctggacagggtgatttaatttttagctacataattttaagaattagtattttcagtggtgtgcatattttggttcttaaatttttgcttcttaaactaaaaaaatcctgaccaatttatttgttgttttctgtgggttgcgacccatgcaatcaaaaagcaaaattttgattgagattttttacagcataggtttttcatataaaaatattctgaatttgttaagcactgccataatatcattataatgtttttgtcttttagtgcttccctatacaattgttaatgcacaaatgatctctaatatatacttacatacgtaaaatcataaagtttggtaatgcagtttatcgttttaaaaataatccacaaagatgtttttatctcacatacttacaactcaacacacagagtgaccatgtgcagctttcttttttgttagatgccacatccgaagactcatcgcagtgtgttatatgacaggacaaagcaaaaacaaacaaaaagcaagcctgtgaatataatttaatttgaaactgctcctggtattatatatttgctagttatctaatgttttaaaagaaaatatacctcatttaggtttgaattgggcgtattgtgtaaatttcaaatattcagaatgcaaagggcttgactattaaatgtttgcctttgatgtttataaacattacaactatgttgttttaagacatttaaaaacgtgaaatttgttatctttgtaaaatgacaatcatgtagaaacctgtcttggttgacaatctctttgaaacatttccgagttaatttcccataggcttcaccaccaagaaagtaagaattgcatctttacataatgatcaaggtataatggaaaaatatacctattcttgaagtagtttattatagttttcaaattgatttataccattattaacctgatgtggtctgcttaaaaaatgaatatatcagtatttagaaataaattgcaaaggtgggaatatatacttaaataatttgtcttaagtaaattagcatttggtagtctgaaatggtgacagattacttgttaaaattgtgaaaactctgttgtgtcctctcttcctacatttgtccctgagagtactccacgattactaggttcttgattcccttatatggcaatcaggcagaggcgttccttaagcattagagagttctgaagcttaagatttgttttggttggatgaagtccttagtacagttgaaaaacagagcattaaagactaatcaattgttttgcctcaccagtcattttaaatagtagaatacttatttctcagtgcttaaaatttctttttcaactgtgagattgaataaacagtctctatttctgtggaaaaaacaacagaaaagagatattaaataccataaaatgtaactctgccttttaaagttttgctgaagaatgtgtctgtggttaggatagcacaagcattaacttttgttttatagttatgctttttaaaattcattgtttttaaatttagacttcttatttccacactggattatgagatacttaacaatttttccaccttatatttcttttacacattttgctgttctcttttttgttattgttatgccaccataccattttgttaaaatgttttctttgtgaaacatttgttcaagttctaataaaattaatgttttcccttaacatggctcaataacttaaaaacgttcatttaaataaaattttaatacttgtttgacaaaaaaaaaaaaaaa

SEQ ID NO: 4810 - protein, 390 aa, Homo sapien
MPDDEGEGELCWKKVDLGDMKNVDVLSFSHAPSFNFLSNSCWSKPKEDKAVDTSDLEVAEDPMGLQGIDLITAALLFCLGDSPGGRGISDSRMADIYHIDVGTQTFSLPSAILATSTMVGEIASASACDHANPQLSNPSPFQTLGLDLVLECVARYQPKQRSMFTFVCGQLFRRKEFSSHFKNVHGDIHAGLNGWMEQRCPLAYYGCTYSQRRFCPSIQGAKIIHDRHLRSFGVQPCVSTVLVEPARNCVLGLHNDHLSSLPFEVLQHIAGFLDGFSLCQLSCVSKLMRDVCGSLLQSRGMVILQWGKRKYPEGNSSWQIKEKVWRFSTAFCSVNEWKFADILSMADHLKKCSYNVVEKREEAIPLPCMCVTRELTKEGRSLRSVLKPVL

SEQ ID NO: 4811 - DNA, 978 bp, Homo sapien
gggaggagttacgcaggcagggttgtggttgctggctgttaccaggacaaccggaggcgattgaccgttatctgcggtttggagccgttagcgggagaggcagagatattcagaggtcttttaggatgcgctaaagggtcgtgagggctctcttaaaattttcttcacaagcggttatccagtcgtgccccgcggccctgctgctggccccggggatctgagtcgtaccctcttgtttttctctgagtcagtcttaaggtgaaatgaagtgtggcccagtggctcctcactgtcgcttctctagttttctgcctccttttagaaaattgaattgaaaagacaggatgaagtggacacagcatgtgaagacaattctttcaagaagtttggctgtcaaggaaaacagagaatgtgctaaagaacatacagacacagagcagacaggccacctttgcaaccacatggaggtttgtctgatattgaagctaaagaagctaagctggaagacagagagaccaagtcctgatgacattgtttgaacccagagatccagacatgcctgaaaactagttttaccactggacttatccgttgaatgagccaataaactctcttttatacttaaccttgggttttacctggatttttgtcattgacagctcaaaatattctaatatagaagtatacatcattaaatcaacatttctttttttctctgtcttattttaaatgtaactctataaggtactctaaaagtattctacagtctcactaagttaatctgcaaatttggtaaaattccaatattaatcccaaaagtattttaagagcttgtttttgttgtttgcttgtttgggactaaacagaattactccaaaattcattgagagaaaaaaaaaacatgaaaaaaaaaacaagaaaatagaattcataaaaggaaattgtattatataacaaagcataaaacaagaataataa

SEQ ID NO: 4812 - protein, 47 aa, Homo sapien
GRSYAGRVVVAGCYQDNRRRLTVICGLEPLAGEAEIFRGLLGCAKGS

SEQ ID NO: 4813 - DNA, 2614 bp, Homo sapien
  Unsure 1675-1739: Unknown base
cacacacacacacacgccaggagcaagggagctttcgggccacactcccagacgcctccctgagccctggaacccggactcgttgctcctggccttccatacaacatacgagcacatcctgcggtcccaccccagatcccctcctcctcgccatcccattctgccccctccccaccctgggtacagaaagggactgaagtgttgggcagagagggggcttaaggcccctgggcacaggctgggatcagggcagtgagcgaagggcagctgtgtcctgccctcccttctggaggctggaggggagaggccaagcccttggaaaatgtagcaaatgtctggatgtcgcataagtgcgtgtatgtgcgggacaggccccgagaagctagtgactcctgcacacccccattgcacaaatgaaatcacagcccaggagggagggtagcttggcactggctgagaaatagagctctctccccgcccctccccctaaccacaagggattgtcctgacaacttgtggggatagaagggctcacagggcaggggtctcagctgcccccatccttagggcaggggagttagtgtggagccgagagcaggtcccagctccccctgccagccgcactgtcccaggcccagggacctctgccgggtcctcccagcccttgccacacagcctagacgtagtagcctgggcttccagcaggtggcgagctggttcgtgctggaaatttctcctgggtttcttggggtcaaacatgccaacctccaagaccccatcctcacgtctcccacttttctggcgctggagtgtgcagggcgtaggacctgcatgtgtgggtgtgagaatgggggcggtggacaccaaggggcgagtgtgtgactaggtgtgtgtgcacatgtgtagggtgcagacgcatgggtgccatcctttgcgttcagtgactgtgcgtccagacccctcaccagcggcccccccaccacaccctggtcctcccaggcagctgtcccagggcgcccaggcctgccttgcaccacagccctcaggaaatccggcaaggaggcccctgcaggttggttcaggcccccaggtagcaaaacagagacaacagcagccccgcctgaccccctgcccctctctgtggaggcccgggacccccgcaataagcaccacatgggtgaggctgtccctgtcagggtcccctgccagggtccctcctggggttctgggccatttgaggggctctttgatgggccaggccggccagagtgaactccgagcactttctggctggtgccccaacctctccactccccactcattcccaccttgaaaaagggctataggtcccctgccctgcccgggtccagtttacaaacagtgtggggtggccccagggcctggccccactctccctgctgtgcccactcctctccagactccacctccccagtgggtatgggccctccacatgccaggtaagtagcaaacccccactccctccaaggaccaggtctcagagaaggccctggtcactgcccccggcccacctggagcccatcggggctgcctctcccagccgcgacttctccttttgccttaggcctcgcgacatcctgatctctcctgcaataactaggaatcgagattccacagtagacgtcccttgccgtgnnnnnnnnnnnnnnnnnnnnnnnnnnnnnnnnnnnnnnnnnnnnnnnnnnnnnnnnnnnnnnnnnctctctttctctctctccctctctctgttaagatcctgttcgggagtttccccagccgttgtagtatctagtatgttagagttgggaggggaccatagttatgtagcccagccccctcattcccagaggcacccagagggccagcctccagcctgaccccagagcagaaccggaacaccaggttggggccctggtgctgccacctcctctgctggtcgggctgggaccctttgccccttaggagaggtgttggtcacagatgtttacctcagtttatgtcactgtcgaagaaacaaaaaataatagcaaaaaataacactgtagacatgaagacttagaagacaaaaaaaaaaaaattcacacaaaaaatctcccttgttgcgattcttctgtgaaggtacagtgtgtatgtgtgttgtgtgtatgtgtgtgcgtgtctctgtcccagaccctgtgtcccccacactgccccctgtccttcggtgcttcccagagacccctctgagctggcctgtggggcacgggaagccccctggatgggaggcggggccacaggtcggctagagggtctccaccaggcccactgaacagaaccccacggctgccagaatgttccctgagcccacactgtggccagtgggacagtcctggtggctgacatcagcgtccatgcttggctcagggcctggggcggggtcctgggtagagtcctagccccagagccccagcccctcatgtcttgccgcccttcctccatgtgtttgtaaatactctggcatcctttggccctgagaaggtttttaaatgtgttatttacttctctaaacatgacgattgctataaaaataaacaaaagtttagaaaaatgtaaaaaa

SEQ ID NO: 4814 - protein, 84 aa, Homo sapien [sequence omitted]

SEQ ID NO: 4815 - DNA, 5629 bp, Homo sapien
  Unsure 708-897: Unknown base
cgaagatccaagtttctttccatctgcctgaagaactttctttagcacttctggtatagcagacctactgatgataatttttcttttagtatatggtgattagtttactttttattcaactgtgtctttttttgaagtcttcttcattgaaatatattgttactaaatatagaattaatggctttctttaagcacttcaaagataatccactgttttctggactccgttgatacttaagtctttatttttgtgtaattctttttctttaaatgtgccatttttcatttttctctgactcctacctactaagatatttttacctaagtattgagtcagttttggttatgatgtgactcagtgtgtttttatttatattgtttggttgtttgaacttcttgaatctgtaaatgttgtgctttatgttaaatttggggggatttcagccatttaaaatataacttttcagtctcttccccctgggactccaatttttacatatgtattagacctattaatatttttctatggatacctgacattctttttaaatcttatttttggtgtttttcactttgaacaacctaataatttgtttccatccatgtttactcactgtttattctattttttcccaatctgctcttaagcctatcctgtgaattttctttttaatttattttattttttagttccagatattttctgcnnnnnnnnnnnnnnnnnnnnnnnnnnnnnnnnnnnnnnnnnnnnnnnnnnnnnnnnnnnnnnnnnnnnnnnnnnnnnnnnnnnnnnnnnnnnnnnnnnnnnnnnnnnnnnnnnnnnnnnnnnnnnnnnnnnnnnnnnnnnnnnnnnnnnnnnnnnnnnnnnnnnnnnnnnnnnnnnnnnnnnnnnnnnnntcgttgtgttgcccagctgtcttgactcccagactcagcgtcttcctgcctcgcctcatgcccgcgccaaccagttctttatttttaatattatgttgtatttgatgtgctatcctattcatttagtataagcacatttttctttatgtcttcagcataattatatgctttttcagaattttaacatcaggactgcttccagggtagctttattgccctttgtcttaagtatggattatagttttcattctttgtatgtcaagtaattttggattgtaacttgaactttgaatatactgtagaaactctgaattctattttattcttctaaaacaatatttctcagcttcagcactactgacattttgaactgggtcattttgtttgtgttgttgtgtgtattttgggagggtactgttctatatgcattgtggggtactgagtattatcctttgtctccactcactacttaccagtagcataactctctctcctccccacatcccctgccaaaaaatgccttcagtcctttctaagcgctcttttttatggtgttggggccaaaatcatgcatctttactcactctttctcattgagagctatggctataaagggtagtgatacttttacttatttatttttaaggcaagcagttaacttagctggattcaaactccaggctgcctcgtgtgctgtgggaagcagcctacgctctattcagttcttttcttttcatattggttgggttactttgagtctggcctacatgatgggcagtttagaggtcaaccaaaggatttcagcagaacttatacacagaatttcattcaggcttcccgtgtctgattggctacagtgtgggaatttcctcccacttttcagccactactgaggatgcctttcggcaaaattccttgaaattggaaacttacagggaaattcctttcctccaagagtgcgctctcctccagtgttggcttgcttttggttgttctccgtggttttagatagctgtctttatattaattctggagtttacagttgatatctgttgggggcttagtttgataacatgtattcttctattactagtagccagacctgtatgtcttacttgacctgatggagaaaagtttcaacttatgagacaatactgtgctagctagttttactgatttgtactctaaagtacccaagcctaaaatagtagagctgtctatcccacatgaaacttctctgattttcactgttttttataaaaagtatacatgttcacatttctgtaggtttttttaagcatcacaatttttataaactttctatatttccaaggtctacctgctttgtattttgcctagtgagagttttgtattcatgtaggaataatctcttggtgtgagtatctattttccactcatccaaaacagatagagcattgatttcactaagcgttatgttctagtttgctttggtattattattagaaatacctggtgattaatttgagctaagtattcttctctaccctcattcccagcattatcacccgcttttaccacttccaaggggtggaagcattctccacaatgcattttttcatgccagagaaaaatctagaaaaaaatgaataaaacgaagaaattctttccccttggtatctgtagctaacttgcctaagtgttctttcccacagtttaagtcttcagtccatagttcataagcaaaggggtgtagcgagctctgatcttgccagaagagagaataagtgagctaccccacggtggacattctggccatctgaaatgagtcgatgcatgtggcttttgtctaaaggctacaaataaaatgtaaccactttcttctttgagtagttgatatagcaaatagttgaaacagaagttttgattggcaaatcaggatgtggtagatactttaacaaagagtagaactattaccagttttatgtgttgctgtttgtatctctttcacagttttgataatatcacatcctggaaagtgaaacagaaaattattattccattttaaatgactaaatttgctttcatggtatttacagtgaaagagtaaattagaaagtgaatggatgactgttcatgagaaaaagcagggtaaaaagattttatttaattaattgaaaatattagggtcaaaacataggcttatgttatgttttgtgaattgtgctgtgttgtagacatttgatgagtcctaacatagaattgatctagctcttgaaataccatttttgattgagtataaatgggatataggcaccttacaacttcagaattcgaggaagatgatgtgaatcttccaattttatctatttgattcaaatggtatgttttttcacatttctcataatttccacgtcaactcccatgatgatcatgcaggaaagcagcatgattgcacttcttgtagtgcataccatcactaaaacatagttactgtctttctgtggtcttaagaaaaattcagaaacagcataccaatgtacatataagataaataagcttatgtggtacagtaagtgttctgttctgagaaataccttgattcgtatcctaatgtctgatgttattggtagttctcaaacttccccaattctgctttcatctaaattcatcttatctatctattgttaaataatctatcagtccatttttatctatcatctatatatctgtctttatcaatcattcgtctgtaatctatctgtgccgtttggcataagagacagaagggcatagcagtggaaactcaaaggagttacctccatgtgaatggacagtggtgatggtgatctgtgaggtggtgatgtatagaaagaaaaactagaagagagcatgccctaactcagggaccttgtccagcaggcactctggccttgttatactgtgcttgaatatgaaaaaaaaaaaaatcaaaatagtgctgacattctttgtcttctgggtctgagaaaacttagagtagatatgatgactctgccatttcagtcttttgtatttccacatttagagctcagttttaattatgtagaattatttctccagcctgtgttaaactagaccatggattggcaaactttttttgtaaattgccaaatacacattttcagttctgaaagccttgtggtctttgttgcagctaatctactctgctgttgtgttatgaaagcagccataggtaatttataattgaatgagtgcgctgtgcctttcttccaataaaactttacaaaagcatcctgtgggctggagtttaccctttgggaaaccagagcattggctaaactggaacctgaaaaaataatcacatcaactcagccacatggtaataatatttagagtattatttcaacattttcattttcataaaaatttttttagctcttttgccaaattccatctgtgagtgatacaaatgactaccacgtgccattaacatcacctaaacagtgcaaaacaagcatagtagaagtaattggaatgatataaaccccttgctgtaatagttatagttgataaattatgtttcaaaattgaacctatttcttccaaatttcatctataaagttccaaggagttccaaaatcttgcctgccttcttttcccagttagcagtattgtctctgagcagccatggtggtatccatcctccttggacaatgaatttagcctattttgacttcatttgagcagttgtaattgtttcaccacatcagagtaagattactacatgccagagctattctttaactcagcttgtaaaaacatgatagcatcaacaatatacatagcaaatgaatgccatctttaatccaattaaatggtttttacaaatttgctcttgtttgttgatgctatctgcattgcagtaattaaaggtgaggtaaaaagaatgaataaactgccaagttaaaattaaatttgggcaatttctcttttgcagtaatgtatgtatatttactcaaaacatatgccaaatttagtgttgaaaggctcattcaaatcaattgggaaagcacgtaaatgaacaattcataaaagaaaagcattgcaaatggccaagagcatagaaaatgtgctcaatcttaccagtcattataaggaaataatgaaatttgtgtatatatgaaatacttaaaatatatataaaataaaacaattatttgccttttttcacctatcagattaacagattatatgtgttaacaaggtggggagaatttacaactcctgatatgttaaaatctttcaggaaggtagtagaaaatatatgtaagatggaaattagcacttttgaccaacaattttagttttagatatttacctataaggatataataggaggtgttcaaagatgcatgtaactcaatgtagtattaattataattgtaaaatagtaaataacatttttgtcaaatcataatgttaggaaaattagtgatggcacatttaaccaattgaattatattcagttctgaataccgtgatgcatgttcaaattaattgatacaaaaatccaacaactttagcagtttgtttaccagttattgagtaccaactgtgttcaacattgttatttcactcatatgaaatgataaatgtatgtgcttgttatgatacggtcaataaaaccacttttataggaagaatacgcccaaaaaatctatgtcgggtgcggagaaagaggtaatgaaat

SEQ ID NO: 4816 - protein, 114 aa, Homo sapien
MVLGPKSCIFTHSFSLRAMAIKGSDTFTYLFLRQAVNLAGFKLQAASCAVGSSLRSIQFFSFHIGWVTLSLAYMMGSLEVNQRISAELIHRISFRLPVSDWLQCGNFLPLFSHY

SEQ ID NO: 4817 - DNA, 3098 bp, Homo sapien
ctctaggtgatgtttgcagacagaaaaagtaaactgtcaaggaattcagagcattgggtacttgttatttggaccagtttgaagcatctttgatttattggaccaactggcaacagaaaatgaaaagtagtgtggcacagataaaaccttcttctggtcatgacagaagggaaaaccttaattcatatcagaggaactcctctccagaagacagatatgaagaacaagaacgatccccccgggatagagattactttgattacagcagatcagactatgagcattcaagaagaggacgttcttatgatagtagcatggagtcacgaaacagggaccgagaaaaacgcagagaaagagaaagagatacggatcggaaaaggtctcggaaatccccatctcctgggaggagaaacccagaaacatcagtaactcagagttcctctgctcaggatgaacctgctacaaagaaaaagaaagatgagctggatcctcttcttactcgcactggtggagcatatattccccctgcaaagctcaggatgatgcaggaacagattacagataaaaacagcttagcataccagaggatgagttgggaggccctgaagaagtcaattaatggccttatcaacaaagtcaacatttccaacataagtattattattcaagagcttcttcaagaaaatatagttagaggaagaggactgctgtccaggtctgttttgcaagcacagagtgcttctccaatcttcacccatgtttatgcagcattagtggcaattatcaactcaaaatttccacaaattggagaattaatcctcaaaaggttaattcttaattttcgaaaaggctatcgaagaaatgacaagcaactttgcctgactgcttcaaaatttgtggcgcatcttattaaccaaaatgtggcacacgaagtattatgcttagagatgctcactttgctcctggaaagaccaacagatgatagcgttgaagtagctattggttttcttaaggaatgtggcctcaaattaacacaagtgtcaccaagaggaatcaatgctatatttgaacgccttcgaaacattctgcatgagtctgaaattgacaaaagagttcaatatatgattgaagtgatgtttgctgtacggaaagatggattcaaggaccaccccattatcctagaaggtcttgatttggtggaagaagatgatcaattcactcatatgctccctctggaggatgactataatccagaagatgttcttaatgttttcaagatggatcctaattttatggagaatgaagagaagtacaaagctattaagaaagaaattcttgatgagggagatactgactcgaacacagaccaggatgctgggagtagtgaagaggacgaggaagaagaagaggaagagggagaagaagatgaagaaggacaaaaagtaactattcatgacaaaacagaaattaacctggtctcatttcgtcgtacaatttatcttgctattcagtcaagtttagattttgaagaatgtgctcacaaattgctgaaaatggagtttcctgaaagccaaacaaaagaactctgcaacatgatacttgattgctgtgcccaacagaggacatacgaaaaattttttggcttattagctgggcgattttgcatgctaaagaaagagtacatggaatcctttgaaggtatattcaaagaacagtatgataccatccatcgcttggaaacaaacaagttgcgaaatgttgctaagatgtttgctcaccttttatacactgattcacttccatggagtgttcttgaatgtataaaactgagtgaagaaaccactacatcatccagtagaatttttgtcaaaatatttttccaggaactgtgtgaatacatgggtcttcctaaacttaatgcaagattaaaggatgaaactctgcagccattctttgaaggattattaccccgagataatccaagaaacactcggtttgccatcaacttctttacttctataggtcttggaggtttaacggatgaactgcgggagcatctcaaaaatacaccaaaggtcattgtggcgcagaaaccagatgttgagcaaaataaatcctccccatcctcttcctcttcagcgtcctcctcttcagagtctgactcatccgactctgattctgacagcagtgatagcagttcagagtcttccagtgaagagagcgactcttcatccatcagtagtcatagctctgcctcagctaatgatgtaagaaagaagggacatgggaagaccagaagtaaagaggtagataaattgatcagaaaccagcaaacaaatgataggaaacaaaaagaaagaagacaagaacacgggcaccaggaaacaaggactgagagagaaagaaggtcagaaaaacacagagatcaaaattcaagtggttcaaattggagagatcctataacaaagtacacatcagacaaagatgttccttctgaacgaaataactacagtagagttgcgaatgacagagaccaagaaatgcatatagatttggaaaataagcatggtgatcccaaaaagaagagaggagagagaagaaattctttttctgaaaatgagaagcatacacaccgaattaaagacagtgaaaatttcagaagaaaagatagatcaaagtcaaaggaaatgaatagaaagcactcaggctcaagaagtgatgaagatagatatcaaaatggtgccgagagacgatgggaaaaatctagcagatactctgaacaatccagagaatcaaagaaaaatcaggaccggcgaagagaaaagtctccagcaaaacaaaaataattctacaaaatgacataaactggacatgccttatattcagttgaaacaaattattttttactttgacgaactttatagagaattcttgtataaagtattggtttgtatttgtaaatttaaaaaatgttttcattttaacatgttttataattgatacatctcaaggccctacccataaaattatttgaaaactttcaccagaaagggatgtaagtctcgcttatattttgtgaataaaatgatcaaaagctc

SEQ ID NO: 4818 - protein, 937 aa, Homo sapien
TVKEFRALGTCYLDQFEASLIYWTNWQQKMKSSVAQIKPSSGHDRRENLNSYQRNSSPEDRYEEQERSPRDRDYFDYSRSDYEHSRRGRSYDSSMESRNRDREKRRERERDTDRKRSRKSPSPGRRNPETSVTQSSSAQDEPATKKKKDELDPLLTRTGGAYIPPAKLRMMQEQITDKNSLAYQRMSWEALKKSINGLINKVNISNISIIIQELLQENIVRGRGLLSRSVLQAQSASPIFTHVYAALVAIINSKFPQIGELILKRLILNFRKGYRRNDKQLCLTASKFVAHLINQNVAHEVLCLEMLTLLLERPTDDSVEVAIGFLKECGLKLTQVSPRGINAIFERLRNILHESEIDKRVQYMIEVMFAVRKDGFKDHPIILEGLDLVEEDDQFTHMLPLEDDYNPEDVLNVFKMDPNFMENEEKYKAIKKEILDEGDTDSNTDQDAGSSEEDEEEEEEEGEEDEEGQKVTIHDKTEINLVSFRRTIYLAIQSSLDFEECAHKLLKMEFPESQTKELCNMILDCCAQQRTYEKFFGLLAGRFCMLKKEYMESFEGIFKEQYDTIHRLETNKLRNVAKMFAHLLYTDSLPWSVLECIKLSEETTTSSSRIFVKIFFQELCEYMGLPKLNARLKDETLQPFFEGLLPRDNPRNTRFAINFFTSIGLGGLTDELREHLKNTPKVIVAQKPDVEQNKSSPSSSSSASSSSESDSSDSDSDSSDSSSESSSEESDSSSISSHSSASANDVRKKGHGKTRSKEVDKLIRNQQTNDRKQKERRQEHGHQETRTERERRSEKHRDQNSSGSNWRDPITKYTSDKDVPSERNNYSRVANDRDQEMHIDLENKHGDPKKKRGERRNSFSENEKHTHRIKDSENFRRKDRSKSKEMNRKHSGSRSDEDRYQNGAERRWEKSSRYSEQSRESKKNQDRRREKSPAKQK

SEQ ID NO: 4819 - DNA, 4266 bp, Homo sapien
gatcacaccccgacggcagtccatgacggtgaagaagggagagcaccggcagctgctgaaggacagcttcatggtggagctggtggagggggcccgcaagctgcgccacgtcttcctgttcaccgacctgcttctctgcaccaagctcaagaagcagagcggaggcaaaacgcagcagtatgactgcaaatggtacattccgctcacggatctcagcttccagatggtggatgaactggaggcagtgcccaacatccccctggtgcccgatgaggagctggacgctttgaagatcaagatctcccagatcaagagtgacatccagagagagaagagggcgaacaagggcagcaaggctacggagaggctgaagaagaagctgtcggagcaggagtcactgctgctgcttatgtctcccagcatggccttcaaggtgcacagccgcaacggcaagagttacacgttcctgatctcctctgactatgagcgtgcagagtggagggagaacatccgggagcagcagaagaagtgtttcagaagcttctccctgacatccgtggagctgcagatgctgaccaactcgtgtgtgaaactccagactgtccacagcattccgctgaccatcaacaaggaagatgatgagtctccggggctctatgggtttctgaatgtcatcgtccactcagccactggatttaagcagagttcaaatctgtactgcaccctggaggtggattcctttgggtattttgtgaataaagcaaagacgcgcgtctacagggacacagctgagccaaactggaacgaggaatttgagatagagctggagggctcccagaccctgaggatactgtgctatgaaaagtgttacaacaagacgaagatccccaaggaggacggcgagagcacggacagactcatggggaagggccaggtccagctggacccgcaggccctgcaggacagagactggcagcgcaccgtcatcgccatgaatgggatcgaagtaaagctctcggtcaagttcaacagcagggagttcagcttgaagaggatgccgtcccgaaaacagacaggggtcttcggagtcaagattgctgtggtcaccaagagagagaggtccaaggtgccctacatcgtgcgccagtgcgtggaggagatcgagcgccgaggcatggaggaggtgggcatctaccgcgtgtccggtgtggccacggacatccaggcactgaaggcagccttcgacgtcaataacaaggatgtgtcggtgatgatgagcgagatggacgtgaacgccatcgcaggcacgctgaagctgtacttccgtgagctgcccgagcccctcttcactgacgagttctaccccaacttcgcagagggcatcgctctttcagacccggttgcaaaggagagctgcatgctcaacctgctgctgtccctgccggaggccaacctgctcaccttccttttccttctggaccacctgaaaagggtggcagagaaggaggcagtcaataagatgtccctgcacaacctcgccacggtctttggccccacgctgctccggccctccgagaaggagagcaagctccctgccaaccccagccagcctatcaccatgactgacagctggtccttggaggtcatgtcccaggtccaggtgctgctgtacttcctgcagctggaggccatccctgccccggacagcaagagacagagcatcctgttctccaccgaagtctaaaggtcccagtccatctcctggaggcagacagatggcctggaaacctctggctaatcgggccatccgtagagcgggaaccttcctgaggtgtccttgggccacccccaagtgttgggccatctgccaagagacagcgacccaaagccgaaggacaggtggcctgggcagatctcgcccaggtctgggagccccaggctggcctcagactgtggttttttatgtggccacccgagggcgccccaagccagttcatctcagagtccaggcctgaccctgggagacagggtgaagggagtgatttttatgaacttaacttagagtctaaaagatttctactggatcacttgtcaagatgcgccctctctggggagaagggaacgtgaccggattccctcactgttgtatcttgaataaacgctgctgcttcatcctgtgggggccgtggctgtccctgtgtgggtggggcctcttccatttccctgacttagaaaccacactccacttagaacagggtttgagaggcttggtcagcactgggtagcgttttgactccattcttggctttcttctttttctttccagaaggatttttgtgcagaaatgggtcttttgttgccgtgttagtcctccttggaaggcagctcagaaggcccgtgaaacgtcgggggacaggacccccaggtagggaatcccaggctacgcactttagggttcgttctccagggagagcgacctcgtcccccgatcctgaccgcccttccggcccacgctctcctgtttggcttccacaggcctggacttctctggcttctctgcccacacactccctgcccccagtgtccctgcccctgccccagcacaggtgacttcatttctgtcctctcagctcagtggactcgctcaacttttgtataagtctccacttggtggtagcagcttgctgatgacttgttttaaaactttcatcctaaataaccttttgatacttgaatatttgtaagttttatacatagtttctaatttttttccgaacagatccagatacctaataagatgctggaatgtaatccctggacaatccgtgtcctggcagcatttggtcttcctctaagcgcctggctccgctgttctcaggagtgggttctgaagtctctggagaacaggatacgtggagggttaggaaggggccaggcctagagacgggagactccctcccggagcaggtggaggcacaggaccgttcgctaccccatctgccggcacctgcgggggagcccaggcattctttgtaagccctcctgactacctgactcaaagaaaacagaagcatggaggccgccaagtattttcaagaaataaccccatgaatattccatcacttttttagaaagaggggcttggggcaggcagaggagagaagggagagcaaactgagagccaagtttccagacagtcctgcaggaggagaggatgcagctgcccagagggaagcaggatcacatttaaggaagtgtgtggggtccctggatgacaccagcacccagtgcggctctgtctggcacccgctcccaaggtgggaggagtgggtgtcccctgtgtgtcagtgggcagctcctgctgaacccgcagctcactagggagcctgacagtggggccatgtgcctgacactcctctctgcttgtggacctggcaaggcagggagcagaaaacagagccacttgaaggctttctgtctgcgtctgtgtgcagtgtggatttagttgtgcttttttcttgctgggagagcacagccaccatttacaagcagtgtcaccgtcgtgggtggcgaggacagaacaggagcctctgctctctgtacctatctgggcccggtgggctcccttgtcctggcttccatctctgtctcagcgaccattcagccctgcgcaggaacacatgttgcttagaaaagccaaatccagccttgtctctgcctcctctggtctcatgatgtgcatctgttaccttgaaactggaaaccagtctatcaatgtctgtgccaattttttattccctccccaacctccttccccataggactttttatttatgtaggatgtgtgctgtctaatgatgggatgaccacacttttccatgttctaaaagtgctcctctcctgcagggtcccagggctggtggttgctttgggtctacagctacgtcttacccgcctcctgcctcaacagcctgtgtggtggcaaagccggtgtggggctggggaacgcagcgttctccaggagggggacctggctctccttctgcaatgcaggcgaaggcctagatgccagtgtgacctcccacaaggcgtggcttccagactccccggccggaagtgatgcttttttgccttgggccctgggtttgaagcagcctggctttctcttggtaagtggctggtgtcttagcagctgcaatctgagctcagccacctacacaccaccgtggccgacactttcattaaaaagtttcctgagacgaaaaa

SEQ ID NO: 4820 - protein, 580 aa, Homo sapien
ITPRRQSMTVKKGEHRQLLKDSFMVELVEGARKLRHVFLFTDLLLCTKLKKQSGGKTQQYDCKWYIPLTDLSFQMVDELEAVPNIPLVPDEELDALKIKISQIKSDIQREKRANKGSKATERLKKKLSEQESLLLLMSPSMAFKVHSRNGKSYTFLISSDYERAEWRENIREQQKKCFRSFSLTSVELQMLTNSCVKLQTVHSIPLTINKEDDESPGLYGFLNVIVHSATGFKQSSNLYCTLEVDSFGYFVNKAKTRVYRDTAEPNWNEEFEIELEGSQTLRILCYEKCYNKTKIPKEDGESTDRLMGKGQVQLDPQALQDRDWQRTVIAMNGIEVKLSVKFNSREFSLKRMPSRKQTGVFGVKIAVVTKRERSKVPYIVRQCVEEIERRGMEEVGIYRVSGVATDIQALKAAFDVNNKDVSVMMSEMDVNAIAGTLKLYFRELPEPLFTDEFYPNFAEGIALSDPVAKESCMLNLLLSLPEANLLTFLFLLDHLKRVAEKEAVNKMSLHNLATVFGPTLLRPSEKESKLPANPSQPITMTDSWSLEVMSQVQVLLYFLQLEAIPAPDSKRQSILFSTEV

SEQ ID NO: 4821 - DNA, 2069 bp, Homo sapien
aaaaaaagaatgccaggggggaattatcatgctaaattattttactgctgaagatagcttcattgcaaattattctttttccagaatttcccccaaacaacttagaattccataagtagaacaagatagattctacccccaaaatattcataagcaaatcccactgcccttaaaataaggaagttatgcctggttgtctgtgaatggaacctcagtaggtaatcctgatgaagcttaaaaccttagggcagtgtctacatgggaaacaagtatgtggaaattgacaatcatttttaccaaatcgttgagtaataatatgacttacctgatagatatacacattcaataaggaacatttttttttttcaataaggaacattttaactaaaacattactttagggctgagatttccaggctatctacattgatctactgaaaaatttctagatttccatatacaaacgaagaagacatgagtttagagaatttttttcctttaatttttttttaacagaagggtatcagagtggaggacctagattacgctacctgtgtttgaaaatattgcgctttgcctaaccttcggtggaatgtattgtttcagcatattctatgtataaaaaagtttaaagatgtcttcaaagaagactagagtctttaagtcacttatagctatattttactacaaaatttgtgtataaagatatatttaagtgttttagataaatttaagttactccatatgaaatgtttaatttcagctactgtgaattctttcgatcagtcctttgcttttttaaaaaatcttttccatcgtgttaaaaagaaaattagctattaggagatattaaaagattgatgtcttagaaggacagggttaaaaccttctgtaatatatttaaatatatatttttaagagagatgctacattgccaatgattttataaataatttaaaattaatttacaaatttatagatgcaaaccaaaagatctttttaaaagagagagagaggaaaaaaatcaccttttatttgtttgggtctcattgtcagaattattattcagatcaagaaatctgtgtcgataaaacctaatctcatattggagagtgaatgtcgttaagtatttctgaaatgtttctaaaaaatgaacatgaaaaaaataaggtattttctccctagcttctcattacagtatttctaattgcttcacactttacagttttaatacaaagtacaagctctacttttataacgtgtactacaagtttctttaaaagtattgttgtatttcagctgaactcttgtatctgcagtcttttgttatttctgcaggctacacccttaatttgcagaggccattttgttgtttgtttgatgctgaagctgttgttaaaatgccccaaactccaaggcagattgtctgtataatacgctatagcttttcaccatgtggtgtttaccagctgttactctgtattttaaaaagccagagatttcttctgtctaaactgtttctatagcattttctaaacaaaaaaaatggtttttttctttgccttgtaataagattgtaaatccatttcctgcttgtgttcttagtgggcatgattgtgagtgtgtgtggggtgctcacacgcgtgccagtctttttgtactgtaactacctcatggtttgaatgatgattgtactgctggttgtgttaacagagcacattttgttgggtgagtcctatgtgatttttttcatgtttgttttatctgggggttgttcatgaaactgacagatgtttttctaaaaaggactattatcagtttccaaatacaatacttctctcttctggtttttcctgaatgagcctgattttgttgctggttttcatcatctatgagggtaaaacgagtacccttaaaatccctgtggccagtttgaacacccctgttgtattcttttctctgttcagtgtgtcagctattttgtgaagatgcttagatgtatagttttgataaccacagttttaaatcttttatctgtgcataataaaaagatatatatcagttattaa

SEQ ID NO: 4822 - protein, 37 aa, Homo sapien
KKECQGGIIMLNYFTAEDSFIANYSFSRISPKQLRIP

SEQ ID NO: 4823 - DNA, 937 bp, Homo sapien
tgggcccggaaaccccaaggcccagacggctctcagatccggggactgcggataaatggccttaggccgcgggcagcgagatgttgcgttccggtgtgggtgtgggtgtgcctccgacggcgtctcggtgccagtgtcgaggttctttctgcttagctacccggagccgactacggaggaggacacctgagtttacgtctcttccatctgctgctcgcctcagctgcctgggtccccgacgagagccaggtgacacttaactccgccatctgcgttttgagcactgttctcataatggagtttcctgatttggggaagcattgttcagaaaagacttgcaagcagctagattttcttccagtaaaatgtgatgcatgtaaacaagatttctgtaaagatcattttccatacgctgcacataagtgtccgtttgcattccagaaggatgtgcacgtcccagtatgcccactctgtaatacccccatcccagtaaaaaagggccagataccagacgtggtggttggtgatcacattgacagagactgtgactctcaccctgggaagaagaaagagaagatttttacataccgttgctcaaaagagggctgcaagaagaaagagatgctgcagatggtatgtgcccaatgtcacggcaacttctgtatccagcacagacaccctttggaccacagctgcagacacgggagtcgccccaccatcaaagctgggtgagaagagactccgctgcgatggctcggagcacgcagtagcatgcgtggaagcagcttacactctagtgggaagtggagccccattgagcaccatcccacactggctgctgatcttgtttgttgagggagatggtactataataaaattgaatgctgaagttgaaaaaaaaatctatgtcgggtgcggagaaagaggtaatgaaatg

SEQ ID NO: 4824 - protein, 145 aa, Homo sapien
MEFPDLGKHCSEKTCKQLDFLPVKCDACKQDFCKDHFPYAAHKCPFAFQKDVHVPVCPLCNTPIPVKKGQIPDVVVGDHIDRDCDSHPGKKKEKIFTYRCSKEGCKKKEMLQMVCAQCHGNFCIQHRHPLDHSCRHGSRPTIKAG

SEQ ID NO: 4825 - DNA, 1536 bp, Homo sapien
aagaaaagtgttcagaaatctttatatggggaaagagacattgcttctaagaagcccctcctcagtcctattcccgagctgcctgaagtccctgagatgacaccttccattccgagcatccgaagactgggttcaggttatttcagttcaaatggcaaactggaagaagtgaagactcctaaaaatccagtgaaaagaaaggatcttttgcgtcatgacccagatttgcatatgcatcaaggctatgataaatatgatgtctctgaattctgctcttatataaaaagttcctcatcgcttggcaatgctacttctgatgaagatccaaatacaaatataatgaacattaatgaaaataaaaatattccaaaagcaaaaaataagtcagaaagtgaaaatgaaccaaaagctggaactgacagtcctgtttcttgtgcttctataactgaagaacgtgtggcatcagatagtcccaaacctgctctgaccctgcagcagggtcaagaattttctgctggtggtcaaaatgcagaaaacctttgtcagttctttaaaatttcaccagatttaaacataaagtgtgaaagaaaggatgacttcttaggagctgcagaaggaaaactgcaatgcaatcgtttaatgcctaattcacaaaaagactgtcattgtttaggagatgtcttaattgaaaatacgaaagaatctaaaagccagagtgaggatttgggaagaaaacccatggaaagtagcagtgttgtgagttgcagagacaggaaagatagaagacgttccatgtgttattctgatggtcgaagtttacatttggaaaaaaatggaaatcacacaccatcctccagtgtgggcagctctgtagaaattagtttagaaaattctgaactgtttaaagatttgtctgatgccattgagcaaacctttcagaggagaaatagtgaaaccaaagtgcgacgtagcacgaggctacagaaggatttagaaaacgaaggtcttgtatggatttcacttccacttccttccacttcccaaaaagccaaaagaagaacaatatgtacatttgacagcagtggatttgaaagtatgtctcccataaaagaaactgtgtcctccagacaaaaaccgcagatggcacctcccgtctcagatccagaaaacagccagggccctgctgctggttcttccgatgaacctggtaagaggaggaagagcttttgtatatctacacttgcaaatactaaagccacttcccagttcaaaggctaccggagaagatcctctcttaatgggaagggagagagctctctgactgccttggaaaggattgaacataatggagaaagaaagcagtaattgacatttcctgcagagtctgtagcaagagggaaagtaaccatctatgctgaaatgatctgtctagttcccattctctgttcaacctcagtgtttcaaaagttcctaataaataaactcatttgagttgaacctacttttatgtagaaataaataagtttcttcatcatt

SEQ ID NO: 4826 - protein, 454 aa, Homo sapien
KKSVQKSLYGERDIASKKPLLSPIPELPEVPEMTPSIPSIRRLGSGYFSSNGKLEEVKTPKNPVKRKDLLRHDPDLHMHQGYDKYDVSEFCSYIKSSSSLGNATSDEDPNTNIMNINENKNIPKAKNKSESENEPKAGTDSPVSCASITEERVASDSPKPALTLQQGQEFSAGGQNAENLCQFFKISPDLNIKCERKDDFLGAAEGKLQCNRLMPNSQKDCHCLGDVLIENTKESKSQSEDLGRKPMESSSVVSCRDRKDRRRSMCYSDGRSLHLEKNGNHTPSSSVGSSVEISLENSELFKDLSDAIEQTFQRRNSETKVRRSTRLQKDLENEGLVWISLPLPSTSQKAKRRTICTFDSSGFESMSPIKETVSSRQKPQMAPPVSDPENSQGPAAGSSDEPGKRRKSFCISTLANTKATSQFKGYRRRSSLNGKGESSLTALERIEHNGERKQ

SEQ ID NO: 4827 - DNA, 7525 bp, Homo sapien
cccgggcgagcccgccgtgcgcacagctctgcccgccgcccctggagcggatccccagccgtccctgggcgttctcccgggttctagcaaagccccccggggtgcccatcagtttccttgggtgactacagcgtgtgttttttctttcctctttcccctgcctgtgtgcccttctccaggatggcagaggcggaattgcacaaggaaaggctgcaagccatagcagaaaaaagaaagaggcagactgaaatagaaggcaagcgacaacagcttgacgagcagatacttctgctgcagcattccaagtccaaagtgcttcgggagaaatggctgctgcagggcatacccgctggaactgccgaagaggaggaagccaggaggcggcagtctgaagaggatgagttcagagtcaagcaacttgaagataacattcagaggctggagcaagaaatacaaacgctagaaagtgaagagtcccagatatctgccaaagagcaaatcatcctagagaaactgaaggaaacagaaaaatccttcaaggactttcagaagggtttctccagtacggatggagatgcagtaaattacatttcctcccagcttcccgacctgccaatcctctgttcacgaacagcagaaccatcacctgggcaggacgggaccagcagagcggctggagtcgggtgggagaatgtgctgctaaaggaaggtgagtcagcctcgaacgccacagaaacatccggcccagacatgactatcaagaagcctccccagctttctgaggatgatatctggctaaaaagcgagggagacaactatagtgccaccctcctggagcctgctgccagctctctttccccagatcacaaaaacatggaaattgaggtgtctgttgcagaatgtaaaagtgttcctggaatcacctctaccccacatcccatggaccatccctccgctttctattcacccccgcataatggcctccttactgatcaccacgaatccctggataatgatgttgccagagagatccgctatctagatgaggtgctagaggccaactgctgtgattctgctgtggatggaacgtacaatggaacatcctccccagagcctggtgcagtggttctggtgggcggcctaagcccccctgtccacgaggcgacccagccagaacccactgaaagaacagctagccggcaggcacctcctcacatcgagctcagtaatagcagccctgaccccatggcagaggcagaaagaacaaatggccattcccccagccagcctagagatgcgctgggggacagcctgcaggtgcctgtcagccccagctccacaaccagctcacggtgttcttcccgagatggagagttcactctcaccacactgaaaaaggaggccaagtttgagctgcgtgccttccatgaggacaagaagccctccaagctctttgaggatgacgagcatgagaaagaacaatactgcattagaaaagtgaggccttcagaggagatgctggagctggaaaaggagaggagagagctcatccgcagccaggccgtcaagaagaatcctggcattgcagcaaaatggtggaatcccccgcaggaaaaaaccatcgaggagcagctggacgaggaacatctggagtcgcacaaaaagtacaaggagcgcaaagagagaagggcacagcaggaacagttgctgctgcagaagcagttacagcagcagcagcagcagcccccatcgcagctctgcacagcccctgcctcttctcatgaacgcgcaagcatgattgacaaagcaaaggaggacattgtcacagagcagatagatttctctgctgctcgcaaacaatttcagctgatggagaattccaggcaagcggtggccaagggccagagtacacccaggctgttctccatcaagcctttctacaggcctctggggtcagtcaactcagacaagccactgactaatccgagaccaccttctgtcgggggacctccagaagacagtggtgcctcagccgccaagggacagaaatcccccggtgccctggagaccccatcggcagcaggaagccagggcaacacagcctctcaggggaaggaagggccctacagcgagccttctaaacgtgggcccttatctaaactgtgggctgaggatggagaatttacgagcgcccgggctgtcctcactgtggtcaaggatgatgaccatgggattttggatcagttctcaagatctgtcaatgtctccttgacccaagaggagcttgactctggtctggacgaattgtcggtgaggtctcaggataccacagtcctggagaccctatccaatgatttcagcatggacaacatcagtgacagcggggcatccaatgagacaaccaatgccctccaggaaaattcactggctgatttttctctgccccagacaccacaaactgacaacccctcagagggccgaggagaaggcgtctccaagtcatttagtgatcatggtttctattccccttcctccacgctgggggactctccgttggttgatgaccccttggagtatcaggctggcctcctggtgcagaatgccattcaacaagccatagccgagcaggtggataaagctgtgtccaaaaccagcagggatggagcagagcaacagggacctgaagcgactgtagaggaagctgaagctgcggctttcggctcagaaaagcctcagagcatgtttgagccacctcaggtgtcttctcctgttcaagagaaaagggatgtattaccaaagattctgcctgctgaagacagggcgctcagggaaagggggcccccccagccactgccagctgtgcagcccagtggcccgattaacatggaggagaccaggcccgaaggaagctatttcagcaagtactcggaggcagctgagctgagaagcacagcctccctcctggccactcaagaatctgacgtgatggttgggcctttcaagctgaggtccaggaaacagcggactttgtccatgattgaggaagagatccgagcagctcaggaaagggaagaggagctgaagaggcagagacaagtcttgcagagtacgcagagccccaggacaaagaatgccccatcactgccctccagaacatgctacaaaactgctccagggaaaatagagaaagtcaaacctcctccatcccccaccactgaaggccccagcctgcagcctgacttagcccctgaagaggctgccggaacccagcggcccaagaatctgatgcagaccctcatggaagactatgagacacacaaatctaaaaggcgcgagagaatggatgatagtagttacacttctaagttactgtcttgcaaggtgacttccgaggtcctcgaggccacacgggttaatcgaagaaagagcgcactggctttgcgctgggaagcagggatctatgccaaccaggaggaagaagacaacgaataaacttccttcaacccaggaagcgtctttggtgcttgggagaccaagaaaccaagaaattaacaactgaaagcattttaatggactatttattaaagtgcaaacaaactcagcaatccttatgtagaccagaagctgcaatatacaatgatgaaaatgaaacgaaaaggaagtccccccatcagactctggacacccaggaatcaaaagagaaaggacttttttggtgactcaatcccagtgtctggtttggggccaatctacaatggatccaaaaggacaaaacatgttacaagcaaatcaacatagttgctgcaggcggaactgagaccagcctctctgggcgatgaaggacaatggtggtagggccacttagagagcagtagggcccaggctggtgcagcctacatggcacaggatatttccctgcaccagtttcccacctgtcacttgcagcatcagagggtgttgcattaactccattttctccagcagccataaaatgaatggcgtttctctccatatttgcccagaagaggcagttatgattccacttctcctacatttaattatttttaattgagaacaactcatgatcacaattcataaaatccatattttaagacaatagttcttcatgtcacaaacacaatctattctacatgaggaggctgagaaaggggaagagaaaaacaaaccaaatggatgatgttagctttaggatcgtgtctgcttataatattcactgatctgcagtttatgagaacacattttcacagttatgtttcttcataggaaaactatatttagtgggcaacaactatttttatgatgggatgggggagtatatacacgtatagaatctgtacgcgttgaacaacttggttcaagatggtgggggcatttttagagcggcaataattgaaaaaaaaggcgaactctgccttggagaggtagatgataagaaataaaaaggtgtttataactattttgtattataaagtgggccttagagataggaagaagaatgatggattccttttggatcaatcagaaaggaaacacgaaagaaaagtcaggaaggtagagagagaaaaagggagggaaggagaaagaatgggaataaaataaggaggtaagagatactatttttgctgagcaaccagtgtgtttcaggatgatacaaagaaaaatatagaatagaaataagtgcaggcttggaatcagctacaaatcctaaagatggggtgtgtgtggatgtgtgtgtgtgtgtgtgtacaccattgtgtgtttgtaaaatgtgtatgttcatgagtaagggtgtgtgtgtgtgtgtattaaaattccagagtgaccgtggcacttgggtgtacaggtaattcctccagagctgtttgctggcttcaggagtggagtgagaatttcttttttatgaaaagggatataaaggcaccgagctgatgcagtatttgtaatattaagttgacctaacaaggtatttgcatgagtcacaattacaaagttttgagcggttttgtaatttgacatttaggaaagtctcctatttattctcatactttacattcatgcttagtatactatagaggatgccagctttaatctttctgtcatttaaagccatatgataagggtattcaataattgggtgccctaaatttctggatgagaaaattttcaattctggccatgagaaagaaaaaaaaataaacagccttctttttttttcctttgttttaaaactgtggttttttaaaaaagcaataattaactcagacctcactaaaaatcatttttgtttttatattgttatgtcataagctctattatgttattctaacaagtagcaatttcacaaaatttgtatgtagatgttaacgcacatttcctttgcttcttttattagactagtgttgactttggggggggacatttattcacaaatgagaagtaggcacaaagtaaaaaatggaaccatctactaacaaggatcctttaaaactgccaagggagctctaacttgaagccacatcctacagatggcagcccaaatagcacatgggcaattggcaccatctttatatggttgagtctcctgaatattttgaatgaattctcaacaaaatgtgctagccactggggacgcaaaacaagtaagatccctgttgcaagaaattcattttatagtgagggaggttggcatggagactaaaattctcaggaaaatgagatccgtgttagattagaagtcctgatgtgaaatgggaggactcaggaaggaggatcgtctttacctgaggatttctagccagaggtcccagatgcctgggctgagaacccagcgataagggggcgttcccaaagcagacacagggataagaacagaggaggcagcagcattgcacagccccaggcacagtggcagttaggatggctggagagtaggatagttctatgggttgcccaaaaaatgtgatgcgcttcatgttttctctgactcatggatctggtagagaccatagacatgatatagactaacttccccatttttcacaatgaaggtaaaccatccttatgacttaccttaaagttttttgttctgttttgaaggaaaccatgtgcttcatgaaacctacagttgacaagagaatgtacagctaagagaaaagcttaagaggccacactattcgcggaatggctttagaggcagatgaagtggtctttgaccacagttgattgaaccagagcacttattgcttaaagaataacagagttctagagctgggggttcttgggccatgctccgtgtgtggataaggaaagaaatactgtttctgggactctcccacagtcacaaagctgttttcactgtggcccctacatctcttaacttttgctattactcctatgctgccttccggattactgctgtctatcttcttgctccactcactgaagatcctattataatcccatgaaaatgtaaattacagtttacttgggagagccagattttctctgtgctcttgagttttttattcattcaagaaaccttgggccaccgctttgtacatagcaccgtgctaggctctgggatcccaaatggacccttttaactttctgaagatgggaccgtcccctggaggaaagtcattcctgcctaatccatcgagagaaagaggcttacgaaaaactttgcctctgatgctcagccccacccccaaatagcacacaagcttgttaaccccacctcttacaaaatgtttagattctgtaggtgttaaaagcctttctggaagtattgcattctgccgtgtttataggtgttcactttcctccagagctgattaactactgacatgacttggctttctcatccagaaattatggaaacagggtctgtcagtggcaggaggccgtgctgtgttttacttggatgacacaatgcagtttacttgcctcttcatacccatgcatgctgctcaccctagacaatgacatataagccgtatatagatcaatgtccacatatatatacacacacacatatatatatataaagtgtaacaaggaacactaaaacagtgttgattcttgtctctgaagacaaataattaaaccttttttttcccaactaaagaatggatttaattaaactatgtattgaaaaaaaagtagcctaagtgttagagatggtgaatatattccattttagttaaagaacaaatttcctgaattttaagcattcagtgagctgccaattttgattttgtgttgctctttacccaaattattttttctttgtttttctttttttgggggaggaggggaaaaaagcagcaatactgtgtttggaaattatactctgtatctggttttcctgtgtatgttaaccacttaaatgttattatcctgctttggttttagagtgattgtgaggcattcaatgcaagtatacagttattttctcattaaaatccaatgtgtgttgagtttttataaaaaaaaaaaaaaaaaa

SEQ ID NO: 4828 - protein, 1103 aa, Homo sapien; identical to SEQ ID NO: 891

SEQ ID NO: 4829 - DNA, 1720 bp, Homo sapien
gagaagaccagggaagaagcagaacttgaggccaacagtgtgtttcgtcaaaaggtagaaatgtcctaccagcggatggagaatcctggctgccatgtggttgatgccagcccctccagagaaaaggtcctgcagacggtattaagcctaatccagaatagttttagtgaaccgtagttactctggccaggtgccacgtctaactagattagatgttgtttgaaacatctacatccaccatttgttatgcagtgttcccaaatttctgttctacaagcatgttgtgtggcagaaaactggagaccaggcatcttaattttacttcagccatcgtaccctcttctgactgatggacccgtcatcacaaaggtccctctcatcatgttccagtgagaggccagcgattgctttcttcctggcatagtaaacattttcttggaacatatgtttcacttaatcactaccaaatatctggaagacctgtcttactcagacagcaccaggtgtacagaagcagcagacaagatcttccagatcagcagggagaccccggagcctctgcttctcctacactggcatgctgatgagatcgtgacatgcccacattggcttcttccacatctggttgcactcgtcatgatgggctcgctgcatctccctcagtcccaaattctagagccaagtgttcctgcagaggctgtctatgtgtcctggctgcccaaggacactcctgcagagccatttttgggtaaggaacacttacaaagaaggcattgatcttgtgtctgaggctcagagcccttttgataggcttctgagtcatatataaagacattcaagccaagatgctccaactgcaaatataccaaccttctctgaattatattttgcttatttatatttcttttctttttttctaaagtatggctctgaatagaatgcacattttccattgaactggatgcatttcatttagccaatccagtaatttatttatattaatctatacataatatgtttcctcagcataggagctatgattcattaattaaaagtggagtcaaaacgctaaatgcaatgtttgttgtgtattttcattacacaaacttaatttgtcttgttaaataagtacagtggatcttggagtgggatttcttggtaaattatcttgcacttgaatgtctcatgattacatatgaaatcgctttgacatatctttagacagaaaaaagtagctgagtgagggggaaattatagagctgtgtgactttagggagtaggttgaaccaggtgattacctaaaattccttccagttcaaaggcagataaatctgtaaattattttatcctatctaccatttcttaagaagacattactccaaaataattaaatttaaggctttatcaggtctgcatatagaatcttaaattctaataaagtttcatgttaatgtcataggatttttaaaagagctataggtaatttctgtataatatgtgtatattaaaatgtaattgatttcagttgaaagtattttaaagctgataaatagcattagggttctttgcaatgtggtatctagctgtattattggttttatttactttaaacattttgaaaagcttatactggcagcctagaaaaacaaacaattaatgtatctttatgtccctggcacatgaataaactttgctgtggtttactaaaaaaaaaaaaaaa

SEQ ID NO: 4830 - DNA, 2695 bp, Homo sapien
  Unsure 686-984: Unknown base
aaagaatttaaaagttttatataaaggcatagctactatctcatctgcccagtgtagtcatgaatagatgtcacataaagaaaagaaaaccagaattcttgttaatatggccagtttgaagggtggtggcggaggtattgagcaggcagctcagggaaatgccagggagacccttgagcacagaaactcctgattgtccccagggactctccgtggacacaggagggattttccaggatttcacatgaattcaatgaagggggctgtgtcttattcctggatgctttgcctccttcatggaattcagtggatttaatggaagttcctaggcaacaataaagagtagaaaccaggttaacagcgagggcctcatctcacaccagatcatatcaggctacacaaaagtagatggaagacaccacccaggcctccagctatacactggagaagaagccaaactagtctacttcatctaagaaagttgtcaaagagagcccttctatactatcttaaggtaaaaagaaagactctacccagctgccctgattaagcattagaaagataagtgttctgatcattaggcgaaagacaatggggaaaaatgtagaaaagaaatatgacatgagccagatgaagaacccatcctgaaaggatatataactcaggggacaaaagacaactcaccnnnnnnnnnnnnnnnnnnnnnnnnnnnnnnnnnnnnnnnnnnnnnnnnnnnnnnnnnnnnnnnnnnnnnnnnnnnnnnnnnnnnnnnnnnnnnnnnnnnnnnnnnnnnnnnnnnnnnnnnnnnnnnnnnnnnnnnnnnnnnnnnnnnnnnnnnnnnnnnnnnnnnnnnnnnnnnnnnnnnnnnnnnnnnnnnnnnnnnnnnnnnnnnnnnnnnnnnnnnnnnnnnnnnnnnnnnnnnnnnnnnnnnnnnnnnnnnnnnnnnnnnnnnnnnnnnnnnnnnnnnnnnnnnnnnnnnnnnnngcctccccatagatgtctcctgccatagaagaatttaagaagttcataaattcaataaaacaagagttgaaggcctgtcccactgtacccaatttctccctctctgaactgcagcctagaaactctctacaggcagtaagctggggcagtcacagaggtgacctcatctgtttcccacatcctgcattaggacagtgatcagggatcagtatccttcattgactgatttccaatatctcgagacctgttgtttcatatattttgccttattttgcaattgtttcatatattttgtcttattttgcaattgtttcaggagggaggataaatatggtccctgttcctctatcttgaccagaagcatctaagaaggcagtgaagcaacatgtgtacagttcttagggaaataaattttgacctaaaaatattaaacctagtcaaaatattattctagtacaaaggcagcacatgggtatttttgaacataaaagagttctagaaatacaggacccatgaatcattcttgaagaaaagttactcagtaaggaaatctagctaagcaagcaacatgtacaaataaaagattattataattggaccaaagttaagtttaaatccattcacatgtatataattaagatatataggaattataattacagaaaagaatgttacaaaccttcacaaagtaaaaatatttttatatcagatagattcttctgtttcaatccataaaaccagggtttggatcattttaaaaaaacaaacaaaaataatttattggaatcattagggaggacctgatagaataaaatgacaagctgaccaaataggccttagaagggagaggtgcctgggcagttacaaggacctaggtagcaggggtgacttggccacagtcattttctttacttgatttaaggaggttaaattacagtgagagagttgcacttatttagtttgcataccgtactcaactcttagctagcatagggcaggttccttagttgaaaaatttccacaaaacatgatgtaaagtggaaagatcagttcccccaaagaatatcagttaccaaagtaggatgaaaggatgttgggtagatcaaaacaacaaatgtccattacagcaattaacaaaagttagggagtggggaagtctgagtgctaatatggatttcaaaacaactttaaaaatggcttcaaacattttatgctttttgtaatttagtcattttaatattagataaatcttcctgtaactgaaagttcttgagttaaagaaaaatattcggtagttcagctcttccttcaattttattagttgctttttcttttgttcaagtgaaataaacataaaaataattttaaaatattatgtatcatatccttcgatttaacataattctatctagctgttcttatattttctctgatatatttttaaaagctttctggaatattattaaccttgaatatttctagttgatgagtttatgagtgatttattgcttccttttctctttcagtattgctagaattaattttattgactttgcccctttgcataaagaccttgaaggtcacatgctgaaatcgccctctactaaaacaaactcatagaaataatggggaagatatttcaaaacattgccatatgcatagccatcctcacaaccaagaaaagcgcctctccatgaactaaaacctatga

SEQ ID NO: 4831 - protein, 21 aa, Homo sapien
KNLKVLYKGIATISSAQCSHE

SEQ ID NO: 4832 - DNA, 8109 bp, Homo sapien
cacctgtccgtcccgccccctcctttgatgccgatgtctcagccacagttccggcctcacgtacagaccgctcagcctcaggccagcagcagccggatgcagtgcccccagcgccaggggctccggcataatacaacttctcagaatgtaagcaagcggcccatgcagcaaatgcagcccactgcgccaaggaacagcaatttgcgtgaattacccatagcgccgtcacacgtgatagaaatgagcagcagccgctgctctgccacgccctcagcacaagtgaaacctatcgtcagcgcgtcaccaccctcgcgggccgtggcgggttccagaagctcacagggaaagacggaagtgaaagtcaagccagctagccctgtggctcaacctaaagaagaggcaaaaacagaaacagagtttcctgatgaagatgaggaaacaaggttatatcgcttaaagatagaagaacagaaacgcctaagagaagaaatcctgaaacagaaggagttacggcggcagcagcaggctggtgccaggaagaaggagctgctggagagactcgcgcagcaacagcagcagctgtacgctcccccacccccagcagagcaggaagagcaggcactgtcaccatcacccaccaacggtaacccactgttgccctttccaggtgcacaggtcagacaaaatgtgaagaacagacttcttgttaaaaaccaggatgtcagtatttcaaacgttcagcccaaaacatccaattttgtaccatccagtgccaacatgcagtatcaaggacaacagatgaaagcactgaaacatttgagacagaccagaacagttcctcaaagtcagactcagccgctgcataaagtgctcccgatcaaacctgcagatgtggaggagccagctgtcccccagactcctcgagtggcgtccatccagggccggccccaggacacaaagcctggcgtgaaaaggactgtcacgcacaggacaaacagtggtggtggagacgggccccacatcagctccaaggtcagggtgattaagctgtcaggtgggggaggagagagcgatggcttttttcacccagaaggccagccccagcggcttccccagcctccggaagtgggaccacagcctgcccgcaaggtgacgctgaccagggggggcctccagcagcccccacatctgccagcggggccccacgcacactcgcctgtccctccagggatcaaaagcatccaaggaattcacccggcgaagaaggccatcatgcacggacgaggcagaggagtggccggtcccatgggccgggggcgcctgatgccaaacaagcagaacctgcgggtggtggagtgcaagccccagccctgcgtggtgtctgtggaggggctgtcctcgtccaccacggatgcccagctgaagagcctgctgatgtcagtgggacccattcagagtttacagatgcttcctcagcaacggaaagccatagctaagttcaaggagccagcccacgcattagcatttcagcagaaattccacaggcatatgatagatttgtcccacataaatgtggccctgatcgtggagtgagtcctaacaagagagcctgaccttaggctgtacacacactgtggaatttcttcaagggagctgccggccggcgcagaacccccaggagcacaggtctctccgggccgctgtcctgcgtaactgttctccagagcgccagccagccacgggcctgattccagaggagccgaactgacaggacacagcaggctggagttggtgttagattgcttcacattctcttgtcaccaccaagaactccaagtttttcgttttgttttgttttcaaagtgcttacaatgcatgtagacattgttctttgtggtctgactctatgatcgatcacagtgacttagattcaggaaagaacattaacgtcacaagttctaagtagttttcacagcaaagaatatttgataatggttgcacttatcttcagtgcaggttagaagagtcttctcaaccaagcttaactcgagttgtcttctcagccctcaaaaggctcttgtacaaaatgtagattaaaatttgggtgattgttgattgacctttgcataccctggaaagccagggtgtgagtggggtggttgggagtggtgccagttgaacagcagattctgcttcttgtcactgtttcaaaagcgtcaactctgtgttcctagtttcgatgaactccccattcatttttaacacacttcccagataaggcaatgtgctggacaggcacacggcatggccctcggctagagcagggtctgtgatggcctcacctggcagccctctggcctagttcccaccacacatgaggtggtggaatggcctgaaggtggaacagacctgtttttttcctttttaaatgcagtaaggtggcctgtttatcactggctctgtgatacatgacattctttgggaatttggtggccactgcttcagtcacctctgtttttctgaaggctgttccagcagggctgccctgttcatcagcggatgttcactctggcctgccgttccccgtggcatgcggggtgagggtggctttcttccagccccaaatgagacgagtctgtgtcatcattgaaactgcttttcgtaattgcgggtaggttcctgtaggtgagacatattctccataaagctactgtagtagaattcattctgggcaaacactgaaaaaagtgccttacagtatttctgctcatgaaagagtttcactattttggatatattctaaagtggacctgagctatttgagcaaataatgatagggcatactcagacattttagctaccttttatacctacgatttcatgtcacatttactaatagaattaagggaaatagaagcccgttctttcttactgcccctggagggagcatggcgctagggctctcagcctcctagaaggaagggactaaggagacgggcacagacttgcgtcatctcgtttccacagttgacgttttatattactttctcaaattaagttaccaaaacaaactgaagagctgaagcaggtcttccagaccctgcgatcctttctgtagcagtgattctaaagtggcgtttgctgtgtgcttgagagtaacactgcacgctgcaggggctgttgcagcagtcagtcccaggaagccacagcgcttgtaggatctgctaggaccctgcagctgtgctgccgccacctctgctccagagtgtcccagccaaccctcggaagatgggattgccagtcagccctgcctcaccatgcctgcaggaggctgtccagggagcaggtctgtgtgcccatcagcaggttcccatggctgtcactgcccactcatttccacagttagatacggatgtgttgatgtatttcgtctagtttatttggctcagtccacagctgcgttggagtggtgactttggtagcccttgagctctaattaagagagatccaaaccactcagtacccactgggcagtgggaaggcctaccgacttactttatcattgagggcttactgatacaatgaaatgagtttcatgactttttttttttttaaacactttttgaaatagagtgtgctgtgtttaaaaccaaaaatatgcatgttgtctctgaaaagtaggcattgaaacagacttttttgtagtcagtgttaataaaacggatcctgtttgggccttcattgttaaggtggacttcatggccactggaaggtctgttttggtgttacctgagtgtgacacaggccctggggtgtgcgtgtttctctaactgtctacacatgcacataggcagactttctcatagaatgttcttgaaaggtgattggcaaagtcatgcaggcccgccttaaagcgctgattagaacagtccaacacagtccgacctcactcaatacccacaaccatcgaaaatggattcttagtaccagacaatcccagtaatgaaggtttagtttccttgaaggaaactacagaaaaggaaagaagcagaatgagaaaggaatggtacttaggtgtttggtatgctgctcacgtgaagtcagcccacaccagccaaaccctcgtggaagatctgctgcaaccattatctttgttcttgagttcatcatgcatttaaaatgagatgcaagagcatttagcataccatgtaaatatggaccttttaaaattaaaatactattggaagtgctttcaactcagccacatcttagctattagttctttgtgttgtcttatcaaagtttaatggatacagttccacagttgttgatgtgtttgtgtgtatattcgatttttataaagatggtagtaagtcaatacatttatcctgatctgtgtattatttgttcacaaattcaagaagcttaaaggtcgtaaatatcagtatctcataaggtaaaccaatagctgattatgtggagccaagttacttcttttctttttgcattatcttgttttggttttgtgctgtaatagaagttcacttagctactttagataaccttgcattaccactggtctggccacgtttgttaaatccttatactgatattcttctaaagagtaaatctcatcatttttccagacaaattttgaggggtttctctgttttgtggacaggcagcagcctccgtaggcacccgcaccctgccttgctggaggagatgggatggggcgggaggtggcttcaccataactatttttaatatgggtcattcttagcatgatttgtaaaggtctcaggcaaacagttgttgaagcttgcttctgtggcatttctgaattgtggcagagcttagatcctgcacccaggggtctttttttcaaacagcatcttgctcagttctgtgaacagaaggctttgttactgaaggaggtggaagaggagtttagggtgaaaaggaggaagggatggacagacccaggtgaggagaggcctggggattggggaagctgtcatctcagtgttaataatcaacttgcttctaacacactggcttatcaggggaggtcatccagtccggtcggtggagttgagagcccttgggccagggtgtttggcggcacaggggcatccgctggatggcctggaggagtgggggaggggaacgtcttcactgggtggtgatcagctgggacagttcaggtagggcaggtgagggacccccgaggccctggagccttgtcctgggatgggtttgaagaactcatcactcatcacttgttttcttttggcttttgttgttttttgtttgtctgtttgttttgttttgtatttctttgttattttattgggaaggtaagcggaatgtgctcatagaccatcagacgcttgtcgaaggcaggtcctagtcatgtaattgcacaggacaaggaggtcagcgtgtgtgatggcagcatgctgtgccggcacatcgtggagtcctagaaactctctagtccctgcggctgttcccctcctctgctctctccctggagaggactgccagctcttaagaaacattcctggtgcggtgtctgcagtgccctttgtgggtgacttcaggcttcccgctttcgtggtgctcttcctgggattcgtttttttattaccctccctccctacttgtaggcctcagctatggcttgacgtaatcgcttttagacccaggttggcttcccttcattaagctatgatcctccacccatttttttttttaatttggagtgggagggaggggggtgggcgagagaaagctcgaaaggtattattggtttttcaaaaaattagaggtgacgattctaccagggagttgactgataggagtgtgtgcagggcaggaaaggttcggaggcacccgactaccaccactcggaaagccgctagtccagatcgactagggagaggcttagatactttagtgtatttaaagagcatttcagttaactttttcagctatttttaaagtttgtgaatggagtgttattttggacattcttaaatatgaattctccaaaggcatttagccttgacttaatattaaatcctaaggattttatgtaaggtttttttgcaacctatttaattttttttaaatgcctaacttctgaggtgcataagcccgtggtttgtgtactggaactaaagcggaactcactgattcatattggatccccaggtataccttctgctggtagcatatggctggaaaaggccgtttgcctcacacattgtaacctgccttggctagaaaatgcttttaatgtctcaactctctcttttctgtgtcatgttttggtaggaaatctttaagattggcggacggaacaggtattttagtgagacacttctgagtacttgctttttcctttgacttctaaccaactaaaagagaaggaggtcttcatgttgatattttgcttggttttattttactgattttaaaaggtatatagaaaaatgtaggcctttaaaaagaaacagcatgtagttttttattttaatatgttccatagagtggataggcagacaggtactattgtaatgtattctgtatttaataatttaatatactctagaaagtagacctcatgcattcttttagcatgattttcttttaaactgcttttcattttaagggcacccgtggcggaagctggttttgcaaggactgtgtaagctgtatgcgttctagctgtatgcgttctgtagttttttcttaggtgggtaacattttcaataacgcgcgcacagcacacaggggtgccctgagccgaaggagcaaaaaaagccaccgctcgtttctataatccagctttgcttttcacaggcgtgggatccaggatggtgtcctctgtgaggacttgaactctggggctttaattccactgtttaattttcaggtaccacagcagcaaagcacagagtgtgacctttttcatgtctgagctgattctgtttgctccacgtgcctgcttcttgctactgttcatttagtaatgggatcacctcaccatgccatgctctgggctctccctctctgtccatttctgttttgctttcctggctaaacccatctaccattcttaacactggtagctcctgtcccattccaagactcactctctcagaccttcccatctccctggctttccatgctcctctccctccacctcctggcttcaactgggtgagggccgtattcctgccactctgctccgcctcagccttgagaactccacgtgggctgggtgggaaggtgctgacgattttcacactgtgtttaccactccatcacctctccatcacctctcaacctttgcttcgacaggtcttcactcacgatttattcctccaggtctttgattggagagagtaactttttaattctgttgttttgcagtttggctctgtaggagtgagtggcgattcaaagatgccggcgtcccgcagtgtgcggttcgtgcccttaaccacccgcttctttgtttcccgcccctctgctttcgcaggagctcttgtgcttgagttcagtgttagtggtagcgtggctcactccacttggaggtggcggccgtctgaccgtgtgttactgctttgccgacggggcctcccggccctgatgcgtgtacactctgcgggctgcaccgggtggctctggttgggggcgaagctgtgttgactgggagagcgttggaaattgagacatggagagatgacgggagtgcgtttctctgggtttgatctccatcctgttttctcccagacacaccacacctaccttgggggaatgccgttgcctgttccacccctttgttcacttcgcgttaactgctgtggtaactttttcaggatctgtgtgaagaatggtaatgacgtagttgaaaggaaaatgtactgttgtgtgtttcatttgtgtgatttcgtaccaaaaaaatgtgtttgaactatattgtatgtaatttggaagtcgtgttaataaaaccctgcagtttccaaaaaaatctatgtcgggtgcggagaaagaggtaatgaaatggcagggattcgatatcagcttatcatacct

SEQ ID NO: 4833 - protein, 530 aa, Homo sapien
HLSVPPPPLMPMSQPQFRPHVQTAQPQASSSRMQCPQRQGLRHNTTSQNVSKRPMQQMQPTAPRNSNLRELPIAPSHVIEMSSSRCSATPSAQVKPIVSASPPSRAVAGSRSSQGKTEVKVKPASPVAQPKEEAKTETEFPDEDEETRLYRLKIEEQKRLREEILKQKELRRQQQAGARKKELLERLAQQQQQLYAPPPPAEQEEQALSPSPTNGNPLLPFPGAQVRQNVKNRLLVKNQDVSISNVQPKTSNFVPSSANMQYQGQQMKALKHLRQTRTVPQSQTQPLHKVLPIKPADVEEPAVPQTPRVASIQGRPQDTKPGVKRTVTHRTNSGGGDGPHISSKVRVIKLSGGGGESDGFFHPEGQPQRLPQPPEVGPQPARKVTLTRGGLQQPPHLPAGPHAHSPVPPGIKSIQGIHPAKKAIMHGRGRGVAGPMGRGRLMPNKQNLRVVECKPQPCVVSVEGLSSSTTDAQLKSLLMSVGPIQSLQMLPQQRKAIAKFKEPAHALAFQQKFHRHMIDLSHINVALIVE

SEQ ID NO: 4834 - DNA, 2274 bp, Homo sapien
cggacgcgtgggcaagtaattagaagtaatccttcatttaacatccccactgggtgcctcgaggtatttcctgaagccgaatggtcccagggtgttcagggaaccttacgaattaagaaatacttgactgtggagcaaataatgacctgtgtggcagacacgtgcaggcgcttctttgataggggctattctccaaaggatgttgctgtgcttgtcagcaccgcaaaagaagtggagcactataagtatgagctcttgaaagcaatgaggaagaaaagggtggtgcagctcagtgatgcatgtgatatgttgggtgatcacattgtgttggacagtgttcggcgattctcaggcctggaaaggagcatagtgtttgggatccatccaaggacagctgacccagctatcttacccaatgttctgatctgtctggcttccagggcaaaacaacacctgtatatttttccgtggggtggccattaggaagaactccaaatcaaaatgctatgtaaatgtctatgggtgacagtctgctgatggtagaaacctttctttttagttcacaagtcagagatttggacggagctgacacaaagagtttggagctcccccatttctggctctcctttcaggggttccttccccaacccttttcagcagcggtggctgccccccattctgacccctgactcttccagccagaaagatggtggttttctaaaggaactttagctgtcctgcacaatgccgatctgtgtcttgcattttgggtaaaagccataaaaataagaaactcagcctgtggcctttctttcttccaaggctgggcttctttttttaagtgacttcatgcagtttgttgcttttaaaaatttgtccagaatcgttttctgcagaagcatggtctgttaggagcttactggccgtagcagaagcaattgtttcctgaattcttgacatttatctttgctgtattcatttagggcttgggagagtccgaagataattcagtcactgtcagattaataattttgtcaggacaaagaataccgttatgattatttaatcctttaaaattgtggtctccagagcttgttctcagaatggcccagaccaagccttaattgtgatagtgaatattaatggtcactttaaggagaaattataggccaagatgaaatgaacataaacctgtttgccctggctttcagtggaagatgatattagagaccaaaatctggttctgaaggtgtgtatcagccctaaggtgaaccagacttgggaaagattgtctttaaaaatcaatgagtttatgttttaacttctcagcttagttctatgcattgctctataacacacctagttaagttttatgttattcttgaactgtgattttttttctatttactttcatggtttggtgggccattgttatggactgaatgtttgtgtcccacccttcacccccaaattcccgtgttgaagccccaacctgcactgtggagctggggctgctaaggaagtaattaaggttacatgaagtcatggtggggctctgatctgctaaggttggtgtccttatagggagagaccccagagagcttgttccctccctccctgtgcatgcaaacaagagggcatgggagcacacagagagatggcagccacctacaagccaagaggagaagcctcacaatcaaactctcgctgctggcgagagtcttggactctgtcttggacttccagcctccagactgtgagaaacaaatttctgttgtttcagcttctcagtctctggtgttttgttattgcagcctgagaacacagctgtacgattatttgtcaaacagaaaacactgatacttaacaatgctaatgcaattatttatttgcttttcagtctctacaaaacgttctaaaacactaatctaaatattaacagtaaaatatttgcataactaatggaaactaagaaatcatatgaccaatatttcacttattggtaatcttactctactgatttccccccagactgtgatttttgaacttccttgcctttctcctgtctttctgtgtttattcatggaattccagttatctgggcttgaaattgcaggctctcctaacttaagcaaaatctgacagatcagcaaaatgagataaatgtttcttttttctttctgactgcattaaatcagatacaactcagcattaaaaagctatctttgtaaatgttgttactaataaattagtcttataaaaaaaaaaaaaaaa

SEQ ID NO: 4835 - protein, 160 aa, Homo sapien
RTRGQVIRSNPSFNIPTGCLEVFPEAEWSQGVQGTLRIKKYLTVEQIMTCVADTCRRFFDRGYSPKDVAVLVSTAKEVEHYKYELLKAMRKKRVVQLSDACDMLGDHIVLDSVRRFSGLERSIVFGIHPRTADPAILPNVLICLASRAKQHLYIFPWGGH

SEQ ID NO: 4836 - DNA, 1764 bp, Homo sapien
acacacatataatttgaaagaggtgagtatgtactctgacttcagctctcaggttttaaaaattatattagtgggaccagttatgacaagaataatcattatagtacttttcagattttataacctggagcagattattttaagttgattagtaggttctgttacagtttttcttttgttcgtgcacttatagtcttcatttaattcctcatagaatcccagtcacctttatatatcatattattggaagagattcatcttcataatctccagttttttcacagtgcctcacagagttaatcatgccttttggagctagaaggactttagaacttatctagttatgctcctttatattataagtaagggaatagaatcaataagacagtttctgcccaaagtcatgttaccagttggtgacagagctggaaatacgtagagatctatacccttaaatctctccactcacatgctgatatactttctactacaatatgctatagctttatggaactcagggtgatgatcagacgtgtcattagaacatgagtcctctgcttctgattcaggcatacttttgggattcttccatctttaaaggaaaaaggaagccattcatctatatttagtaacccagtaatatctcacttagtttagggttagatctttagttaattcaaccttatagatcatacttatgaaggtgataactgacacgtgttccctgaattttaatttgataggcaatacatctacccactccattattttttaaaacttcatttaatagtttaaacaagattggttttgttttcaatttttattcactcttcatagaatcacaattacctttatatatcatatgttattggaagagattcctcagtaatctccaatctctcatagtgcctcacagggttggtcaatggcttttggaactggaaggaccttagaacttatctgttatgctcctgatagccaatagcagatagaagcttgcaatcaagagggtaggacatgtgttcttcaatggatatcaaaggaagaggttgcaaaccaaagccatttggcaagccctgtagcctgggccatttaagacaggggcggtctcagccaaattgcacccatttaactatcccaaagagccacagtgcctacaacccaggccctaagttgatgaagaaaaagtcaaggaaggaggtgatacaattggaaatattcccatcaaatggttaatcttatttagaaaatgggcatattagaaaaagtccttccaagatgattttggataataaaagttgtatttgtggaaattggtattatctctgttttatgcacttacatttatcccttacattttgtttttagtgaccctacatgacattaaatttaaagtaaaacattgtttaatgttaccttttggcttgagaatgtctttcagctccagaattattgttactcatattttaatcagtaagtcatttaagctatgacagagtaggaattgagaaattatttcatatgctacagtattgaaatgtggatgctgccttgttttataagaagatgatcaaggtttgtgtgcccattacctttcctctgcctgaaagacgtgtctcaagaaaaataaattctattttagatgcaggtactgcattttattctaagaattgatatcaattcaaaacatagaaaactgtaaaagataaatcaggagatggctgattcataatgggtaataaaataaatagcactttcgagctg

SEQ ID NO: 4837 - protein, 48 aa, Homo sapien
HTYNLKEVSMYSDFSSQVLKIILVGPVMTRIIIIVLFRFYNLEQIILS

SEQ ID NO: 4838 - DNA, 1237 bp, Homo sapien
agcgggctgggcgcggcgccggggcgcgcggctgcagcggagcaggctgggaagcgtagttcccggctgagcctcgccgcggccccgcagtcccccagccccgcccttccccgacaggtgtcctctcccggaatcggggtctgaaccccgccacagctctgcaggggaggaagcacctgggtcggggagaagcctgggcaggctctttggagacgctcggggctccggagagcgtggatggcaaaggctttcaagcctgtgatgagcattcctgtgagcgagcatcctgacacggaagccgcgttgagagcggtctcagatggaacagattaaaagggccaataaactgtttaccaatgattgtatatttctgaagaaaactttgaacatcccagttatatcagagaagcctttgttgtttaatggacttaactccattgattctccagaaaatgaaactgctgataacagtttttctcaggaagaggagccagtggtggccggggaagacctccctcctcccagtcctcaagaatctgatgttcagcctgtgcagcctgaggaagtgtcagccagagatttcctgcagagacttgacttgcagattaagttatcaacacaggcagccaagaagctaaaagaagagagcagagatgaagaaagtccctatgcaacttccctctatcacagttaggtgatttgggggcataactctaaccaaaattaagatatgtttggaccataaagaatccaacaactgaagattcaaaaacatcccttctggattcctatagtgtccatcttaaaatcataactaggtagttctacctgctgcactgaagtgattagttccctctggctttctataattttaagtctttattatggcatgatggcaaggttgtagcctaaagctcatcacttttgtaggtggtgttagtttttagactagcttttataaatactaattgacataaagcatcaaagattatttatatatttaggctaaaaataatgtttatctccttatgcaatcctgattatgtgaaaatatggttgctgtttaagtgatgctgaatttgctgtgtgtttataacttaagtgctatatatatatttcgatgtcttacatattctctattaatataaagaaccaaattttgtctgctattttgtaaaaataaactacaaaagcctgaatgagaaaataaactatgttttcaaaaaaaaaaaaaaaa

SEQ ID NO: 4839 - protein, 124 aa, Homo sapien
MEQIKRANKLFTNDCIFLKKTLNIPVISEKPLLFNGLNSIDSPENETADNSFSQEEEPVVAGEDLPPPSPQESDVQPVQPEEVSARDFLQRLDLQIKLSTQAAKKLKEESRDEESPYATSLYHS

SEQ ID NO: 4840 - DNA, 2227 bp, Homo sapien
gctctcgggccgcccctcttcgccgtctccacgcctccgcgggcagttaccagctttggctgctcgcgcctccccaactcgggtaaagctcctcggcctcggcgtgctgcgcctccgcggctgccctgcgccagaattcggttccctcaaaattataaaagcaggaaagctcaagacaaagaaatccaacaaggctagtgatttcagtgatatggagaattggccaacaccaagtgaattagtgaacactggatttcagagcgtcctcagccaaggaaataaaaagccacaaaatagaaaagaaaaagaagagaaggttgaaaagagaagtaacagtgacagcaaagaaaaccgggaaacaaaattaaatggtcctggtgaaaacgtcagtgaggatgaggctcagtcaagtaatcaacgtaagagagctaataagcacaagtgggtaccactccacttagatgttgtaagatcagagagtcaagaaagacctggatcccggaacagctcaagatgtcaacctgaagcaaataaaccaacacataacaataggagaaatgatacacgaagttggaagcgagatagagaaaaaagagatgatcaagatgacgtttccagtgtgagaagtgagggtggtaatatccgaggttcctttagaggtcgaggaagaggccgaggacggggaagaggacgaggcagaggaaatcctcgattgaactttgattattcatatggttatcaagaacatggtgaaaggactgatcaaccatttcaaacagaacttaataccagtatgatgtattactatgatgatggtacaggtgtacaggtgtatcctgtggaagaagcgttgcttaaagagtatattaagcgtcaaattgaatattacttcagtgtagaaaatttggaacgagacttctttcttcggggaaagatggatgaacaaggtttcttgcctatttccctgattgctggttttcagcgtgttcaggctctcactacaaaccttaatctcatcttagaggcactgaaggatagcacagaagtagaaattgtggatgagaaaatgagaaaaaagatagaaccagaaaaatggccaattccaggccctcctccacgcagtgtgccaccaacagacttctctcaactgattgattgtccagagtttgtaccaggccaagccttttgctcacatacagtcagggtgatgatcttctgaagctcttggatgtcatttgatcggaatatgcagtggaataggtgactcactgaaatgcctttataaatactggaacaaatcctgctgcaaaaatgaaagcgatcagactgtcttctgttcaagaatgtctattcccacctcttggtggaggaagttgggccaacactgcagtggagataaccacctttgcgataatgagagacagaccagaggactgctactctttttataggagctgcctatttctgtgtaattggcctgggctgcatgggctgcttttattcatggtgggaaagttaattattattattctggaaataccgcaagattatgttttctgtttccagggttatgtacttgtgtccagatgaataaagcagaaaaagaggggattgagtagcatttcccagattcttaagtactttgctattcgatttgcctttcagtgtagtgtacattgtaaaactcagatattgtcatgatgtttcacttggacataagacttattaatgtggtcacttaaggggtaaggaatttaagaactggatgaggttatttcttcctttactcttcaaaatgtatttttgatacatcagtatgagaggacgtcccatcaacaaagcatcgatgatggacagtctcacactatttttatcatatgtttctttgtcagccttctgcttctaatcccagtaagcaacttggacaggcattttaaaagctgaagaaaagtgacattattttagctagtggtttttaatttattttttgttaagatataatgggtgattatataagttagatttatttatgatatcaacttgggtccaagatgatagttttagctagcttatgaacattgggttcacaaggcattgggtaagttagataaaatagcatatactttctctgcagggtaggtaagataggtcagtcaagttggtaatgcctgtccattaaccatttatgcatactaataaaattataagaataaaatcataatgttgt

SEQ ID NO: 4841 - protein, 405 aa, Homo sapien
LSGRPSSPSPRLRGQLPALAARASPTRVKLLGLGVLRLRGCPAPEFGSLKIIKAGKLKTKKSNKASDFSDMENWPTPSELVNTGFQSVLSQGNKKPQNRKEKEEKVEKRSNSDSKENRETKLNGPGENVSEDEAQSSNQRKRANKHKWVPLHLDVVRSESQERPGSRNSSRCQPEANKPTHNNRRNDTRSWKRDREKRDDQDDVSSVRSEGGNIRGSFRGRGRGRGRGRGRGRGNPRLNFDYSYGYQEHGERTDQPFQTELNTSMMYYYDDGTGVQVYPVEEALLKEYIKRQIEYYFSVENLERDFFLRGKMDEQGFLPISLIAGFQRVQALTTNLNLILEALKDSTEVEIVDEKMRKKIEPEKWPIPGPPPRSVPPTDFSQLIDCPEFVPGQAFCSHTVRVMIF

SEQ ID NO: 4842 - DNA, 348 bp, Homo sapien
aaaattcacggtatgcttggaacgattgagattttctaggtagaaatagcctagacatcaaagttggtgtgaaccaaaatagagtcagctgacccagcatcagccacactctgggttggaaaatgtttgcctgttggaattaatttaagcttaagtatatatcaacattattttattgtgcaattaaaacaatacaaattcatggttttttaaagttaaaaattctaaccactgtaacaacagtttttgtgttattttctgtattaaacatcttgttgcacgcatttgaggtcatcagggtgcaaaatttgtattcctgaaaatgtcatatattttcattaataaata

SEQ ID NO: 4843 - protein, 8 aa, Homo sapien
MSYIFINK

SEQ ID NO: 4844 - DNA, 667 bp, Homo sapien
aaaggattgacatctttgacaataattagactggcataagactaccacatgttataaagtgctaaactgcatatcatagaataaatgatccgagagtttagatgaggcaaataacagagtaatcaaaaatggcttcaggtagtcggtaaaatttgaacaggtagaatcagctaggaaaaagatattccatatagagtgaatatcctaggcaaatgcagagaatgagcagggagtttgtaaaggacagagtgatttgtaggcctcttatctcacactcttgaaactgattttgggggtctaccctcagtgcagtgttcagaaataagcattttttaaaagttacctgtcttatctgcacaatgaattttcagaattatcctgctaggtgatggaaggtttagacattttcctgtgtcaaatctgcccaactgtcattgttgttgctgaactcctaaatgtctttattggtgatgggtatgggaaggatgggcgtgaagtcccctaatctgagattgtgttattttagtccctgatgcttcctgcgtttatgaagttgtataggaatttttccaccatacatgatacatgatcatatctaagatgtcagcatgttcataaagaggattatttttgtaaaactattaaaagttttgcttttctcgaaaaa

SEQ ID NO: 4845 - protein, 19 aa, Homo sapien
MFIKRIIFVKLLKVLLFSK

SEQ ID NO: 4846 - DNA, 4990 bp, Homo sapien; identical to SEQ ID NO: 3217

SEQ ID NO: 4847 - DNA, 210 bp, Homo sapien
gtcatgtctttagaaggtgaacaagccaacttgtgatggcctgccttttgcttttggcagttgggatgagaacaattgactctcccattggttgttagatagttgaaatggtgcgttggtggtcatacttagtgttctaggctgtgaaatcatggagttcttccacttccaagaatgactcatttgctgttggattctagtacagaattt

SEQ ID NO: 4848 - DNA, 6309 bp, Homo sapien
  Unsure 267-571: Unknown base
catgagccaccatgtctggctgattaattttttttttaactgtaagagtttgatcttttcaaatgtgttcagaaactaatttggattctttgattctagtatctcaacgtgtttatttttagattctgataagtgaaatggatgtccttgtggagctctggcctccccagcttatctatcagtcctgctgtcctcacctccttgcctctttccatgcttacccttaagccaccatctttctcagctagcgtgtgtgtttctagtgtnnnnnnnnnnnnnnnnnnnnnnnnnnnnnnnnnnnnnnnnnnnnnnnnnnnnnnnnnnnnnnnnnnnnnnnnnnnnnnnnnnnnnnnnnnnnnnnnnnnnnnnnnnnnnnnnnnnnnnnnnnnnnnnnnnnnnnnnnnnnnnnnnnnnnnnnnnnnnnnnnnnnnnnnnnnnnnnnnnnnnnnnnnnnnnnnnnnnnnnnnnnnnnnnnnnnnnnnnnnnnnnnnnnnnnnnnnnnnnnnnnnnnnnnnnnnnnnnnnnnnnnnnnnnnnnnnnnnnnnnnnnnnnnnnnnnnnnnnnnnnnnnntacacattaggatgatctatattgaaatctacatggaacagagtgggacttctaattgtatgacttcaagattttgctttgtttaaattaataactgttttcagaattaagtgcttaaaaacaaatttgattgaaaagttcaagacaagaattttgctctctatggctgttccatataaatttgatggttgattctgaatgtaaatgactgaagaattaaaaaataagaaattcctttttaaaaggcatgcctcttgcactgtgaacaagacagtagtcccttaaaccatgaatatgtcagtgttctatggattacgaaattagtaatgttgcttagcccaaacgtgttttttaaaaagtatagttttgtacatctctaagttatcaaacttcaaaattgagaacaaatttaaaagtccatatatgcaactctagtaagcacttaataggttacatagcactggttaagaacaattaattttgtttctatattattactaattattattacaaatcaaaaaacactgtgataagaacttcaaagcatatatacaaatatagttaaagcaatgaatagatgaaacatgtctactttatttcatttagaaaggaattaacttttttgttaggcttttaagaaaagttctattcattttaatcccctagggaatttgtaatatgtcctacttcatatcatcttctgttgcctctattgatccacattttctgcagtggatttcttgaaaagaatcacacttatagtatgcctctagaaatatgattttactgctttgaagtttacatgaaacatgccagttgcttaactctaattttttatatgaatctcagtagcacttttgttgtacattgtgttccaataagtatagtatggaacactttctcatttttagttcccataatatgccagtttttgctttcctagtgttctgtgagtattaggatttggcaatctgcttttgcatttcaatttctgttttacatgcaagaaaaacatggacactcttacgtggtgcttgtagctgtgtctccgtagagctcagtaaatagttctacagggtttagaggatgagaagcgattgtcaaattaggctgaattgtagaacacaaataatttaattcaaaataacttaccaattttatatacatgataaagtattcagacaactttctaaatgcataatagtaaaagattgtgaccagatattatgatattaataaagttaccagatactaaaatcaatgaatgtaatttgaattacttagaaattgtatattagagcccttatgagtaaaaacatttcatttagcaacttaacttttagaatattcttcctacttagggattttgattagattgtaacattaaattcgagaatatttagtctcaagagaaacacttcctggcatccatcttaaatagtggccttttcccactatggtgtttttaaatgcatattcatatataatagtatgtttcttacatttaatccctaaataacttagataatcattcagtggagaacaagtaaaaggatatcattccttttggagataaacattgagtgtctagaatttttttctattaatgctttgtatattagttttttaaataagatctatagatatgtatttatgtgtgtcttatatatgaaacagtgctctgggtttgactcctatgttttgtaattttaaaaactacgatatgcttgcagaaattcattgagaagctgttataaaaaatgcagtgaagcatgaccaaatagctaaaaatattactgaatctttacaaatatataatctttattgttgtactgtggagtgcaaggatactaaatattggctattgataaaatactaacttgcatttcatggcaaatagatgttatatcgcttgattagtctagaacatttctaatattttgtgctttcatatatcaaaggagattatgtgaaactatttttaaatactgtaaagtgacatatagttataagatatatttctgtacagtagagaaagagtttataacatgaagaatattgtaccattatacattttcattctcgatctcataagaaattcaaaagaataatgatagaggtgaaaatatgtttactttctctaaatcaagcctagttgtcaactcaaaaattatgttgcatagttttattttgaatttaggttttgggactacttttttccagcttcaatgagaaaataaaatctacaactcaggagttactagagaagttctaagtatttttttgctaagtagtaaaaatataaacatatgaaaatgccataatgcctgtcatagtcattgtttcatattttgtcatataaaatcacctaccctgcttctagttttatactttaatctgagtgaaagtatgatgtggtggaaagaaaaaacagtacagtattacatctgagttagtctttgaaaaatcatagtagtaaatgaacctcaacactgagtggtcaaaaattgggttaaccaatggggggagaatatttggttaattgttttaatattaaattttcaagtttataatagagttatggttgagtagtcatccatactgagtaatcacgcattttttaaactataattgaggctcttctaaagctttgttttctaatctaagatacaaaggatattcttgatcttgcttgattgtaactacatctaccagtctttaatgtctgtttggggtgagtggcgatcctctgttgtaggaatgtttttgaagatttctattttgttttccacttaggaaattcccctctctcatttggggtatatgcgttgagtataaggtaggctgtatttagacacactagaatcattaaatgtaggtgaagttgtagagaaaaatggcctgggtcaatgtaggatctagaaaattaggagtgtacatttgctggcttctttttgagttttgtactgtttattacaggaacatatttgtgtggctaatctctagggtgacagtgagtactaccctgctccttctgcattctagttatccaacacacccagcagattgtgttcagggacagaatgtgtttttagaaatcccttattattgaaatgaataataatatagctataaatatgaatgtctggaggtatccagatgtgccttaacaaatgtaaatggttttcattcagaagtttacatttttattacattataaaatctcatcattgggaactttctaaaccatgaatatcagttcttttaatgaaatttaggtggtgctttatcattttggagaagttgctgtttgggacaatagcatcagtttatcaagaagtgtactcaccatgatattcaacaatgtgttacatttgacaaaacgtgtttagagtaagaaagactaactatactgtctgttatatttatttatgctttttgtagtttagctacatactataattttcattttaaacgttccttagttactacaaataatatttatgttttgcttcttcttagatgtaggcggatgcagaaatagaattatgttagagaaattattaaaagtttaattccagtaggcagttggagaaatctgaaactaatttgaaaaacttttatgctgtagtctcattagaatcattttaaaagcactgttcttgcatttttcctagactacagagagtgttctttgtcattttttttcctattctgttgtgaagtttattgtttcagttatttgagggaaataacctcttaatatgtttattttcctgaactaaagttttcatgtagagaatacaattaaatgttttgtgttatgacccaaactggctggaagtagagttcagagagggagaagggacaagaatcagtgtgggcatctcaggaaagtggcgccagtgctgggctccagccttctccactggcatgatgggtcctcagattctcctctggataatgagggtgttgggcactgtgagctctgacttctggggaggataggccatcatggactccatacacaattttgatgggtatcagttctcataaaatacctgctacaatttatttattttgtagttgtttagaaaactgtgagcagttgggcattagtaaattgtagttatatcttaacgatcttgggaatcattgaaatatgagtttttttccctcactcctatttatttaattaaaaaattagggaagttgttcattcacagctgtatattaatataaaatctctttataaaatgattcagagaaaaggcagtagtggtcacttactgtgctaaaatacctttttctctaaaaatatttaagctttagggtttgtcatagttttactttttaaattatactttgtgtaacaatttacgttaactagaaaaattagatatataataagttttggtactaagaaacatttacattctacactcattagtcaaatgaacttttctttcccagtgctaacagattttgtttcatgtgaagaaaaataaaatacaaatgaaataaaagtctagaaacagcaacaggaaactcaccacagaaataaagacataacccttgataagtttgtgtaagtgccagaattattggaagcaggtgacgaatgattaagaaaagctttattgtggggacatgctttaagaatcagctctgtatttgtgccaaggagatcaggtattggtgtgcaaacagatcccattaatactctgatttgaaccatgaattccacctactctgcgttgaagccctccagtagactgatagatgtaatcaaatgatcagctaccaagtttaattcctttgcctgtgtgtagcaacagttggtagttttacaagttaagttgatggtctggctgcagataagagaaagactcagtgataggtggtttgtgagtgaagtaacttccacactgtcaagagttgacagcatattaattgtgtggcattataattgtgagaaacaaatgagagcaaaatgttaggtcctttgacaagcattttcctcctgtttttaaaaagggctttaagttgtttcctatgtaaggtaatctttcttttttagtattatctaagaaggatggtagattatgtcattttggaaactattgtgtcccttgtattttaaatatttcaggaaaatgcctacgattgttacaaagatgtgtgttttacttataacataagctctgattctccagtggccactgggccttctctgtgctctgtattcaactgcagtatgaattacagaatgctgtgcatgttcgttagtaccaataccatgtgtatgtggtagaagttgtaaccagtttctggatctgtatggtactataaaatacttattttataattctgtaaccgtatggcagtgttatgccaaaaatgtataaagagcaatagtttttgttgcttactgctgtattttaaaatattgtttctaaaataatagagttagagttccttttgagtaattatttttaagaactattgccaaatatacatcctgtaaaactaataaaagccactccatcttagataacattttagcattgtgctagagtacattatggtgattttgcacgattaaaatatttttaaagaactagaaaaaatgacttgctgttttcctgtcattaagcatgtattttttatgattaacacataagactaacattattttcttttatcctcaaaaataaatattgtgaagggtgaatcat

SEQ ID NO: 4849 - protein, 171 aa, Homo sapien
  unsure 43: unknown amino acid
  unsure 44: unknown amino acid
  unsure 45: unknown amino acid
  unsure 46: unknown amino acid
  unsure 47: unknown amino acid
  unsure 48: unknown amino acid
  unsure 49: unknown amino acid
  unsure 50: unknown amino acid
  unsure 51: unknown amino acid
  unsure 52: unknown amino acid
  unsure 53: unknown amino acid
  unsure 54: unknown amino acid
  unsure 55: unknown amino acid
  unsure 56: unknown amino acid
  unsure 57: unknown amino acid
  unsure 58: unknown amino acid
  unsure 59: unknown amino acid
  unsure 60: unknown amino acid
  unsure 61: unknown amino acid
  unsure 62: unknown amino acid
  unsure 63: unknown amino acid
  unsure 64: unknown amino acid
  unsure 65: unknown amino acid
  unsure 66: unknown amino acid
  unsure 67: unknown amino acid
  unsure 68: unknown amino acid
  unsure 69: unknown amino acid
  unsure 70: unknown amino acid
  unsure 71: unknown amino acid
  unsure 72: unknown amino acid
  unsure 73: unknown amino acid
  unsure 74: unknown amino acid
  unsure 75: unknown amino acid
  unsure 76: unknown amino acid
  unsure 77: unknown amino acid
  unsure 78: unknown amino acid
  unsure 79: unknown amino acid
  unsure 80: unknown amino acid
  unsure 81: unknown amino acid
  unsure 82: unknown amino acid
  unsure 83: unknown amino acid
  unsure 84: unknown amino acid
  unsure 85: unknown amino acid
  unsure 86: unknown amino acid
  unsure 87: unknown amino acid
  unsure 88: unknown amino acid
  unsure 89: unknown amino acid
  unsure 90: unknown amino acid
  unsure 91: unknown amino acid
  unsure 92: unknown amino acid
  unsure 93: unknown amino acid
  unsure 94: unknown amino acid
  unsure 95: unknown amino acid
  unsure 96: unknown amino acid
  unsure 97: unknown amino acid
  unsure 98: unknown amino acid
  unsure 99: unknown amino acid
  unsure 100: unknown amino acid
  unsure 101: unknown amino acid
  unsure 102: unknown amino acid
  unsure 103: unknown amino acid
  unsure 104: unknown amino acid
  unsure 105: unknown amino acid
  unsure 106: unknown amino acid
  unsure 107: unknown amino acid
  unsure 108: unknown amino acid
  unsure 109: unknown amino acid
  unsure 110: unknown amino acid
  unsure 111: unknown amino acid
  unsure 112: unknown amino acid
  unsure 113: unknown amino acid
  unsure 114: unknown amino acid
  unsure 115: unknown amino acid
  unsure 116: unknown amino acid
  unsure 117: unknown amino acid
  unsure 118: unknown amino acid
  unsure 119: unknown amino acid
  unsure 120: unknown amino acid
  unsure 121: unknown amino acid
  unsure 122: unknown amino acid
  unsure 123: unknown amino acid
  unsure 124: unknown amino acid
  unsure 125: unknown amino acid
  unsure 126: unknown amino acid
  unsure 127: unknown amino acid
  unsure 128: unknown amino acid
  unsure 129: unknown amino acid
  unsure 130: unknown amino acid
  unsure 131: unknown amino acid
  unsure 132: unknown amino acid
  unsure 133: unknown amino acid
  unsure 134: unknown amino acid
  unsure 135: unknown amino acid
  unsure 136: unknown amino acid
  unsure 137: unknown amino acid
  unsure 138: unknown amino acid
  unsure 139: unknown amino acid
  unsure 140: unknown amino acid
  unsure 141: unknown amino acid
  unsure 142: unknown amino acid
  unsure 143: unknown amino acid
  unsure 144: unknown amino acid
MSLWSSGLPSLSISPAVLTSLPLSMLTLKPPSFSASVCVSSVXXXXXXXXXXXXXXXXXXXXXXXXXXXXXXXXXXXXXXXXXXXXXXXXXXXXXXXXXXXXXXXXXXXXXXXXXXXXXXXXXXXXXXXXXXXXXXXXXXXXXXHIRMIYIEIYMEQSGTSNCMTSRFCFV

SEQ ID NO: 4850 - DNA, 1825 bp, Homo sapien
  Unsure 942-965: Unknown base
  Unsure 1038-1065: Unknown base
ggcacccggaagttcaagaagaaagcatatcaggcaattgaggaaaggcagagtttggttccaggcactgcagcaactggagacaccacttaccaagagcaggggcagagtccagcttaaatctctccccgaaaatggtttctctcatctccagtgtggtcattgctgaccactctgttttcctaagcattgaaatggcaagtgcaaccaaaagtaggtatattcgtgacttcttgtttaggtctctgggccaggaaattcatactgttacatggataaggttgggattggggagagggaacagttgggactagaagcaaaagtgattctgggactaaaataggaagcagatgtcctttcccaatgtgtgttgctgtcttcacctgaatgcatttgtgtaaaaatagcggagggacaatgtgaacatttgtatttggaagctatgaatttactctgaagtttgcagttgtttccaatttgtgagctctaagagtttctgcctgtaagaactactctccttttattttgatttttaaaaaactgtctgaatttcacactcttagagcctggaagagccctgaaaagacacaagtcttgcctggctactgctttttaactttgagggctctatgttgacagactgttatctcctctgggtgacctcaaacatctgaaaagaaagatgttgcctgtgccaattccactttttccagctgccccttgatgaacactcccttataccagaccactcttggacttctgactggtgtcatcaagtcctcagaaaatattttaagttattttaagttattaaggaagggatgatttggagacaaggagtaatgaaagatgggtaaaaactggaaaagattctggtgctaagtactaccccttcatcttccatggatggtcattacctttcctgtcctcctgttctatgannnnnnnnnnnnnnnnnnnnnnnncacatttcaataagtcttcattgttctgggtccttacctttcctgtcctcctgttatatgaacacacacacannnnnnnnnnnnnnnnnnnnnnnnnnnncacatttcaatgtctgcatggttctgggggtaacaaaggcaagaagttaaagtaagaccacatttgagtattacttactctgtagaatcaaaacagagtagttaacaccaattatgcaaactacttttttttccagcagaaagggagctgacatgatcaaatccatgttttcaaatgaactgaaaaaggcatccagcaccacttataacacatttatttcagttccaggctgacagccctggggcatctagcaggatgcataattgtcatctggtgagagttgggactttgctcaattttaataccaatctctcctgattgtaattacctccactactttcatgatccccctacaatatttttttaaatgatatatttattcactgaatcaaatgtcattaatgagttatcttctgtggaggatgactgttctctttgttaatgttcacaatcaagatcttgggctgagaagaggcccttcacccaaggagtttgaagtatcacagcgtgtgggaaggtgggaaccaggatacccattcatttccaaccgagacacagagaagtgagtcacagaatttgagcccgctctcttgactgcccagccagagacactgatttctgtaacctcttcacttgatcctgcctcttaagcattaaaacattctcctaaacctctgagtgttttgtgggttctgggtgttttgtacattttagccaagctaaccacttgtctgcaagtactgactttcctatgaattct

SEQ ID NO: 4851 - protein, 55 aa, Homo sapien
APGSSRRKHIRQLRKGRVWFQALQQLETPLTKSRGRVQLKSLPENGFSHLQCGHC

SEQ ID NO: 4852 - DNA, 8189 bp, Homo sapien
  Unsure 3867-3893: Unknown base
gcgagggctgggtccttgcctcgccgtcagccccagctcgcggccgccggggctcgggccgcgcgcccgccgagtggcttttgcaaggcgggggcctgtttgcagagagccgggcatttgcatgaagcgactcgaccccacagagcagccggcagcagcagcggaccccggcggacggcaggcgggagcgcggtcccagccaggcggccccggtgtcccggccccggtggatgcacggctggggaggagcccatgggccggagctgaggctgcccggggcggcggggcgcggggcagggggcgcggtcgaggcccggaggcggcggcgcaggaggaagcggaggaggtcgggcgctcggggcccgggaggcgggccgcgcagcgccgcagccccgggctcgccatgctcctggcctcggccgtggtggtctgggaatggctgaacgagcacggccgctggcgtccctacagcccagcggtgagccaccacatcgaggcggtggtccgcgccggcccccgcgcggggggcagcgtggtgctgggccaggtggacagccgtctcgcgccctacatcatcgacctgcagtccatgaaccagttccgccaagacacgggaactctccgcccagttcgccgcaactactacgacccctcctcggcccctgggaagggcgtggtgtgggagtgggagaacgacaatggctcctggacgccctacgacatggaagtgggcatcaccatccagcatgcctatgagaagcagcacccctggatcgacctcacttccattggctttagctacgtaattgacttcaacaccatgggccagatcaaccgtcagacccagcgccaacgccgcgtccgccggcgcctcgacctcatctaccccatggtcacagggaccttgcctaaggctcagtcctggccagtcagccctgggccagccacctcgccccccatgtccccctgctcctgtccccagtgtgtcttggtgatgagtgttaaggcagccgtggtcaatggcagcactgggcccctacagctgccagtgacccgcaagaacatgccgcctcctggagtggtcaagctacccccactgccaggctctggggccaagccactggacagcacaggcaccattcgaggcccactgaagaccgccccatcgcaggtgatccggagacaagcctccagcatgcccactgggacaaccatgggctctcctgccagtcccccaggacccaacagcaagaccggaagggtggccctggccaccttgaatcgtaccaacctgcagcgactggccattgcccagtcccgggtgctgatcgcctctggggtccccacagtcccagtgaagaacctaaatgggtccagtcctgtcaaccctgccttggcaggaatcactgggatcctcatgagtgcagcggggctgcctgtgtgtctcaccaggccaccaaagctggtcctacacccaccccccgtcagcaagagtgaaataaaatccatcccaggggtttccaacacaagccgcaagaccaccaaaaaacaagccaagaaaggtaaaaccccagaggaagtgctaaaaaaatatctacagaaagtccggcacccaccagatgaggactgcaccatctgtatggaacgcctcacggccccctcaggctacaagggcccgcagcctacggtaaaacctgacctggtagggaagctgtccagatgcggccacgtctaccacatctactgcttggttgccatgtacaacaatgggaacaaggatggaagtttgcagtgtccaacctgcaagaccatttatggggtgaagacaggcacccaacctccagggaagatggagtaccacctcatcccccactccttgcctggccacccagactgcaaaaccatccggatcatctacagcatcccccccggcattcagggaccggaacacccgaatcctgggaagagtttcagcgcccgaggcttcccacgacactgttaccttccggacagcgagaaagggagaaaagttctgaagctgctgctcgtggcctgggatcgccgcctcatttttgccattggcacctccagcaccacaggcgagtcagacaccgtcatctggaatgaggtccaccacaagacagagtttggctctaatctcactggccatggctacccagatgccaattacctggataatgtgctggctgaactggctgcccagggcatctctgaggacagcactgcccaggagaaggactgaggccagaaaagctttgaggtgggaggggccatggagactgcaggacaggaagtgaggagagtgagtcaatgtagaagaagttggtgtcctgccctcccaactttctatcctcccctcctgccctgtgtccatccctcatccctcccaaccacagtgggagccagactgaatatagcgacatcattcataaatctcatccaacacaaagggagatgggatgagggccatcctgggtctgttcccatggagtttttggtgctgggtaggcaggaatcccctccctaccccacctcccaagtaggggcatggtcagcacacctagggtatgggcagtgcttaggcactccatatcctggctttgggaagccggggtttcttgcctcagccggcttcttgctacttccactctgctttgagactggagtttctgctattctccctctgctggaggcagggagctctcactgtgcaaggttggggggtgggcaaaggggtgaatcactaaactgctgtgacatcagaaactgatgccttggtgtagagcaaggaagcacttcttcccaagagggtcggagaaggaaaagcctctgggagcacattctgctgtcatcacagtccttggcttctctgggccctcctctcctcctacacagctctcacctgtccaaagaggcatctaggttctctcatgtggatggatggactctggggttcctctttggagtggcatcccatgatgctgtttctagaccctctctgatcaaaccagagcctgcatcccactgagcatctgaactgtcctcagggagaggagcccacagccttcttcccaactcattctagaccagctcaaagattccatgagtttcatcgagtcactgtgagtggagcccatgctgggctctgtgccctctgtgtctgtgcatgcgcgtggtgtgtgtgggcgtgtgtgcattgctgggccagcttgaagggaaggcccgtcatgtccctgcactctgttttgcaagatgccaaaccccagttctgatggggctccaacagccaggctgtggtcctttgacgttcctcacctgttgccaacctatcccgtagtgaactgaaaccccaatgaagacagaactgtgcctggggagatgcaatgaggtgagggctgaactcatccttttatatttcttttcaagattggatcagagctcatctccatccagtcttgtttctatgaaggcttcaatctgtttccatgcaaatttgctaatcagagcccagagctgctgggtccctcatctccctcatctattatagattgacttacagcagggagagaatctctttagctcattcctaatggggttgggatcacaatatggtctggtccaatctgcatcttgttgtgtcccaagaccctatctcctccccaacattcttattgcctttggctcccagtaaggaacgaattgggggccagggaggagaacagcggggatcaagaagggaaacccaattccccctttgaaagtgggttctttgaactatgtgtttgggggaagttcctctggatactaatttgaatttatatacctcatgttttgggggtttgacgnnnnnnnnnnnnnnnnnnnnnnnnnnnttcataatatttggaaggtttttgatgctagaaaaatggaaacaagagaaccttcaaaaatggtacttagatgggaactggaggccaatctttcataaagccagccccatagctgcttgctgttaggcctccagccattttgacattggggtggatagtcgattcacctgcctgtcagtcgattcacctgcctgtcacccagttctgtggatgtgctggtgctgagcctttgctctctttccaaatggttacagggatgttgatcagctccaccagagggagctctgatgggaggaattgctctgccatccttgtccctgtgtctcctgtcggcaggcagccattgtatctcaccagcagaccaggagactggtcccaaggttactgcaccacagggcaatttcctgccatagttaggaaggaaacacctgaactaaatggaagagacatccctgcggtgtttaatatcacacccatgccctttgtcaggttaccatgtacagagattacttggagagcctcatgccgtctctaccttcgcacactggtcaagtatctgctgagcttcttggccgcaaggatgcagaaataggctgagggtccatgggaagaaagacacaatgaggcagtaggaggtggggaagaaaagaagacagactttcaaaatggaattaggcactggggagagatcagtttccccacatcagggagaagaaggtataggtggggaagggggtggccaggagcagaaggaagaagactcaagatggaaagggagccgctgtgcctgtggcaataccacttggagaggtcgacttcataccttcaagccttttcccctgggcttttgattgtgtctgtgccccctttcttgtcctctctgcagatgcccagtaggggctacctcatcctcgtgctgttcttgtgtggctttctgggcagtagggatcttgaatttcctttctaacactgtgcccggcaaggcggggagcattcctctgccctttgtcttgtgccaacctggaaaggtgcagtctagatttcagtgagaaccctgccagctgagccctgtgcatctactaccttgacacagagtgttttcccactagaagctctgctctgctctcctggcccaagtaggggattccatgccttccctttcatggtcttagcaccagcagcctagtttctcccttccagagtctccagggatgacaaattggattggagacaaacctcgtcagatgctcatcccctaaaaggttaattgtgtatttgtggctgcgtgtgcctttgtgttttcattctcttcccatttttgtacattttggtcttctctgtggttttatacttggtcaaaagtactcgtcttggtattgcactgttgtgtgcatgagaaaactgggggaaggctcactggtacaagaaaggacccctgacccctttccttctctgtggtccccggcattagattgggggttctgggagaggcaggtgaatgtcctaagtgaattgttctgtttgtaactggaatgtttttgaagtctttggtgttgctccgtgaaaggacatcgccacctggtgctcatgaggtgtctttgcagaacaataaatggcaaatgaacaaccacaaaattgttactcttgttggccttctgctgtttgtagattagtgcacctatctgtgagggatttgggttacctccctgagtctgtaagcaaccacaagccctgccactgggtgggggaagtccctccccaaccacttaaaaacaaattttccacatattacccacccacacatttgacctggctagactctttgtttgcctaaaggaacagaccacattgctgggaaaatgagtaagtgaacgtgtgggagaaaaacacttttagaatcacgaatattcacttttaaaggtctctttgcctggctgcaatatagtgtgtgtttaaattatttacaggctgttgtttctcaaataaatgtttaatattaatcattcccaaactgacaagaacacaaaaataaaatgcaaatacagagccagctttgtcacccaaatctgtgtctatttctgatagtccatggaatgtggttttcttggaagccagggttggtctccccacagaccccaggctaaggtcaccagttaggaacccaggacttggaaggcagagcctgtgagctcttccatcagggatctgactccgcaaaacgacttgatgaatgcaattggcaaactcccatgttcggacttcatatgcatgagccgttggacagagggtttcttagtatatactttaatgcatgtttatgtgcaatcttgttagtgggtatacaagtttgtgaagaacttctcatttcaataggcagttaatgtaatgcattaaaagcctgggaatttggggctatatttttcctttctgactcaataatcttcaaagaattcataggaaagtcagtacttgcagacaagtggttagcttggctaaaatgtacaaaacacccagaacccacaaaacactcagaggtttaggagaatgttttaatgcttaagaggcaggatcaagtgaagaggttacagaaatcagtgtctctggctgggcagtcaagagagcgggctcaaattctgtgactcacttctctgtgtctcggttggaaatgaatgggtatcctggttcccaccttcccacacgctgtgatacttcaaactccttgggtgaagggcctcttctcagcccaagatcttgaggttttcaaagagtctcagtggaaagtagccggctgggcatgactgtgcatttgtcatggggtttatgctcttgctgctgaagaggcccccaaaaagcagtcctgagttttcaggtacttggctgctggccacacaccaaaaagccctaaattcagcttttgccacctggaacacatcttcacacacggtcttgcagaagacgaggagagtgcactttcgatgacactccaggtggttgtaaccctcctcgtggatctgggataacaggtgcaccggggagtagccagaggggcaggagaaatcaccagtgagtggattcttctgctccaacttttggcagaggaggacatccctattccctgagagctgagtgcattcctgataaaccccaccgaaagagaagttggtcattttcccctcgcaggagccatcatccgtgttggcctgaaaattgaagttgggagaattgagatctgtgcagccagggtaggtgttgaatgtataatagcgcttcacagcagtttccactgtctttgacaccttcttcaccagggggcctggcaagtcaggtagcatgttggggttgatgaagaaatgcagcggcaggccagagcggtcgatggccaccaggtggttggtgataccctgctgccaggcctggagggtgatgcctgggtaaaaaggaacccctccaatgctctgcaccctggagttggttcggtttgagaggtagctcttggtgaggacattctgcgaggtatagttttcctcaaatttgaagttcacggtgttttgaaaggcaagtccagcagaggcggtcacggcactacgactgctctggctgtcttggaggaaggaggccctgaggtggtcctcctgaataagagcagccccagcgtcgacactggtggtgacgtgggtgccatagttgagcaccaggagttctgccaggtaggtggccatcctcgtctggttgttctctagacggtcagagatgtcaaggagttccttcctaaaacctgagcttagctctaaagttgggttgattttgactgtgtagacgaggtttcttacctgaactcgggtagttatagcttggtccttcacttggagggtcttcatcctctggaactcagtggaaaacttgccattgactttggaaaaaagagagagttctgtgttgatggagtaggaggtgctactctggtaatttgcccaggattccaggatttctgagttcatctccaggttgctctgtttctggggaatggtgaagatttcatcagggatgatatactgtccatcctctgttgtcctgcagttggagtaagtcaattccataactcgtcccatgtccacattccgcagattgtcccagccccctccaggtaggacttccaggacaggtagtttcaaggcattcttgcatttttgaactccaacttcgtccatctctcccgaaggcttgcctgatttagcccatgctgccgctgcccagaagaggatggtggccctgaagttgttcatggctcagacagcc

SEQ ID NO: 4853 - protein, 753 aa, Homo sapien
RGLGPCLAVSPSSRPPGLGPRARRVAFARRGPVCREPGICMKRLDPTEQPAAAADPGGRQAGARSQPGGPGVPAPVDARLGRSPWAGAEAARGGGARGRGRGRGPEAAAQEEAEEVGRSGPGRRAAQRRSPGLAMLLASAVVVWEWLNEHGRWRPYSPAVSHHIEAVVRAGPRAGGSVVLGQVDSRLAPYIIDLQSMNQFRQDTGTLRPVRRNYYDPSSAPGKGVVWEWENDNGSWTPYDMEVGITIQHAYEKQHPWIDLTSIGFSYVIDFNTMGQINRQTQRQRRVRRRLDLIYPMVTGTLPKAQSWPVSPGPATSPPMSPCSCPQCVLVMSVKAAVVNGSTGPLQLPVTRKNMPPPGVVKLPPLPGSGAKPLDSTGTIRGPLKTAPSQVIRRQASSMPTGTTMGSPASPPGPNSKTGRVALATLNRTNLQRLAIAQSRVLIASGVPTVPVKNLNGSSPVNPALAGITGILMSAAGLPVCLTRPPKLVLHPPPVSKSEIKSIPGVSNTSRKTTKKQAKKGKTPEEVLKKYLQKVRHPPDEDCTICMERLTAPSGYKGPQPTVKPDLVGKLSRCGHVYHIYCLVAMYNNGNKDGSLQCPTCKTIYGVKTGTQPPGKMEYHLIPHSLPGHPDCKTIRIIYSIPPGIQGPEHPNPGKSFSARGFPRHCYLPDSEKGRKVLKLLLVAWDRRLIFAIGTSSTTGESDTVIWNEVHHKTEFGSNLTGHGYPDANYLDNVLAELAAQGISEDSTAQEKD

SEQ ID NO: 4854 - DNA, 3591 bp, Homo sapien
ggcacgaggagaatgtgaagaccaactatgttgtttgggggactggaaaggaaggccaacccagagagtactacacattggattccattttatttctacttaataacgtgcacctttctcatcctgtttatgtccgacgtgcagctactgaaaatattcctgtggttagaagacctgatcgaaaagatctacttggatatctcaatggtgaagcgtcaacatcggcaagtatagacagaagcgctcccttagaaataggtcttcagcgatctactcaagtcaaacgagctgcagatgaagttttagcagaagcaaagaaaccacgaattgaggatgaagagtgtgtgcgccttgataaagagagattggctgcccgtttggagggtcacaaagaagggattgtacagactgaacagattaggtctttgtctgaagctatgtcagtggaaaaaattgctgcaatcaaagccaaaattatggctaagaaaagatctactatcaagactgatctagatgatgacataactgcccttaaacagaggagttttgtggatgctgaggtagatgtgacccgagatattgtcagcagagagagagtatggaggacacgaacaactatcttacaaagcacaggaaagaatttttccaagaacatttttgcaattcttcaatctgtaaaagccagagaagaagggcgtgcacctgaacagcgacctgccccaaatgcagcacctgtggatcccactttgcgcaccaaacagcctatcccagctgcctataacagatacgatcaggaaagattcaaaggaaaagaagaaacggaaggcttcaaaattgacactatgggaacctaccatggtatgacactgaaatctgtaacggagggtgcatctgcccggaagactcagactcctgcagcccagccagtaccaagaccagtttctcaagcaagacctcccccaaatcagaagaaaggatctcgaacacccattatcataattcctgcagctaccacctctttaataaccatgcttaatgcaaaagaccttctacaggacctgaaatttgtcccatcagatgaaaagaagaaacaaggttgtcaacgagaaaatgaaactctaatacaaagaagaaaagaccagatgcaaccagggggcactgcaattagtgttacagtaccttatagagtagtagaccagccccttaaacttatgcctcaagactgggaccgcgttgtagccgtttttgtgcagggtcctgcatggcagttcaaaggttggccatggcttttgcctgatggatcaccagttgatatatttgctaaaattaaagccttccatctgaagtatgatgaagttcgtctggatccaaatgttcagaaatgggatgtaacagtattagaactcagctatcacaaacgtcatttggatagaccagtgttcttacggttttgggaaacattggacaggtacatggtaaagcataaatcgcacttgagattctgaattatttggctcctccatttctggaaattgagactcaagctttatgaatttatcaagaacttaaaaatgaagaaggtcacagattgatcttttataagaccttatttgatgctttgtgcttcaaggagatgatacctgtcatccatataagcaaactttttggcttacaactatttttttaatattagccttctagtctgtaatggaaattgtatattttgatagaagttttttctccattggttaaattagcattacttaaaatttgtttctttagaaaataaatgcaggttataaatgtgtgtatatttagagattataaggctctctgagccatcttctgatttttcattgctctataattctttttactgaaaatactatgttatgaatggtattaaattttagtctctggaacatccaaaaccaagcaaagggatgtgactattttgaatgaatcagaatgtcaacttgtatgtacactatatctacacttactcattatttaaaaagaataatgaaaaatttagatcaattcttcaatttgattgaactgttcagccttttcaagatttctttatttacaaatgattacatttaaatgaatgtacatttttctcactgactttggtgattttgaaacctagaatgatgtgtttctatctgtaatatctttccatttgaaaaaaatctcaaaacccagattaaaaccaaaaaaaaaaaaaaaaactcgagactagttctctccctcgtgccgaattcggcacgaggcctcgtgccgtctctctgggtttcttgttcactaaggagtaacacagaggtcaggcagagaatgggggtctcgcaggctagggacctcagggagaggcctctgttgcccttttcagcaaggctggaaatgggatatgggcaggggacgtcttctctgacttcaccctagaccttctggctccaaatggggcccatggccttgagcacctgggaccagctctttccaccacagggcattgggcactgggcactttcttatcgagatagtcactcccacgtctggttcgtgatgggcttggccctccagctcagcacaactgcaagaatggattttgtattctctagacggacactgtccaagatggtagccattggccacatgcgacacatttttaatgaattaaaattaatcaagactggaaatgtcggccaggcctggtggctcatgcctgtaatcccagcactttgggaggccatagagggcggatgacttgaggtcaggagtttaagaccagcctggccaacatggtgaaacccatttctactaaaaacacaaaaattagctgggcatggtggtgtgttcctgtaatcccagctgcttgggaggctgaggcaggagaatcgcttgaacccaggaggcagagattggagtgagctgagatcatgccactgccctccagtggccaccacatccggcaaggcagatgggaccatttccttcatccagaacgttctgtggacatcactgctctaggttcctcccttatggagtctcacaagactgtctagccagcaagatctcttttccaaccaggccaggagcacctctccacccactgctgctggtctgaccgccttcctggaagtccctcttgaggcaggccctggagttagaagctgggcagaggcacccacagccttatcctttgccaatctctgactcaatgccacggccactgtagtgagctgaaccacctccagcagtcccctggcagaagcacctggaaaacatgcaatgggaaccttcaccctgaggccaggcccttcccatgctacccaacagtagacaggacaccctgtgttgttggctgcaccggggtgctgggatctgtggatccctggggcctggaagccactctcagcacatacagccactgtgttccgaggtccagtcagctggccgggaaggaattcaacacagccaaggacagaggtccatatgatgacgggtggatgctcgtgtgactttgctgaccttttatgttttctatgggcaataaaggccaagagagctcccaaaaaaaaaaaaaaaaaa

SEQ ID NO: 4855 - protein, 355 aa, Homo sapien
MSVEKIAAIKAKIMAKKRSTIKTDLDDDITALKQRSFVDAEVDVTRDIVSRERVWRTRTTILQSTGKNFSKNIFAILQSVKAREEGRAPEQRPAPNAAPVDPTLRTKQPIPAAYNRYDQERFKGKEETEGFKIDTMGTYHGMTLKSVTEGASARKTQTPAAQPVPRPVSQARPPPNQKKGSRTPIIIIPAATTSLITMLNAKDLLQDLKFVPSDEKKKQGCQRENETLIQRRKDQMQPGGTAISVTVPYRVVDQPLKLMPQDWDRVVAVFVQGPAWQFKGWPWLLPDGSPVDIFAKIKAFHLKYDEVRLDPNVQKWDVTVLELSYHKRHLDRPVFLRFWETLDRYMVKHKSHLRF

SEQ ID NO: 4856 - DNA, 5908 bp, Homo sapien
ccagggagaggactgcggccaagagtgcccggtggggacgttttggcgtgaactgctcgagctcactgctcctgtgggggggccacctgccacggggtcacggggcagtgccggtgtccgccggggaggactggggaagactgtgaggcaggtgagtgtcagccgcagccccagttccgcctccccaggctgcacggctccaagctggtggggccctgaactgtgggggccccagccctgcggatcccaggcccgtctatagcaggtgtgagagctcacagtgcactcccctggggtagggagggggggtctgtggctgccccaccaagttcctggggcctccaggctgccctctcgggctgctccctctctgcatgaggctccatctctaacgggctcggctccttgtgttgccagctgaacggtgccgggggctgggggtcctctactgtgggtgcgcaccccgcagcctgcagccccaggaggtgcccgggtcctctcccctccccggggcaggctgagatggtaacagtggttccacctcctcggctgtggctccaggggcatcgtgccatgttatgttgatgtgttgagcaagggcagcttgggcactgactggccatgggggtgggcactagattgtcccgagggccgctgggggctgggctgccaggagatctgcccagcatgccagcacgctgcccgctgcgaccctgagaccggagcctgcctgtgcctccctggcttcgtcggcagccgctgccaggacgtgtgcccagcaggctggtatggtcccagctgccagacaaggtgctcttgtgccaatgatgggcactgccacccagccaccggacactgcagctgtgcccccgggtggaccggctttagctgccagagagcctgtgatactgggcactggggacctgactgcagccacccctgcaactgcagcgctggccacgggagctgtgatgccatcagcggcctgtgtctgtgtgaggctggctacgtgggcccgcggtgcgagcagcagtgtccccagggccactttgggcccggctgtgagcagcggtgccagtgtcagcatggagcagcctgtgaccacgtcagcggggcctgcacctgcccggccggctggaggggcaccttctgcgagcatgcctgcccggccggcttctttggattggactgtcgcagtgcctgcaactgcaccgccggagctgcctgtgatgccgtgaatggctcctgcctctgccccgctggccgccggggcccccgctgtgccgagacctgcccagcccacacctacgggcacaattgcagccaggcctgtgcctgctttaacggggcctcctgtgaccctgtccacgggcagtgccactgtgcccctggctggatggggccctcctgcctgcagggtaagccacatctaggagtccagggaccggggtccaggcctgagcgagggtgctggcctcttgcagggcccacaggacacttggtgcctgggggagggaggaaggggctgttaggactgaggaccgtgcctttcacctgtgcccctctccaggcagggatggggagtgaggctgggctggcaggtcatcctaggggcagccccctgcaaggtgcctgaccccaaagtccaacatggggctggaaagccagacagaccctgtggggccagctggctgggggatgcaggttgctccctcttccctggccccagcctgccctgccggcctgtacggcgacaactgtcggcattcctgcctctgccagaacggagggacctgtgaccctgtctcaggccactgtgcgtgcccagagggctgggccggcctggcctgtgagaaggagtgcctcccccgggacgtcagagctggctgccggcacagcggcggttgcctcaacgggggcctgtgtgacccgcacacgggccgctgcctctgcccagccggctggactggggacaagtgtcagagcccacctgcccccggcctgtcctggcccacagatccccacgggcccctcctagaagcctccgcagccctcatctttctgcagcctgcctgcggggctggtttggagaggcctgtgcccagcgctgcagctgcccgcctggcgctgcctgccaccacgtcactggggcctgccgctgtccccctggcttcactggctccggctgcgagcaggcctgcccacccggcagctttggggaggactgtgcgcagatgtgccagtgtcccggtgagaacccggcctgccaccctgccaccgggacctgctcatgtgctgctggctaccacggccccagctgccagcaacgatgtccgcccgggcggtatgggccaggctgtgaacagctgtgtgggtgtctcaacgggggctgctgtgatgcggccacgggggcctgccgctgccccactgggttcctcgggacggactgcaacctcacctgtccgcagggccgcttcggccccaactgcacccacgtgtgtgggtgtgggcagggggcggcctgcgaccctgtgaccggcacctgcctctgccccccggggagagccggcgtccgctgtgagcgaggctgcccccagaaccggtttggcgtgggctgcgagcacacctgctcctgcagaaatgggggcctgtgccacgccagcaagcggcagctgctcctgtggcctgggctggacggggcggcactgcgagctggcctgtccccctgggcgctacggagccgcctgccatctggagtgctcctgccacaacaacagcacgtgtgagcctgccacgggcacctgccgctgcggccccggcttctatggccaggcctgcgagcacccctgtccccctggcttccacggggctggctgccaggggttgtgctggtgtcaacatggagccccctgcgaccccatcagtggccgatgcctctgccctgccggcttccacggccacttctgtgagagggggtgtgagccaggttcatttggagagggctgccaccagcgctgtgactgtgacgggggggcaccctgtgaccctgtcaccggtctctgcctttgcccaccagggcgctcaggagccacctgtaacctggattgcagaaggggccagtttgggcccagctgcaccctgcactgtgactgcgggggtggggctgactgcgaccctgtcagtgggcagtgtcactgtgtggatggctacatggggcccacgtgccgggaaggtgggcccctccggctccccgagaacccgtccttagcccagggctcagcgggcacactgcccgcctccagcagacccacatcccggagcggtggaccagcgaggcactagtagaggcagtcccgtggagcccgcctctccagtcccagccagaggggaccctggcctttggtgaccactgagaaggacacttcacgggcccagagctcctggtactgcccttcctttgagggccgtggagggctgtggacagcccagcaacctgtcgctcttggaggctggtgtggccttgaggagggaagcctcgcatggccgctggaagagaggcgcctcctggcctggctctgcagaacccaggggcacgctctgggcctgggctgaggaagtcccgctctccccgcggctctgagttggactgaggacaggtgtgggcgccagtgtgggtgcaggcgcaggtgcaggcacagggccactgtcctccaggcaggctttttggtgctaggccctgggactggaagtcgcccagcccgtatttatgtaaaggtatttatgggccactgcacatgcccgctgcagccctgggatcagctggaagctgcctgtcatctcctgcccaatccccagaaaccctgattcaggtctgcaggctcctgcgggctcaccaggctgctggctccggtaccatgtaaacctaggaaggtaaaggagcaggcaacctcctcgtggcctgtgtgtttgctgtgttacgtggactctgtgtgggctcctccctggggcccggccagcataacggtgcacccagggacctcccagtgcacccggggccctttgcaggggtgggggtgccacacaagtgaagaagttgggactcatctcagttcccagtgctattgaggagaacgctggggctgcattcattaccgctgagacccagagactggctgttcccagagaatggcccagggggaggagggctggtgtggaggggcaacctggactgaggccgaactcccttgggctcaccccacccacccctacctgagcatcagcagtggggggagggcagcatcgcaggggcagggactccctgggtgaggacagaccagccctcccgagcacctggcactcatgggctgaggctgacttctcctggaagaagggcccagagtggaaggaagaggcagagggtagaggtggtggctgggggctcctctgcagagtggggtggccaatggagagggctgcactcacaccgcaacataggactctctctcccttaagaaggcccccttagggtctgggctgccgcccccatcaccctaaaaccagccaaggtagctgaggccccagggcagacaatttcaccagcaggaggaggaggagtccagtgagcttggttgctcacagacagcaagggagctgtcacagaggaagctgatgaatggaccgctgtggggagactttaaagtagaacagtgataagggagggcaggatggtggggatgcagaagcagcagccagagagagacggactggggtgcagacggagtgtggaaaacgcataccttgaaatgaagcatccagcagatggggtgagtggatacagctcaggagattctcccaggaatagcagggaggcgtaaagagagacaacgtacagagatagatgaatggaaatgggtaagggaggtgttcattcacatccatctaactgcaaaatacaaaagtaagaagtcattgacatgaagcaacgacgaccaagacgttctcagatctaaaggtgaatgatctcagtcagcctggaaatgcacaaggtggaaaaataacataaaaaagccataagaccttgaagaacatcaatgtcaaagataaattctaaagtcccagagaaaaaagaatgggaatcaaattgacctcagactatacgtgagaaacacggagagccagaaaactgtgatgttccatcctcagagtttgaaggaaatatttgaaggctgaattttacatccagctaaactatcaaaggcatgcaaagtccatgttattcttaggccttcaaggcctcggccatttttctacagaaaagcctgattttaaaatgctcttagagacgttctccagccagaagagaaagaagccaggagggtgctctgagatattcagtcaccacagttcccaaatggcctaggaattcagagagtcagaatatcaccattactccccaatgggaacccccgacagtctcagcatggtgtgagggtgtggacggggggcctggcaggtaccaatcactcatcccgctcagtgaagacacagtgttcagctacggaagccataaggcaggccgagcttctgcccatccggaggaaatctcagctatccaacggcggtcaggagcagaggaaaataaagcagaataactagaaaacacgctcacagatcctaatgttaacggttacaaatgacgacggaaaaacaaactcctgaccatatattatatagtttcaagcagcaagaaggaggatattgaacattctcaacacacataataaacgcttgagatgatgatatgctcattaccctgatttgatcactagacatcccatgtatcaaaacatcactgtgtatccgatgaatatctacaattattgtcaattaaaaacatcattaaaaacaa

SEQ ID NO: 4857 - protein, 294 aa, Homo sapien
MGLESQTDPVGPAGWGMQVAPSSLAPACPAGLYGDNCRHSCLCQNGGTCDPVSGHCACPEGWAGLACEKECLPRDVRAGCRHSGGCLNGGLCDPHTGRCLCPAGWTGDKCQSPPAPGLSWPTDPHGPLLEASAALIFLQPACGAGLERPVPSAAAARLALPATTSLGPAAVPLASLAPAASRPAHPAALGRTVRRCASVPVRTRPATLPPGPAHVLLATTAPAASNDVRPGGMGQAVNSCVGVSTGAAVMRPRGPAAAPLGSSGRTATSPVRRAASAPTAPTCVGVGRGRPATL

SEQ ID NO: 4858 - DNA, 578 bp, Homo sapien
agcttggtgcgctatggcgacacccagcctgcggggtcgtctggcgcggtttgggaacccgcggaagcctgtgctgaagcccaataaacctctcattctagctaaccgcgtcggggagcggcgccgggagaagggcgaggcgacttgcatcacggagatgtcggtgatgatggcttgctggaagcagaatgaattccgcgacgatgcgtgcagaaaagagatccagggcttcctcgattgtgccgcgagggctcaggaagcccgaaagatgagatcaatacaggaaaccctgggagagtctgggagtttacttccaaataaattgaataagttgttacagaggtttcctaacaaaccttacctcagctgaaaatggacaagtattttcaatgactgaaatatagcttctgacaactatgcagaggcattttagagacattggcattgccatgccctctttggagggtagaagaggcaaaacacttttttcaccctttggaatcatagtatgggtagaagttatgatttatcttgaaataaaatcctccaaaaaaaaaaaaaaaaaaaaaaaaaaaaaa

SEQ ID NO: 4859 - protein, 118 aa, Homo sapien
MATPSLRGRLARFGNPRKPVLKPNKPLILANRVGERRREKGEATCITEMSVMMACWKQNEFRDDACRKEIQGFLDCAARAQEARKMRSIQETLGESGSLLPNKLNKLLQRFPNKPYLS

SEQ ID NO: 4860 - DNA, 1556 bp, Homo sapien
ctcggggtaatgctcttctccaaactgtttttcggaagcagcggtgaacgggatcgtgcacgatgtggacgtgctgggcgcgggcatccggctggtgaccctgctggtggatcgggacgggctgtacaagatgaaccgcctgtacctcacccccgacggcttcttcttccgagtccacatgttagccctggactcctccagctgcaataagccgtgtccagagtttaaacctggtattgaaactgacctgaatgacgctgcatatgtactttataccaccgtttgtaacgtgggtgccacagcccgggctgtaggtcgcccagcctttttttgggagcgatggggaacaatgacatgaatgggatttagacgacaggcagcaggtatattgtgatgggccacatctaccataagagacggcagctccctacagctctgctccaggtcctgagaggccgcctccgtccagggatggactgctaaggagcagcagcagctatgtgaaaaggtttaatcgaaaaagggaagggcagattcaaggtgcagttcatacccaatgcatttgaaacaaccatcctggcatttctggaccgcaagagacttggacgtcggcaacaagacatgaaaggtctaccttcatgtaatgggtcctccttcagaagagagccctcagctactctgtgaatgacttgcatagctgcaactgtaatctcgaaggtgtcactttgttatttacaagatgcttcttaaatgggctgctcctgagcctcagtgtcaaggtgattcaactgttgtgccagacagtgatttacacagctcagataactgacctgtctagttaacagatcactgcttcatgttttcaaatattttaatttaatacattctttagtagaaatagtccacaaaaacattttcttgaatttaaatatacaacttttatatcatgtatcaaaccagattttatattcaaacgatcacattttaaattctgtacataacagtaagcgcactagtcaaaagacatttatgtttgaaatgtcatttagatcaaacacaagggtcaaagcccaggacaagtattaaagttttatacttaaagagtactaaagggccagtgtgcagatgggtggattaaaaaaataaataaaataaaaaatagtactaaagggcttacttcaggcaaaagtgttcctgacgtaccaaaaagtaagatatagtttattttcatgcctccctgctcctagtaatgtatgttttgtgctgaactggcagctatcccaatgtgaaatgtattttggatgtatctggtgtcatttttctattaagaccaagtataatgtttgtttgtaaagcaataaatcttgacttgaaatcagatcttggatgcacctgtttgtttttgttttagccttactgagccctaaaggtttgagaaaaaggctttctcaaattcattccccaaaccttggaaccaatattcaccaatgacggctcacaagcaagcgaattttaaacatttttcagttggttttaaaaaggtttaattggccggg

SEQ ID NO: 4861 - protein, 69 aa, Homo sapien
LGVMLFSKLFFGSSGERDRARCGRAGRGHPAGDPAGGSGRAVQDEPPVPHPRRLLLPSPHVSPGLLQLQ

SEQ ID NO: 4862 - DNA, 974 bp, Homo sapien
ggcacgaggggattacaggtgcccaccaccacgcccagctaatttttgtatttttagtagagacggggtttcaccatgttggccaggctggtctcgaacacctgaccttgtgatccacccgcctcggcctcccaataatttgtaagttatgttagcgggatcctcaaggccttgctttgccccgtggagacgcttgctcggatgagctcaggaaacagtaccggctgcgtggcaggtctgggtgttgtgtgcgaggacgtggcctttgaacaccgctgtgttctcagaggtccttaggagatatttttttttgtcttagggggactgtgttaagttcagacaaatcatgctgggtgtgtagagagtgtgaaatacgtcagtgaagtaagtagcagtgagcgattgtgaatgtgtaatgtaaatggaaaaccgggttttaccgtgttaagttattcactagggagccagtcgtagttctttgtaatcctctttcttccaaacctgctttgctgaaagttgcagaaaaggaagtgtgtggagagaaacagaacccttcagggtgggtcagaggacgccatccacagtggattcgtgttcgtttgcaggtggaagcagtgatttttaggacccactgattaaaaacaaacattcccaagtgtctctgagagatgctgtttatttgttaattaaaaagcttttttctctgtcttttaaattatggctttcatgtaataaggatatttttagtgaaaaattgttttcctttcaaattacagaccttttaaaaaaacttaatttgagcgagtaccttttcatttgacacttttcctgtttctaaccttaggaaaccagaatagcgtttggcagacacgacgttttcagtttacctttgacacctgccccactccattttgctttgtgatgtcttcatttaacaataaattatctgaaaaaacaaaaaaaaaaaaaaaaaa

SEQ ID NO: 4863 - DNA, 2937 bp, Homo sapien; identical to SEQ ID NO: 4408

SEQ ID NO: 4864 - protein, 750 aa, Homo sapien; identical to SEQ ID NO: 4409

SEQ ID NO: 4865 - DNA, 1041 bp, Homo sapien; identical to SEQ ID NO: 3852

SEQ ID NO: 4866 - protein, 153 aa, Homo sapien; identical to SEQ ID NO: 3853

SEQ ID NO: 4867 - DNA, 7883 bp, Homo sapien
taaattagaggggaaaaaaaaaatctccagtcccttcacgtcgtgacgcttgcttccgggaagcgggccggaagccactcctcgagtctgcgtcaaacccgacttcaggggccgtcgtaaaagtgtcgtccctgtctctccgaccggccacaggtttccgcttgcctctggccgggggtcggcaactgcaggcgtcagtttccctcaagatggcggacgaggaggctggaggtactgagaggatggaaatcagcgcggagttaccccagacccctcagcgtctggcatcttggtgggatcagcaagttgatttttatactgctttcttgcatcatttggcacaattggtgccagaaatttactttgctgaaatggacccagacttggaaaagcaggaggaaagtgtacaaatgtcaatattcactccactggaatggtacttatttggagaagatccagatatttgcttagagaaattgaagcacagtggagcatttcagctttgtgggagggttttcaaaagtggagagacaacctattcttgcagggattgtgcaattgatccaacatgtgtactctgtatggactgcttccaggacagtgttcataaaaatcatcgttacaagatgcatacttctactggaggagggttctgtgactgtggagacacagaggcatggaaaactggccctttttgtgtaaatcatgaacctggaagagcaggtactataaaagagaattcacgctgtccgttgaatgaagaggtaattgtccaagccaggaaaatatttccttcagtgataaaatatgtcgtagaaatgactatatgggaagaggaaaaagaactgcctcctgaactccagataagggagaaaaatgaaagatactattgtgtccttttcaatgatgaacaccattcatatgaccacgtcatatacagcctacaaagagctcttgactgtgagctcgcagaggcccagttgcataccactgccattgacaaagagggtcgtcgggctgttaaagcgggagcttatgctgcttgccaggaagcaaaggaagatataaagagtcattcagaaaatgtctctcaacatccacttcatgtagaagtattacactcagagattatggctcatcagaaatttgctttgcgtcttggttcctggatgaacaaaattatgagctattcaagtgactttaggcagatcttttgccaagcatgccttagagaagaacctgactcggagaatccctgtctcataagcaggttaatgcttgggatgcaaagctttataaaggtgcccgtaagatccttcatgaatgatcttcagcagtttttttatggagatggaatacaaaaaactcttgctatggaattgtgaagtattataaacaactgcagaaagaatatatcagtgatgatcatgacagaagtatctctataactgcactttcagttcagatgtttactgttcctactctggctcgacatcttattgaagagcagaatgttatctctgtcattactgaaactctgctagaagttttacctgagtacttggacaggaacaataaattcaacttccagggttatagccaggacaaattgggaagagtatatgcagtaatatgtgacctaaagtatatcctgatcagcaaacccacaatatggacagaaagattaagaatgcagttccttgaaggttttcgatcttttttgaagattcttacctgtatgcagggaatggaagaaatccgaagacaggttgggcaacacattgaagtggatcctgattgggaggctgccattgctatacagatgcaattgaagaatattttactcatgttccaagagtggtgtgcttgtgatgaagaactcttacttgtggcttataaagaatgtcacaaagctgtgatgaggtgcagtaccagtttcatatctagtagcaagacagtagtacaatcgtgtggacatagtttggaaacaaagtcctacagagtatctgaggatcttgtaagcatacatctgccactctctaggacccttgctggtcttcatgtacgtttaagcaggctgggtgctgtttcaagactgcatgaatttgtgtcttttgaggactttcaagtagaggtactagtggaatatcctttacgttgtctggtgttggttgcccaggttgttgctgagatgtggcgaagaaatggactgtctcttattagccaggtgttttattaccaagatgttaagtgcagagaagaaatgtatgataaagatatcatcatgcttcagattggtgcatctttaatggatcccaataagttcttgttactggtacttcagaggtatgaacttgccgaggcttttaacaagaccatatctacaaaagaccaggatttgattaaacaatataatacactaatagaagaaatgcttcaggtcctcatctatattgtgggtgagcgttatgtacctggagtgggaaatgtgaccaaagaagaggtcacaatgagagaaatcattcacttgctttgcattgaacccatgccacacagtgccattgccaaaaatttacctgagaatgaaaataatgaaactggcttagagaatgtcataaacaaagtggccacatttaagaaaccaggtgtatcaggccatggagtttatgaactaaaagatgaatcactgaaagacttcaatatgtacttttatcattactccaaaacccagcatagcaaggctgaacatatgcagaagaaaaggagaaaacaagaaaacaaagatgaagcattgccgccaccaccacctcctgaattctgccctgctttcagcaaagtgattaaccttctcaactgtgatatcatgatgtacattctcaggaccgtatttgagcgggcaatagacacagattctaacttgtggaccgaagggatgctccaaatggcttttcatattctggcattgggtttactagaagagaagcaacagcttcaaaaagctcctgaagaagaagtaacatttgacttttatcataaggcttcaagattgggaagttcagccatgaatatacaaatgcttttggaaaaactcaaaggaattccccagttagaaggccagaaggacatgataacgtggatacttcagatgtttgacacagtgaagcgattaagagaaaaatcttgtttaattgtagcaaccacatcaggatcggaatctattaagaatgatgagattactcatgataaagaaaaagcagaacgaaaaagaaaagctgaagctgctaggctacatcgccagaagatcatggctcagatgtctgccttacagaaaaacttcattgaaactcataaactcatgtatgacaatacatcagaaatgcctgggaaagaagattccattatggaggaagagagcaccccagcagtcagtgactactctagaattgctttgggtcctaaacggggtccatctgttactgaaaaggaggtgctgacgtgcatcctttgccaagaagaacaggaggtgaaaatagaaaataatgccatggtattatcggcctgtgtccagaaatctactgccttaacccagcacaggggaaaacccatagaactctcaggagaagccctagacccacttttcatggatccagacttggcatatggaacttatacaggaagctgtggtcatgtaatgcacgcagtgtgctggcagaagtattttgaagctgtacagctgagctctcagcagcgcattcatgttgacctttttgacttggaaagtggagaatatctttgccctctttgcaaatctctgtgcaatactgtgatccccattattcctttgcaacctcaaaagataaacagtgagaatgcagatgctcttgctcaacttttgaccctggcacggtggatacagactgttctggccagaatatcaggttataatataagacatgctaaaggagaaaacccaattcctattttctttaatcaaggaatgggagattctactttggagttccattccatcctgagttttggcgttgagtcttcgattaaatattcaaatagcatcaaggaaatggttattctctttgccacaacaatttatagaattggattgaaagtgccacctgatgaaagggatcctcgagtccccatgctgacctggagcacctgcgctttcactatccaggcaattgaaaatctattgggagatgaaggaaaacctctgtttggagcacttcaaaataggcagcataatggtctgaaagcattaatgcagtttgcagttgcacagaggattacctgtcctcaggtcctgatacagaaacatctggttcgtcttctatcagttgttcttcctaacataaaatcagaagatacaccatgccttctgtctatagatctgtttcatgttttggtgggtgctgtgttagcattcccatccttgtattgggatgaccctgttgatctgcagccttcttcagttagttcttcctataaccacctttatctcttccatttgatcaccatggcacacatgcttcagatactacttacagtagacacaggcctaccccttgctcaggttcaagaagacagtgaagaggctcattccgcatcttctttctttgcagaaatttctcaatatacaagtggctccattgggtgtgatattcctggctggtatttgtgggtctcactgaagaatggcatcaccccttatcttcgctgtgctgcattgtttttccactatttacttggggtaactccgcctgaggaactgcataccaattctgcagaaggagagtacagtgcactctgtagctatctatctttacctacaaatttgttcctgctcttccaggaatattgggatactgtaaggcccttgctccagaggtggtgtgcagatcctgccttactaaactgtttgaagcaaaaaaacaccgtggtcaggtaccctagaaaaagaaatagtttgatagagcttcctgatgactatagctgcctcctgaatcaagcttctcatttcaggtgcccacggtctgcagatgatgagcgaaagcatcctgtcctctgccttttctgtggggctatactatgttctcagaacatttgctgccaggaaattgtgaacggggaagaggttggagcttgcatttttcacgcacttcactgtggagccggagtctgcattttcctaaaaatcagagaatgccgagtggtcctggttgaaggtaaagccagaggctgtgcctatccagctccttacttggatgaatatggagaaacagaccctggcctgaagaggggcaacccccttcatttatctcgtgagcggtatcggaagctccatttggtctggcaacaacactgcattatagaagagattgctaggagccaagagactaatcagatgttatttggattcaactggcagttactgtgagctccaactctgcctcaagacaatcacaaatgacgacagtagtaaaggctgattcaaaattatggaaaactttctgagggctgggaaagtattggagggtcttttgctccatgtccaggttcacttacatcaataaaatatttcttaatggagtattgctttcaattagcaaacatatgcttcacaggaaaaaaggacatagatcaatctgttttatgtgctagtatttccaggaatttattccccttcataatttgtctcatttcattttatttcatccacttggtagatgaagtcacgtcaaacagttgtagacattttatgtgttggttaactcttctgcaattttgtatttggtgttttccccccaagtttagttcaactgacattggatcactgacaaaattctaataatctgtgatagtcttccttgcagttaaagaagaattgcagaaaccatgcaatatacttgggaaagattccaaaaataaattttttattatttctcttttaaggaaatacccctaatgtgccacctgctgctatcaccacaaattaaactcaatctctatgtggacagaggatgatttctgccaatatggaaaagcttttttctcactgtaggcctcaagaaaagttagggtaatgtatttgttattcattcctgacggtacaaagagcttgcagttctcacctctgactaccagtagctttgttgagttttgaaataatacttgacattttccaaaggcaaatctcattctgcaaggagattgtggcaccatcctgtttgactctcagaaacctcttgtaattctgatgtaaaaactgtagaatgaagatgagaaaattctcgcaatgagtggatcatgacaactgtaaattagaacaatcagatttaaaccaattccgcaatcttctatatctttgtaaaagacaaatccttgatgttgtctgtgtgcaaccttttcataaactctggttttatgactagtacaaaccaccaaaaaagccatgtgatcaatagtctgtgtcctgttataacatgctgtggttgagccatcttgtttataaataatagagctctcctgaatttgtgcatagacttcttggttcctggcttttgttttttgtatcaagagattgtgatataaaacagcagaagataaatggaaaccttccattttaacttacgttgtttctggggtaatgttagaaccttgaaagatgcattcaaagactgtatcttattttgcccttggctattagtgtctcacatatgtgtgtaaatgttttcctaccttctttttgctcagcaaaggcaagcaagtaaaatatatttgctaagtgattagtgatgcacatttggggctagatttttttggtacttttatgtaaagaaaagtggattttgcagtaagggattggcatgagcaggcgtcagaatcacaatcatgattttctacttgaataattacaattcagaaggtatctggataaatagatacatgtctagtgaacaatttgtaacaataacaggtaaggatcaggaaattcagtattcagtttgtcagatttgccagaatgatgaaagtatttgaacatgtgtgtttgtttcttatataattgtattgagtggattgtttgactgggaaatctgggctagaataggaaacagaagatactgacttctaccctaatagatgggccccaatttagcaaagataaactgactttatttttagtcctttttatattaacttaataaattctggagttaggctctcaagaggacagagggactgtctggcaatggccagccagacctttactgccaaagaacccatttcatattgcgttccactgattgagattgattcagatttttgcactgtagatgagcgtatgtctcagtgctgccccaagccccagggatttctcattatgttcaaatgtcctagtgatttaccttaatcattgcaaacaattatgcttatgaagtttacttacaaacaagcaactgagtcactttattttctttagtgtagtatgtgaaggcactggttcaacaggatggctccagaactgtgtttttctaatgtttggtaaggggctagtgagaattttaatgatatggtgaagaaaaatatatctgtataattaatttattatattggtgtatgggctgtgagttcaccttttagtggtcatttgtcatttcataacaactatgcattttggttcactgtgatgatgatctatatttagtgactgcaacatgtttataccactgattcaaattccatccatgatgaagttatacaaataatgcatatattgataacttttattgcaaaaatgtaaatttaaaacttgtataatgttcttgtgctttttaaaataaaatatatgtgtatatttaaaaaga

SEQ ID NO: 4868 - protein, 1748 aa, Homo sapien
MADEEAGGTERMEISAELPQTPQRLASWWDQQVDFYTAFLHHLAQLVPEIYFAEMDPDLEKQEESVQMSIFTPLEWYLFGEDPDICLEKLKHSGAFQLCGRVFKSGETTYSCRDCAIDPTCVLCMDCFQDSVHKNHRYKMHTSTGGGFCDCGDTEAWKTGPFCVNHEPGRAGTIKENSRCPLNEEVIVQARKIFPSVIKYVVEMTIWEEEKELPPELQIREKNERYYCVLFNDEHHSYDHVIYSLQRALDCELAEAQLHTTAIDKEGRRAVKAGAYAACQEAKEDIKSHSENVSQHPLHVEVLHSEIMAHQKFALRLGSWMNKIMSYSSDFRQIFCQACLREEPDSENPCLISRLMLGMQSFIKVPVRSFMNDSSAVFLWRWNTKNSCYGIVKYYKQLQKEYISDDHDRSISITALSVQMFTVPTLARHLIEEQNVISVITETLLEVLPEYLDRNNKFNFQGYSQDKLGRVYAVICDLKYILISKPTIWTERLRMQFLEGFRSFLKILTCMQGMEEIRRQVGQHIEVDPDWEAAIAIQMQLKNILLMFQEWCACDEELLLVAYKECHKAVMRCSTSFISSSKTVVQSCGHSLETKSYRVSEDLVSIHLPLSRTLAGLHVRLSRLGAVSRLHEFVSFEDFQVEVLVEYPLRCLVLVAQVVAEMWRRNGLSLISQVFYYQDVKCREEMYDKDIIMLQIGASLMDPNKFLLLVLQRYELAEAFNKTISTKDQDLIKQYNTLIEEMLQVLIYIVGERYVPGVGNVTKEEVTMREIIHLLCIEPMPHSAIAKNLPENENNETGLENVINKVATFKKPGVSGHGVYELKDESLKDFNMYFYHYSKTQHSKAEHMQKKRRKQENKDEALPPPPPPEFCPAFSKVINLLNCDIMMYILRTVFERAIDTDSNLWTEGMLQMAFHILALGLLEEKQQLQKAPEEEVTFDFYHKASRLGSSAMNIQMLLEKLKGIPQLEGQKDMITWILQMFDTVKRLREKSCLIVATTSGSESIKNDEITHDKEKAERKRKAEAARLHRQKIMAQMSALQKNFIETHKLMYDNTSEMPGKEDSIMEEESTPAVSDYSRIALGPKRGPSVTEKEVLTCILCQEEQEVKIENNAMVLSACVQKSTALTQHRGKPIELSGEALDPLFMDPDLAYGTYTGSCGHVMHAVCWQKYFEAVQLSSQQRIHVDLFDLESGEYLCPLCKSLCNTVIPIIPLQPQKINSENADALAQLLTLARWIQTVLARISGYNIRHAKGENPIPIFFNQGMGDSTLEFHSILSFGVESSIKYSNSIKEMVILFATTIYRIGLKVPPDERDPRVPMLTWSTCAFTIQAIENLLGDEGKPLFGALQNRQHNGLKALMQFAVAQRITCPQVLIQKHLVRLLSVVLPNIKSEDTPCLLSIDLFHVLVGAVLAFPSLYWDDPVDLQPSSVSSSYNHLYLFHLITMAHMLQILLTVDTGLPLAQVQEDSEEAHSASSFFAEISQYTSGSIGCDIPGWYLWVSLKNGITPYLRCAALFFHYLLGVTPPEELHTNSAEGEYSALCSYLSLPTNLFLLFQEYWDTVRPLLQRWCADPALLNCLKQKNTVVRYPRKRNSLIELPDDYSCLLNQASHFRCPRSADDERKHPVLCLFCGAILCSQNICCQEIVNGEEVGACIFHALHCGAGVCIFLKIRECRVVLVEGKARGCAYPAPYLDEYGETDPGLKRGNPLHLSRERYRKLHLVWQQHCIIEEIARSQETNQMLFGFNWQLL

SEQ ID NO: 4869 - DNA, 568 bp, Homo sapien
cccacgcgtccgccgggcgcgttccgttggcggcggattcgaacgttcggactgaggtttttctgcctgaagaagcgtcatacggaccggattgttttcgctggcccagtgtccccggagcttgtgtgcgatacagagagcacctcggaagctgaggcagctggtacttgacagagaggatggcgctgtcgaccatagtctcccagaggaagcagataaagcggaaggctccccgtggctttctaaagcgagtcttcaagcgaaagaagcctcaacttcgtctggagaaaagtggtgacttattggtccatctgaactgtttactgtttgttcatcgattagcagaagagtccaggacaaacgcttgtgcgagtaaatgtagagtcattaacaaggagcatgtactggccgcagcaaaggtaattctaaagaagagcagaggttagaagtcaaagaacatattcttgaaagttatgatgcattcttttgggtggtaacagatcataaagacattttttacacatcagttaatatgggattattaaatattggctataagtgaaaaaaa

SEQ ID NO: 4870 - protein, 88 aa, Homo sapien
MALSTIVSQRKQIKRKAPRGFLKRVFKRKKPQLRLEKSGDLLVHLNCLLFVHRLAEESRTNACASKCRVINKEHVLAAAKVILKKSRG

SEQ ID NO: 4871 - DNA, 882 bp, Homo sapien
  Unsure 198: Unknown base
gggcgatarggtgctgtccttggggtgctgtgtatatgggatgatgacgcttatcagcattatctagtcctttccaccccgaaattcgccccgattaaagactgtgttgcattatcagcctgccgaccatgcccgcgggcgtgcccatgtccacctacctgaaaatgttcgcagccagtctcctggccatgtgcgcangggcagaagtggtgcacaggtactaccgaccggacctgatgagaaacaggttgagaagagtgaagttgatttctcaaagtcacatagctttagtgagacgatttgaggatctgaagcccaagctttctgtttgcmaaactgggatcacaagtctttcggtcggagaactggaagtctgggcagagtcgagcagaggagacctgatgactgcctagacttgtgctcagtgctgtgttggggagaactgctacgacatacctgaaattccaccaaagcgtggagaactcaaaacggagcttttgggactgaaagaaagaaaacacaaacctcaagtttctcaacaggaggaacttaaataactatgccaagaattctgtgaataatataagtcttaaatatgtatttcttaatttattgcatcaaactacttgtccttaagcacttagtctaatgctaactgcaagaggaggtgctcagtggatgtttagccgatacgttgaaatttaattacggtttgattgatatttcttgaaaaccgccaaagcacatatcatcaaaccatttcatgaatatggtttggaagatgtttagtcttgaatataatgcgaaatagaatatttgtaagtctactatatgggttgtctttatttcatataaattaagaaattatttaaaaaaaaaaaa

SEQ ID NO: 4872 - protein, 88 aa, Homo sapien
  unsure 18: unknown amino acid
  unsure 63: unknown amino acid
MSTYLKMFAASLLAMCAXAEVVHRYYRPDLMRNRLRRVKLISQSHIALVRRFEDLKPKLSVCXTGITSLSVGELEVWAESSRGDLMTA

SEQ ID NO: 4873 - DNA, 2454 bp, Homo sapien
gagccagcctctgggaccgaggaaataccagaaatagcccaccaccctacgggtttcatctctcaccagaagaaatgaggagacagcggcttcacagattcgatagccagtgaggtggcatcttgggaagacatggcctattcgtgtaattattgcccatttggctcattccccaagcccctaattcattttaattcattttaaacaaaagcagagtacaccggtattgctccagatcgctcacatcacctgggacagtcccatggcccctatgagtcaactcacagcttgcggggagtgggccttctcctggccttgttcttgctcataaacaggtcacttcctccatgaagagaccagtttccacgctcccatctctcactgctgactcagcgatgcctctgcctcggtctgcttttgaagactgtgaccttcaccaggaggttttacttacaccagtcgggaagattagtccctcattctgcctggagtgccccgtgtttgacttggcagcgggtgtggagccatccccgcgtcctcctggcgcattgccactgtggctgtccaggaacaggatgtggctgccttggccgaatgttgtcctactctccccaaccccggcgcctcagctcctcagctcctcgggcccctgcgtctggctggtgtttgcagggctttcgctctgctctggtattgctctgcctttatagaaagtcttattgaagaagtgtaagaaagacctaaggtggggaagactcctacacacaccattagtatcagtgacaccagcaatgtaggttcccagccccttcccagtggcagcttgtgtgtccaggagataggacatcatttaacgcatcagcaaagtagcagcagatgccacatacagagtagagcgaaggcatttggtggatcggtcactagagatctatcttgcagaaagtatgtttttcctcataaaagtgcctcttaattggccattgtaccagccacttgtcctagccaaatgtccaaaacacgcccttgggccccgccacgttacaatccacagattgtctgtctgagtcgtttaaggcatttcctggtgcttgtgttccatgaataaaaggacaaagtcagaagatcactgatgtcttactgtcaacagagatattttaaaagagagaagcaggaaaagatcttccttttttgatctacaacttatatagttttctgattatgcacataatagatatgccttccagatgcataaggcaaacatctggaaagaaatatacccaaatcttagcaggggttatctttgggagtggagtacatgggattttgctttcttcatttttataattttatattactgtcttggaagatgtgtttatgtgtgtgtgttacttttacaatcaggaaaacatatttaataacatatagtcaagaaaacagacttaaaaataaatactatgtgtccattgagaaaattcacaatataaacagaaatacaaataaatacatacacaattttaaagtcacctgtagccctacccttagaggtacccagggttaacattttggtggtattgtcttatcaatttttccgttgatacattcagcaaatttggagcacattgaccatggagttttgtgtccaaatccaatctgaatttacctggaagaggccttgacacctgcatggaaatgagctaagaaaaccactggagccttgggagctctttggcctcctggctggcccagtaatatctgagctcctttggttaatttataactgatataaaactacatcttctttataatataaattgtacctgtgagtctagaagctttaaatgtgtttaaattaaaatattcaagctaaatgttactgctctctcccaaattctgtaagtttgactcccgttaccccaattagaagtaacttctttgtttcatgccacttttatagcatttggtaattctgctataacacatcttgcccctattattaactgtgcacagctacacaaaggtgtgccttctacgtgggaacatggattgtgaatgactctgtaatgaggcctgagtcttagttatctttccactcactccccgtctcccctttccaaccccaaaggctcacgataggggctcactaaatgtcagtgtttcaccaaagtattttttccattgtattaagagtccagtcactgtatatggaagtattttattttttatttttttatatcacttgagtccactagtagtacttccttgctctgtttgacttgtcagatacaaagacacgggattagattttgggtggtaaaattgtgatacgcatggctgttgatggagtggaacatcttagtgatgtgagaaaggtcattttagttataaatgtaaaccaattactttagcacaacaataaagatgttctggaaattattataaaaaaaaaaaaaaaaa

SEQ ID NO: 4874 - protein, 120 aa, Homo sapien
MKRPVSTLPSLTADSAMPLPRSAFEDCDLHQEVLLTPVGKISPSFCLECPVFDLAAGVEPSPRPPGALPLWLSRNRMWLPWPNVVLLSPTPAPQLLSSSGPCVWLVFAGLSLCSGIALPL

SEQ ID NO: 4875 - DNA, 2620 bp, Homo sapien
taggagtaaccaaccctttttttgctaagacactccagcactggccacacattattcgaataggagaccttaaacctacaggtgaaattcctaagcaggttaaagtgaaaaaactgaagaatctaaagactctggattccaaacctggagtttatacttcatataagccatatttaaatagagatgaagagatcataaaacaattacagaagggtgtacaacagaaacgtccttctgaggctcaaagtgttattcttcgacgctattttttggaactgacacaaagtttcatcattccattagaaagatatgtggcaagcttgatgcctttgcagaaaagtatttccccatggaagagtccacctcaattaagacagtttcttccagaagaatttatgaaaacacttgagaaaacaggacctcagctaacctctagaataaaaggcgattggattggactttaccggcatttcctaaagtctccaaattttgatggctggtttaagacccggaggaaggaaatgacccaaaaattggaggcactccatctagaagctctttgtgaagaggacttacttctctggatccagaaacacacagaagtagaaacagtagaccttgtcttgaagctgaaaaataagctgttgcaggctgatcgagagcacttacctgtgaaacctgacactatggaaaagttacggacacacatagatgccattatcttagcattgccagaggacttgcaaggcatactgctcaaaacgggcatgacatgatatttgccaagattttccagccaaaaaggattatgcatcatgaagcatactgacatttcaaccagacgcacaaaggagatctctcagtggcagcggagtggaaaattgccatgaatgctagttacagggtagaaagactgtattgtataaacagacctttttagtgcattactttttaaagtggatatctgtggtggttccactttaatactgaaacaccgaaaggcatttctatatttttaatcatgttctaaagtgctcttatgagagacttgtgggccatcagtattagtgatttcatactgcagtgctggcattgcagatatttttttaaattggtgctgctttgcccaatcatgttaaaactcagggggatataaaaataacattcacactggctatcttcttaagaacagaaagactgaactgtcctatggttagaaggaattgatgcttatgtagtgccttctgttgtcctacatgtttcacagttcagctgctagtcttgaagcttttccttagcttcattatgatacgtaattttataaggtattctgttgagtgatcattgtttaaaaaaaaagtttcttgctacccattgtgtttattaatagacatgatgggtttttttcagttgtcatatagattttcattattttcccttccattttcaaaatttaatgttaccagtttctccaaagacaagaaggcatctagtattaatgatggaagagtttattttctcttaccctttactaatttaaacattaggctgggtgtgagccaccgcacctggccagaagccactaactaaaataggcacacatgacacagcatgtggttaatagctgtgtcttgaattatcctctaaataaccaaatttagttgtatgtatttgtaaaggatatggcttcagaagctatcttttgttctctgtcgatataactcttaagggcattcctgacccaagaaagactccttgcgtttgtaactgtggtctaatacccaaatgtgccctgttcttatggatacagtctcttgaagcatacctcaaagtcatagagagaatatggcatttgaaagaaatcgtttgccttggatcatatgagttattttgtgaaacaacagctgacttttcagaaaaggagcaactacttttatatgctaaaagtatttcataactttctgggaaaccttatttaggtataaatggtcatcttattatttttcaaaaaggtatattttaataattgtacaatttatatacagtttgtgaccagaatttgtaagttgttggtgtcatatcaaggatcttttaaattatgccactacaggatgtatcatttcaagtctattttgcacagctaaacagtagcaaaagatgccaattagcatgataatggtgtcttcatttttactgtatttaactgaaacctaacacatgttgaaaaccatatcatacctagtttatctcttaatttcaaactatgtacttgtaaaaatgatgtaaatttgcactgggaacctgggaaagagtgactgataatttttggtgcgtgatttttagatttgtctttttttttttaagaagaatttgttactatgtaaaccctgacattaaatgttttatctctaccagcatcaggaggaatcactgctttaagggtattatgtaatgcctagtgccttctatttacagtgaaaaagaggttttgtgaaggcatttatggtcattaccaaaaactaaattaaaggccttggattttaaagcgaaaaaaaatctatgtcgggtgcggagaaagaggtaatgaaatggcaggaatccgatatgcagctatcgatac

SEQ ID NO: 4876 - protein, 257 aa, Homo sapien
GVTNPFFAKTLQHWPHIIRIGDLKPTGEIPKQVKVKKLKNLKTLDSKPGVYTSYKPYLNRDEEIIKQLQKGVQQKRPSEAQSVILRRYFLELTQSFIIPLERYVASLMPLQKSISPWKSPPQLRQFLPEEFMKTLEKTGPQLTSRIKGDWIGLYRHFLKSPNFDGWFKTRRKEMTQKLEALHLEALCEEDLLLWIQKHTEVETVDLVLKLKNKLLQADREHLPVKPDTMEKLRTHIDAIILALPEDLQGILLKTGMT

SEQ ID NO: 4877 - DNA, 3553 bp, Homo sapien
gcagcccgatcgcgggagctcgaacccgagccggggccgcccgggtggcgcggtggcggcggctgcggctgcagcagctgcgacggctgcgggggctgctccgggtactgcgggggcggccgggagccggcagccggcggcggggccggatggctctgtgcgggcaggcggcgggcgctgctgtctctgcccagcgagctgatcgtgcacatcttctcttttctgccggcgcccgaccggctgcgggcctcggcctcctgctcgcactggcgtgagtgcctcttctatccggccctgtggccccagctccgcatctgcctccgcgtctcgcccgcggagcagcctcggctggaattcctcatgcgcaagtgcggctggttcgtgcgagagctgcgtgttgaattcgccgccgagaactatctgagcggcggtggccccaggggacggaggtggcgcggacaccgggactggaggggaggaagtcgaggccctgcagctctcagctcgttggctggaagtgctgcgcacctacttggagctggtgctttgcgtgctggtcagcatccggaacaacaggaaccttcagaagtttagtctttttggagacataagtgttctacaacagcaaggaagtttgtcaaatacatacctcagcaaggtggacccttgatggcaaaaaaattaaacaaattcagcaactgtttgaagaaatcctgagtaatagtaggcaactgaaatggctgtcctgtgggtttatgctggaaatagtaaccccaacatcactgtcatctctctctaatgctgttgccaacaccatggagcacctcagtttactggacaataatattcctggtaacagcactcttattactgcagttgaactggagcgatttgtgaatctgcactcacttgccttggatttttgtgactttacagctgagatggcaagagtcttaactgatagcaaccatgtgcctttgcaacgactgtctcttctggttcacaatgtttctgtaatgcacaagtctctggacaacatgccaaatgatgagcattggaaagccctgtcacgaaagagcaccagctttcgggtctatataatggcttttgatatcaagagtgaagatatgttaaagattctgaaacccagtataccactagagaggattcattttgatagctatatcacttgtgtttcaggggctattgttgatcttatatccaggcaatatgacaagttcctcactcattttattttaatgaatgatgtgattgacacatctggttttccagatcttagtgacaaccgaaatgaagatccgttggttttattagcatggaggtgcacaaagctctctcttctggcaattcatggttacacggtgtgggcacacaacctcattgccattgctcgtcttcggggctctgatctgaaagtgcttgaagtcaccgaagaaagcattgattttgaccaaggtgaactggccgaccaggatgtagatccagtgcataaccttattgagcaggtatccctgggcctgggtcaaccttggcatgcagtcatggacatcgaatcactcagtgtcttcactgaaccaaatcgtcatttttacagagagatgcaaagcttcagtgaagacatttagcttttttttaatgtagaattcctgtggttacatatgcaagtagggtcctattatgtttttttttcagtagtgtgaattaatccttttgtgctgtgtttaatcagtattagctttatagaattatatatgtatattctacttcttgatcaaagaacgtagtcgggtattggtttagaagttcaaagtgacaatgtatagggctttcacggttaatggacttgttaccaaaccttaaggatatacagccgaagattgtctgaggttgctggctaactttatttttcactgagttactctgcctttttgacgtttttattctttgtgtgtcagagttcagagctcaggagccaaaatatttttatacatatatagatatatatccatagcctggtagatttatatgcaatgcactgcatccatgcattctgatagcatttcattaattttgatttcaaatggaagataaataatatcccaaatgaattatctgtaacagaaaagccaagactttaactttcattacatatctaatagttgatatcaccagttaccattttgaattttgtatagtactaggttagaacattgcttaatccttttaaaaaaaatgcatttacgtaaacacgaatactgaaattgttggattttttaactatatctgacataattttattcatcaattacattacacattcatttagcccagatttcaaatagtgggggaagaaagaaactgtatttcagagtaaaatctcctaaaggaaataaaaacacagagttgtaaatacacatgcttgcaaaaacattagtcgtgaaatccctagcaacaagtcactggatttttctctgtcagcacgcgtgtcagctgccaaagaatagacttaatgaagaagtgcccacatgctggcaggggccggcccactctggccagccagatactgctagattgtaatatttaaggtcgaatttcgacctgtggtacacagctgtgctgtggctcagtcagcaacctcagaactctgaaaaaacaaaacaaaagaaaaaaaaaagaaaaaaaaaacatgcacctgtttcactgtgaatagtgaatgtaaaggaaagaaaggaaaaactgaaagcttgttctatcacaggtatgagctgctatgatacatgaagaacattccatgaagtatgttttaaaaccttgttatatctgagaggctttaaaagcctattaactgtttcagggcaaccgcggtacagacgtggtctctgtgagacttccacctgaccccagttttaagtggtacgaatgttgtgcatttaatgttaaaggacagtctgcaataataaagtaagtagccaacctgggtgcccagcagtgctgagacctggctgctctattgtaagctttggaaacacaatttatgcaacagatgtccagatatgattctatttatggaaaaaagtttatatgtgttttacaaatggttttaccatcttatattaaaatgaccttttgacaggtgtgcactgttttgtctccagtgagcacataccatgcggattttatatgtacatcagtagtgtgaatccactggcacagtgtgtgtaaatgccagatgtggtgagattttatcttataaatgtgatcagataaaataactcctgacagaaactgtaaggaaaccagctgaatgtttgacctgatgactgatgttgtatggtttatgttaaatgtatattcttttaatcaatgaataaagcattaaaaatgatcattgtaatatattttattgtatatgaagcatgactacttttagtgttaaataaactgcaataatccttatattgtgtataataatgtgttagtattctggttgtattctggtgcagcaaagcttaaatttgagatacattataaa

SEQ ID NO: 4878 - protein, 296 aa, Homo sapien [sequence omitted]

SEQ ID NO: 4879 - DNA, 481 bp, Homo sapien
ttttaactttgcaacaggtttttatttttgctttatatctattacagtgtttgaaacctaaagaaatacattttctcttcaaatttggatgtgtatataaataacatttgtctggactcagcacactcaatgccatgttttcttcgcctatgtctgctctgaaatcaagctgtgtctgtctacccaggggccctgagaacatggaaaatagagtttattgttattagaaaaataaaagcaaatgaatttgcaaagaaaaaccagtgagaaggattagattcatcttccaagggtccatagctggtaacccaagccattctcgggggatatccagtctcttgagtggctgggactccattacccactttccttctttaataggtcaaaggcaattcccacaaaagctggctaaaaaagccgacacccaactccagagtctgagggttcatgaagatgtggacttttttttttgagacaagag

SEQ ID NO: 4880 - DNA, 2484 bp, Homo sapien
cgctggcgcggctgcggccgctgctgcctacgcgccatggagcatcgcatcgtggggcccgggccgtaccgagctaccaggctgtggaatgagaccgtggagctttttcgtgctaagatgccgttacggaaacatcgctgtcgtttcaagagctatgagcattgtttcacagcggccgaagctgtggattggctgcatgagctgctgaggtgcagtcaaaacttcggccctgaagtgacccgcaaacaaacggtccagctgctaaaaaaattcctgaagaatcacgttattgaagacatcaagggaaaatggggtgaggaagattttgaagacaatcgtcacttatacagatttcctccttcttcacccctgaaaccatatccaaagaagcccccaaaccaaaaggatgttattaaatttccagaatggaatgatctcccaccaggcacttcacaagagaacatcccagtgaggccagttgtgatgaattctgagatgtggtacaagcgtcacagtattgcaattggagaggtgccagcttgccgtcttgtccaccgcagacagctgacagaggccaatgtagaagagatatggaagtctatgacattatcatacttacagaaaattcttggcctggattccttagaagaagttttagacgtcaaacttgtcaattcgaagttcatcatccataatgtatatagtgttagcaagcagggagttgttattcttgatgacaagtcaaaagaacttcctcattgggtgctgtcagctatgaagtgtttggcaaattggcccaactgttctgatttgaagcagcctatgtacttgggatttgaaaaagatgtctttaaaaccatagctgattactatggtcacttgaaagagcctctacttacatttcatctttttgatgcttttgtcagtgtactgggtttgttacagaaggagaaagtggcagttgaagcatttcagatttgctgccttctcctacctcctgaaaataggagaaagttacagctattgatgatgatgatggcaaggatttgcttaaacaaagagatgccacccctgtgtgatggctttggtacccgaacactgatggttcagacattttcccgttgcatcttgtgttccaaggatgaagtggacttggatgagttattagctgctagattggtaacgtttctgatggacaattaccaggaaattctgaaactccctttggccttgcagacctctatagaggagcgtgtggctcatctacgaagagtccagataaaatacccaggagctgatatggatatcactttatctgctccatcattttgccgtcaaattagtccagaggaatttgaatatcaaagatcatatggctctcaggaacctctggcagccttgttggaggaagtcataacagatgccaaactctccaacaaagagaaaaagaagaaactgaagcagtttcagaaatcctatcctgaagtctatcaagaacgatttcctacaccagaaagtgcagcacttctgtttcctgaaaaacccaaaccgaaaccacagctgctaatgtgggcactaaagaagcctttccaaccatttcaaagaactagaagttttcgaatgtaataatacttccacagcaacaggtgctagagaccactgttgttgttttgagtgaatggtggttaggagaaagactttggtggtggaagaaagaaaagcataaaacaaagactactgaaatatagataaagattgccttagtttttaaaaatgtttggccattagtatttttataaaactcaatgctagttttaaagtgtataaattggttaaaatttatgagtcaaatatatagtgataatgttaacatgtttgtaattgctacagaatttaagggtatttttatctctgtgctttctttttcatggtgtttattaaataattgtgtatatacatcctagctactgatatctttattatagccttaagacttaattttaagtcttaaaaatagtgtgtatacttgaataagaaagacactgggtactgttactgtgatgctattgacttagtagccaattatcatttctcctgtataaattccagtttttattgctgcacataaattttttaatgtcttatattgtgatagctatgtcttttattgcagatttattggatgttatgacagattttactaaagctagtgtttttataacatatatattagttgatgtttacctataagtggagtagattttcatctgcctgcaatggtataatttcagtcttagctaaaaatggaaagttgaactggataaattctttgggtacccttagacctctgattctaagtcaaatgcaaatgggttaaataaaatgagactacttcctttataaatatattttcatccttttgaaagtaagtgaaatgtaaataaacttattttttttaaaaatgccaaaaaaaaaaaaaaaaaa

SEQ ID NO: 4881 - protein, 529 aa, Homo sapien
MEHRIVGPGPYRATRLWNETVELFRAKMPLRKHRCRFKSYEHCFTAAEAVDWLHELLRCSQNFGPEVTRKQTVQLLKKFLKNHVIEDIKGKWGEEDFEDNRHLYRFPPSSPLKPYPKKPPNQKDVIKFPEWNDLPPGTSQENIPVRPVVMNSEMWYKRHSIAIGEVPACRLVHRRQLTEANVEEIWKSMTLSYLQKILGLDSLEEVLDVKLVNSKFIIHNVYSVSKQGVVILDDKSKELPHWVLSAMKCLANWPNCSDLKQPMYLGFEKDVFKTIADYYGHLKEPLLTFHLFDAFVSVLGLLQKEKVAVEAFQICCLLLPPENRRKLQLLMMMMARICLNKEMPPLCDGFGTRTLMVQTFSRCILCSKDEVDLDELLAARLVTFLMDNYQEILKLPLALQTSIEERVAHLRRVQIKYPGADMDITLSAPSFCRQISPEEFEYQRSYGSQEPLAALLEEVITDAKLSNKEKKKKLKQFQKSYPEVYQERFPTPESAALLFPEKPKPKPQLLMWALKKPFQPFQRTRSFRM

SEQ ID NO: 4882 - DNA, 5505 bp, Homo sapien
cggcggcagcgttaagtgagaaaggaaaaaagacaacgaggaaaaaggaggtgtccgggtagggcaacgcggcgacacccgaggcctggtggtggcggcggatcgagatattcaaggctgaagcagctacggaacggcagcggcggcggtcggacaaactgactgaccgagccgggtggtggcgggagcagcgggagcagccggaacgatgccggccgtgagcctcccgcccaaggagaatgcgctcttcaagcggatcttgaggtgttatgaacataaacagtatagaaatggattgaaattctgtaaacaaatactttctaatcccaaatttgcagagcatggagaaaccttggctatgaaaggattaacattgaactgtttggggaaaaaggaagaagcttatgaattggttcgtagaggtttgagaaatgacttgaagagtcatgtgtgttggcacgtttatggccttcttcagaggtcagacaagaagtatgatgaagccattaagtgttacagaaatgcactaaaatgggataaagacaatcttcaaatcttaagggacctttccttactacagattcaaatgcgagatcttgagggttacagggaaacgaggtatcagttacttcagcttcgacctgcgcagagagcatcatggattggttatgctattgcttaccatttattagaagattatgaaatggcagcaaagattttagaagaatttaggaaaacacaacagacatcccctgacaaggtggattatgaatatagtgaactactcttatatcagaatcaagttcttcgggaagcaggtctctatagagaagctttggaacatctttgtacctatgaaaagcagatttgtgataaacttgctgtagaagaaaccaaaggggaacttctgttgcaactatgtcgtttggaagatgctgcagatgtttatagaggattgcaagagagaaatcctgaaaactgggcctattacaaaggcttggaaaaagcactcaagccagctaatatgttagaacggctaaaaatttatgaggaagcctggactaaatatcccaggggactggtgccaagaaggctgccgttaaactttttatctggtgagaagtttaaagaatgtttggataagttcctaaggatgaatttcagcaagggttgcccaccagtcttcaatactttaagatcattatacaaagacaaagaaaaggtggcaatcatagaagagttagtagtaggttatgaaacctctctaaaaagctgccggttatttaaccccaatgatgatggaaaggaggaaccaccaaccacattactttgggtccagtactacttggcacaacattatgacaaaattggtcagccatctattgctttggagtacataaatactgctattgaaagtacacctacattaatagaactctttctcgtgaaagctaaaatctataagcatgctggaaatattaaagaagctgcaaggtggatggatgaggcccaggccttggacacagcagacagatttatcaactccaaatgtgcaaaatacatgctaaaagccaacctgattaaagaagctgaagaaatgtgctcaaagtttacaagggaaggaacatcagcggtagagaatttgaatgaaatgcagtgcatgtggttccaaacagaatgtgcccaggcttataaagcaatgaataaatttggtgaagcacttaagaaatgtcatgagattgagagacattttatagaaatcactgatgaccagtttgactttcatacatactgtatgaggaagattacccttagatcatatgtggacttattaaaactagaagatgtacttcgacagcatccattttacttcaaggcagcaagaattgctatagagatctatttgaagcttcatgacaacccccttacagatgagaataaagaacacgaagctgatacagcaaacatgtctgacaaagagctaaagaagctacgtaataaacaaagaagagctcaaaagaaagcccagatagaagaagagaaaaaaaatgcagaaaaagaaaagcagcagagaaatcagaaaaagaagaaggatgatgatgatgaggagataggaggtccaaaagaagaacttattccagagaaactggccaaggttgaaactccattggaagaagctattaaatttttaacaccgttgaagaacttggtgaagaacaagatagagactcatctttttgcctttgagatttactttaggaaagaaaagtttcttttgatgctacaatcagtaaagagggcatttgctattgattctagtcatccctggcttcatgagtgtatgattcgtctctttaatactgcagtgtgtgaaagtaaagatttatctgatacagttagaacagtattaaaacaagaaatgaatcgtctttttggagcaacgaatccaaagaattttaatgaaacttttctgaaaaggaattctgattcattgccacacagattatcagctgccaaaatggtatattacttagatccttctagtcagaagcgagctatagagttggcaacaacacttgatgaatctctcactaacagaaacctccagacatgtatggaggtattggaagccttgtatgatggtagcctaggagactgtaaagaagctgctgaaatttatagagcaaattgtcataagcttttcccttatgctttggctttcatgcctcctggatatgaagaggatatgaagatcacagttaatggagatagttctgcagaagctgaagaactggccaatgaaatttgaacatcactaaacaagcaaatggaatgactttggaccatatctagtatataatatttttgtcacgcacctgctgcattgctctaacttacacagaatgagaggagtaaatgttcttgccttcaaatagtgttttacgttttttatcctgctgaaaaagtatatataaaatatctaacattacaggatagaggttcagtttcttaaaaaattaaagctgctaaaattgagtggttaaaaaagataccttatcctattcctccccacccacccatgtttttaaactaatttatataaaatctggaggctgttacagctaacaaagcaggtgtgtggcagaaatattactttaaatttgtcttgtgagattttactatatctcagacagcataaatgctgttttagcactggattctttcactgagcacaaagagttgttggggctttagcatctgactgattttgttacggggttgattctgaccataggaagtatgcaatgtgaatcactatttacagagaaacctacaacagatgcttgatgttgtagaaactgggacatatagataccaagcaaaattataagaaacctataaggtgttcaatacgcttgtgtttccaaaattcactgtacatgatcagtttggtgttcttgtaccacagtttttaactgaaggaaccagttgtaacagtctcaattttaactaaaacttgaagaactaaaacaacaatgcaaacctttcagcattgtttggccaaacttgttaaaactgtaatgcaagaaccaaatgcactgtgatgtggcaccaactaattagcaagcatgaatttttcacccaagagtgaaaaaaggaaaatctaccatggcttgaagttaaagagcagaactcctgactaccattctatgactgatcaaaagactaatagttaaaaacctcagcaggccttgttcacgatatgcagaaaaaaaagtgctgcagtttagatacctctggaatttttccacagtgtcacaggtttgtaatacttgaagccctacatttctaagaatatatttcttgctcagttgtttcaggcaagcccaagactttgtaatttttaaagggcccaagatttttttttttttttttttttcaaataacagaccagcttctttttcttgcagttacagatgtaatttcctttttgttgtcaaacataaggtaccaaatatgatgcaataaattgttttgaaaaacagttgtgtgaatatttcaactaatctgtgttgggcttctgtgaaatacacaggtggaaacagaggtgcaagccagaggcaatgtaatatgctgtaaggctagtgcagatgggagctttttagaaggggctaagtgctggtgtcagggaaattccataatgaagtagaatgctgctcctgcattaagatttcattgagggcaaggctggtggcaggtactatgaatgtaattcataatttaaaaggaaaactaaaaactattttgatttgggaaaatgagccttaatttgttaaacctatacactgagaactagcctcaggcttaatattctcattgcatttgcaagatctgagcaaataagattaagtaaaacaaatcaattgtatatataattgacctttttgtggaacatgtagtttatagaaagtatactctaaagggaatttgccgaagaccttttactgattgaacagttgtgctacaatcaacttttcatagtacatgacctgcattccacatctcagtctaacagtttagtagtgatgtaaagagaagtacaaaccgaactccagtgctttgttatgttttattaactggccctgtctcaggaacatcttaacagatggcaaaaaaacaaaaactttttttcaactcctatgagtggcaactgaagttcttattgttgggaaagaacactagtcctacctctgccactaatgaggtgtttggaggaggtaccagccatataatagggggtgtatgtgtgaattttgtttaaactctactgtatattgaaatgaaattcatttatttgtcttgacaatgttcaaatgatgtagattgtcttagaatgaatattcataagtactcagaactcttaagatgcagatgccacccgtgaggagctaaattcctaatgtgtattgtattccaacccaattttactggaactattgaataaatcttttattttctttcaggtttacttgatagtggatacattggtgtcagaggaccttgactgggttcattttatgtccagacatcacccctgaaacactgtactgtactatcttgctctgagtagtatcaactggatcgtctcatatttgcctcattcatcctattaatttcaaatgatactgtgggggaaaaacagggttagaaaaacaagtggaaaaaatggagtgatgttgtaatctaaacaagtgccttatgtttattgctaagaactggtgttaccaacccttttgagaagaaagggtctcttgacctgtattaacataggaaagtaaagttctttttgtttttctttataagctactcttgtcatttctcgttgaaaaactaaaatctgactaggttagtttactcagctttaattagatagttgagtcatatattttcaacatttttctgtatcgtatttattatgcacaaaaataaagtgtgatctctaat

SEQ ID NO: 4883 - protein, 866 aa, Homo sapien; identical to SEQ ID NO: 3626

SEQ ID NO: 4884 - DNA, 2416 bp, Homo sapien
cacagaaacatgatgtggaagtgctggaacggaacttccagaccatcctgtgtgagtttgagaccctctacaaagctttctcaaactgcagcctcccgcaaggatggaaaatgaacagcacccccagcggggagtggttcaccttttacttggtcaatcagggggtttgtgttcccaggaactgtaggaagtgcccacggacgtaccgcttgctcggaagccttcggacctgtattgggaacaatgtttttgggaacgcgtgcatctctgtgctgagccctgggactgtgataacggagcactatggacccaccaacatccgcatccgatgccatttaggtctgaaaactccaaatggctgtgagctggtggtggggggagagccccagtgctgggcagaagggcgctgccttctctttgatgactctttcctgcatgctgcgttccatgaaggttcagcagaggatggcccacgggtggttttcatggtggatttgtggcatccaaacgtcgcagcggccgaacggcaggctcttgatttcatctttgctccgggacgatgagagtatttcccatgctggagtcggcgagaagggccgaggcggggcctgggcagactgtggtccggtccagtccctaccggtgttgtttccatgctcagaaacctgcctcagcggaaagctcttatttgggattttatatcatgtcgggtccctctttcccttggttattgtaaatggaaacttttcggcttgtatttccttagattttttttttttccttccaatcatttgcttcagagactcctttctggcctaacagcgcattcctttgattggtccttgagtgaccagagacttagtgcccttgtaagtctgtcttctgttgctacttgtttttttcagtgctctgaaatagagtaactaaatggttatttgtctgaatataataatgtaaaacttcttgtggtcatcttaaaaaaaaaaaaaaaaaaaaaactaaaaactgcaaaccagagagctagagaacttggcctctgatgctggcacactggggacccttcagccacctgacggcagggggacagtctgcagcccccacacctgactggcttcagtagccaggtggaggggctgccagacacagtcagggtggcacacagtgtccaggcccagggatactgtcaccatcgctcacctcattctaaaccttgtcaggtccctgatggcaaaagcattgggccagtaggactggaggctactctttaaacatggctttcctgcaaagctgaagctggtgtcccccagcaccaagctgcggctcacacagatcagccacggaacgtgtgatccgcttacctcactgcctacagaagccctactgccaaactgggcctggaaaattcccagttttaggtgttttgagtccacagtgatgaacgttaaggccaccaggttggctgataggagctgtagggggataggaccgcgctcacccagcgacatttggggaaagcctttctctggcaaaactggaataatagatctgaccaaagtttctgttttgctttggagttctgttgcctatgtttttttttttttcatttatttgtctgtacataaatgttcaaacactagacttggagatagtggaagagttggccctgtgtctttgtcatggcacaaaggtgtgcactgcgtgacaatgacccaagccagtgtgtgctagtgaggagacagagaagacctacatgcccagaggacccgtggccgttgtgctggttttctggtctcctgtgaagaacatgtggatctcttcccgaaggaaaaggtcccaggagaccagtttgaggcactcactctagaaatagcctgtgttagctgatgtgtgaaagcgtagccggccagccacactagagatgccttttctgaataatgtattatgagcagtgtcagatttataaagccgaggagtggtttggaatatacagctggtcgcaggtgcaggtccagtgtttagatccaaatggaaaacagcagcttctaagaggtacaactgttggaagaaaacacagttgaaatgcaccaggcaggtactagcaagtgtgcaaagagcacgtctacatttgagtaaaatgtctacacagatatttgtcagtgatgagaatgcaggaaaaggcagacatttcaaacatacctgaagtctttttactcattatcttgttaaagaatcactgaggtgcatgatttctacacatcgtgactgctctgctctgcgtttacaaaaccaacagcccgcgcaggtacctagctacctgcattcatgtgacatgtctggggaacagaagataaataaaggatcttgctgaaaaccagaaaaaaaaaaaaaaaaaaaagaaaaaaaaaaaaaaaaaaag

SEQ ID NO: 4885 - DNA, 5277 bp, Homo sapien
gtgggccgcggcggtggcggagactgtggctttaagagcgtgccgggagcccgagccccagccgggccgcgcttcgccgctgcgcaccccagcggagccaagccccacgctggccggacagggccgcctgtcgccgggctgctgagaactagccctagacctctgcgtgagggttcttctgccgaagacatcaccagtgtgtggagcctgccacacccacccgctgccaaaccacggcctttacctgtgtcttccggtgtttcccgtgcgacccatcctgtgggagtgcctcgtgggctgccccagagttcaccccacactcagcagcaccaatggtgaagatgacaagatcgaagactttccaggcatatctgccctcctgccaccggacctacagctgcattcactgcagagctcacttggccaatcatgatgaactaatttccaagtcattccaaggaagtcaaggacgagcatacctctttaactcagtagttaatgtgggctgtgggcctgcagaagagcgagtgttgctaacaggactgcatgcagtcgcagacatttactgtgaaaactgcaaaaccactctgggctggaaatacgaacatgcttttgaaagcagccagaaatataaagaaggcaaatacatcattgaactagcacacatgatcaaggacaatggctgggactgattggacagcatctacccaacccagtgtccacgtgaacgccattcaaccgaacattcttcccaagcgtgagagagtgactgacacttggttccatccatttaggggccttgccatccggggcatcctcccaccctgacgccatctttctggtgaccggcctctaaatcgctgtctctctgtctctttgctttgtatctgtttgtgagttgatcctggcttctctctctgttctagttttggctgaaaacaaaacaacaaaaggaacagatccttgaccgcatggcggcagcccaccttggtaagggccccagggcccatgcgagagctgcctgatggcctcttgtcaggagagcagtggcacgggggcgtgaggaagagggaaaggggaaactctaagggtcctggcgcggggaaggggtggaagggtggaggtaggaacaaaattgcgccgctcctggagacctgataacttaggcttgaaataattgacttgtctaaaaggacaaagagaaaaaaaaaatacctcatgactgcattctctctgactagaagcttctgttcctgacaccaaatgtgccaggttagcaaatgagcacaagatgtggccctgattctagttggtggggcaagggcctggttctcctgggctgagtgggggagtgtcctggcagcagcgagtgacctgggcagtggccaggtgggtgcgatgactctgatgcctcactcagtctctgggcaatcatcatctttgcctctagccaccgtagataaggtgtgaagggactgctgtttgcaatgggcttaccatccaaatatcccaaaggctttgaccagcaaccaagtaaaatcagtaattgaggagagcagggcacaaaggggctgcagtttgggagctcctgaagaaatggctcagatattgagtcagagaaataaaaagtaggatcagttagcaattctaactgcccttccttctgacccctcataagaggagtgtggtgagggaggggactgggtaggggtcatcccaggaggaggggtttacattggaaccagttcaggttcggtgcatctttcctcttcggttttacagtggcttccgtgggatcgtcaatttcttgttcttagagtttcgggtgtttttctccagtcttgttactgtagactgtagaaagcacgggccccaggctctgagcttagtaataacctggctggtagattcctcatgcccctaattgtcccacttaggcctgaatgtcttgcatggagagaaatctcctgtcagtgtggtccagcagcagggaggagttctgcccaaattccgatatcaccccttcccccatccaaacatccttcgattagggaagtggagagcacatccctgtaaggcccataagagaaagaggagtttgttacatttaatcaacactgtgaagtctgttctacagcaattcagccattacacagtatatgactgaaactcatttaactgggttaatttcatttcttagactgaatatattattgttaagatacgtgtgcgtgttaggtaattctcagcatctcctccaagtaggccgaccttctcggaaaattcaccctaaaagtctcacaaaagaatgagttcatggggagattctgtaaagtgatgaactgagatgaaagcagccaacagcccaggagcttttcagaatagcgtctgcagcagaaccagtttccattcagagcgcgtccttggtggaaatgcttttttgtgtgtctccacgcgctgatggtggaatgggagccccaagacgtgtgggcttagaaatcaacttttgttccccaaggcttcttgtccagatctttccagtgctttcatagccctgggagatcaagttgttctccccactttactgcaaggtagactgaagttcagaagaaatactgaatttctgctcccagaagaatagtttctctggctcacaggcccaagttctcaatgaaatcgttttttaactttcacattcctaagctggcttcccgtgcacagaagccatggatttcccctctctcccttccccctcctcaaggaaatagtcttcctttatggattttcattggactctttcctcagcgattgtcctggctgtttattgatagtccttcccataagaaaatggggttaaacatggggtaggtattttgtctttcaaactacaaatggaatgtggtgacataaactagacatggggtgccctcaagtttccaaggggaccaatgtgccactgttcttccttggggatgaggcctttgactgttggatggatcagagcaggctccagtcagaccctggttctgaatgttttttttttcggtgactatccagtgagccttcagtgggtgcaaggcgccatacttgctgtgagagagctgagtagagtgttggtttttccataactacagggggaaaaaaagtcattaggctttccctttgtgtcagtgaaaccaaaagtgcttcttacaacgttcgctctgttcatgggttgtctatctaacattgagcagcattggagaggccacagctgagctatggagatgctaaattaactcatggcctcagtcagttcattctttaatttcctcaccaaattattgacttagagcataaccaaagacctcattcattcaccccaggtgggttgggggaattggagtttgttggtgaagtttgggggcggggtgtggggagtagagacagggtaaggggacgtgagaaaggaaaaggcatgaagttctatacctcagccagcagctgccttcgtttggaactgaagtccagccagcagactctctagctccatctcccctgtgccaccctaggtcatatgaccttggccaccttggagtagacccagacccctcgggacccgggacattagtctcaggctgctgatggattgatttgacatgaaccaaacacagccaaactcgatacccacaagctgtcagctgaacctgactgagtgttcttcctgagttcacgaggataggctagagtgcatttttactggtggatcagtgtgtgcgaaagagatgaccctttataaagagattttcaagtggatatatataaaagaaacagttgcttgtaaaatatacttttgtaaataatatttaattttttaaataatatatttggtgctgttttctcagatcccctgagagcactttttattttccttttaaattctatggtttcctttgcatttcttgaagtatattttaagggaaacagtgatcaccaatacatgttttcagttttttttttttaaggtctctatcactttaatctggatcaaggctttgaagcaatgcctctctgcattttttccccagtggaacagactctgcagtacattaatcaggttgagaattgaaatattttcttgcatcagtattggctagaaaagaaaataaataaaaccaagttaatttagtagtaacaacttacagtgattcttcctgttggaagaatttgcaacaaatcagaatcacgtttttagttgtgcgtgtgcgcgcacacgtgtgtaaaaagcactttcgattgtgcctcctgttttctcgagtggggacactttaactacagtttacacctcgggcgcataaagtttttcttctctttctctctggttgtttctgtttctgagtggaccaacagcagaacccacgaggatttgttttgagtatggagctgttgcgggtttgctcctttttcttgctttgcgtgctcagtttttacagactgtaaaggagatgtgttgtttgtgaagatggagcagagtcaaatctgtgcttctaactgagatgagagtgtattaatcacgtatcgcagggctccagctgttttagaagccacatcatgttaaacattaactggtttggattaaaagaacattaatattataatacacatatcttagtggtaaacagctttttttttttaaggtcagattgcctcaggtttagaaagaggctgagaaatcaaatcttgaacacaatcaacttacatattttaaaggaatctgcctcaaatgagaaaatatgctagttatctagatagaggaaagagatatttacttttttaaaaattaaaatagttatgaaatctggcagaaaaggtaaagcctagaagaaactatgaaagctattctcatgttaccaaattctatctgcgcatatgtttttgtataacatttcggtgacagtgggagtcggttccctttcccaacctgcagagactatcttccaatacagaatctgtctatttatgcttgtgtttacaaactgtatttgttgggtttgggtttttgttttctttggtggcatttttcaggtcactttgcttctataacaaaggtaattgttttcaaataatttgtcttcaccttttcctgtatttgtacatagtgattcagtattagagaaaagtgcattgtttctgtcatatttccaatctgtgttggtgctcatttgagaaaataaaagttttcaaatattacaaaaaaatctatgtcgggtgcggagaaagaggtaatgaaatggcagg

SEQ ID NO: 4886 - protein, 112 aa, Homo sapien [sequence omitted]

SEQ ID NO: 4887 - DNA, 3648 bp, Homo sapien
aaaagagacattgtaatgaggcacaccactaaagtgagcatgcccaattaaaaccagtgtaatataggataagaaaatctgatttttcaaaaaagatactctacataaagaatccttcatataaaaagttctttcttgtagtacatttaaagttttaattcactcatgtataactgagagttcctttgagccctttttaggcagggaggcatgtctgtcatctagcgtgtggcccagtaagtgattattacattggaatcagtttttcagtcttttaaaataaattctatgccataagaataaaagataaagagcaaaattaatgttaactatttttagcttattataactatgtcaacaagtgtttattaatacctattatgggaaagtcactgtggttggcattgaaaattacatcatctttaaagcagtatttgtccccagatggactcatcactagcaaagactaggttcattggaaggcatagggtgagagaatgggaagatggagtgraggcgggttgttaaagtgctgtcagtgagtgattttgtctacttgaataatggtccatgtttgggggcatattgtgtttcataagaagtgaaaggtatttgcaaagtaagctacaaatgacccataaatctgttaacaacagtccttaatatgcaaagatgaaaaccaagcattactgctacccaaagggaactggtgcttggtgatgtgcagatggggctgttggttaagagagctattacaggttttctctcttaggtttcataggaggtagttactgagatgagattgttttatctttttgaatacagatctcttgtcttgagttagttctgaggatgggagtaataaaggagttttttgtttttttgtttgtttgtttgttttggctccttagtaatactcctctgacatttatttctattattcttcaaagaaaggaaaccaactgaaatgtttgctttaacaaacattttaataagttctctgggtttttttttccccttttaaaaaaattagcatataccatagcaataaaagaactaatgttaactattgtatgctacaacttaagtgatttttctaaagaagcacaatgtcattgaaagtattattgaaaaggatcatagtcacattgaatttgtgaaggccaaagaaattgaagggagtgatattttcattttatgatattcacattagtaaattttgtgtacaagaataccaggcagagtgttttacccatggaaacaggtttcagattactttgtttttactgttagagtctcaagtttagaaatgctaacacttaaatcagtttttttctcactatacttgaagattgttaatattttgatatcttcctagcttgatgaatttaaacatatcttcagatctgtgacagtgacagccaataggactgataatattagcttcaaaccaataatatccagggttaaaataaaaatcatagtgaaagtacgattgtaaaattatgctatattaacttttaagtctgtaataacttgacatcaaaatgttatgtaattaccataaataatggctagcgagaacatctttggaaattctcaaattacctttcttactacactgtttgcagaatgaatgtagaaatgatcctgttagctttctgaatgttctgtgggttgaatgtgtttttgcttaaataaagcttttggtatttgtttaaattacacttcttgagaagtggaaattttaggatcatctttgctttgtttcagttttgtgatttttgaaatgaatgtttagtttactgagccagttggtcatttcttcctcatgtcgttaagtccagtgagtaagcctgaactgtgaataaattaccaaaaacttgcttagaatttcattttgaagcaatttgctaatatttgaagtgtatacacatttgtagttatgttaaaaattgtattgtactaagaatgtaatcaatgtctactttagttgtaaacatttctgatgtcaaaactttattcattactgttgattttaagaataagaaatcactgcctaaatattaccaaaagccactgtctctacccgaacttcccagtttgggaaagaatcgttagataaaacaaaggctctgccctttctgataccaaactccacagatactttctcacatcttttaaaacattttgcaataacatattgtttataggaagtttacagggtatgcaatgattaaaacttttaagtgaattgatagttgcaaaagaaaggataatatttaaggtcagtgagtagcaagacaatctaaagtttctgtaatatctggctctctgttaattatagagcaaagtttcccttacagaatccttttatgaacagcaagctagagtctatccctagtggttatagcacctgctgcgtttttcaggagacagttaggccagggtgatttgaatggatagatgtgctgttttgcctgcttgtagaattcagcccagtctttggtctctctctctctctccctcctccacctctccctctctcttcttctgcaccagagcctaaggctgcgccaccaagatgcgtcattttttccagaggcttctttttttttttttttgagatggagttttgctctgttgcccaggctggcatgcagtgctgcaatcttggctgactgcaacttccacctcccgtgttcacacgagtcttttgcctcagcctctggattagctgggattacaggcacgtgccaccatgcctagctaatttttgtgtttttagtagagacggggtttcaccatgttggccaggctagtctcaaactcctgaccttaagtgatctgcccgccttggcctcccaaagtgctgggattacaggcatgagtcaccgtgtcctgcccagacatatcaaatttgacaggtattgtataccctttggatctttaggaattaatttttgcctctgtcactcagctttgtatattttgaaatggagataagtatagggaggtcttggaaggaaaattgccagaattcccaaaccatgtaacactcattgagaattccagatccattatatctaaagggcaagtgaaggaaacagtattgtgaactgggtataactccttggttcttaactagtacattcttaatctgtgagacccaaaggttgataaacaataatttaagattgtacagtactctaaacgtctgcaaaggtctagatgttatcagtatcactagtttttatttctgccagtagctcccttttaggttacattgttgtcctctttccagtgtggcatctgtcattggtttttcactatggcaagttcattaaaaagcttgctccattgttatcttcaagtaatgcccataaggagatggaagatatctgagacaattaaggctttagcttctaggcaagagaaataacgttgcattaaatttcaagtttctttctgctagacttgaatgtgtctagccactctaatttatgggggcttttggttttttcctattgtactttgtatgtagaattgttttgaaatatcaagcatatttactttgaatttgaactctttcttaattttgtatttatcctttgaataaaatgtaaatccaaaaaaaaaaaaaaaaaa

SEQ ID NO: 4888 - protein, 20 aa, Homo sapien
MCLATLIYGGFWFFPIVLCM

SEQ ID NO: 4889 - DNA, 720 bp, Homo sapien
gccgcgcaacgcacgttacacgcatcgcggagggagcggaggtggttgggtttctgagtttgagtctgtcgctcctggctctcccgacacaacagcggcgcccacctgcccgcaacggactcccaggagcctcgagctcctcatttccaaagctgaactgccccgtgtctgattccgatttctcttgagcgcgtttcggagccggcccagaacagagggaagccagacacaccatacccggcccaacagtggcagggcggctgcgggtgctggtcaagctgggtcacccggcactgagtgacgatcagcaaatactcagtggacgaaatatttgcagtgcagtgaggtgaggggcataaccgcggagcgtattcgaagagatgagagagactggggattaggccaggcttgaagggaagaatggtttgagcaccgaggacaagaattaattccccaggcctgggttccagccttgtgcggctatcacgtgcttgaaacctggctagtccggagtgagatgcgctttacgtgtaaaatacaggattccaaagacgtcgtataaaataatttgtatattgtttgcatgttaggtaacatttttaatgtattggattaaataaaatgcattaaactaaatattacagttaatgaccgcgtttacacgtgtgactgagacaccctgcgtacccactaatcgcttgagactatcccttggcagcg

SEQ ID NO: 4890 - protein, 24 aa, Homo sapien
MTAFTRVTETPCVPTNRLRLSLGS

SEQ ID NO: 4891 - DNA, 3097 bp, Homo sapien
gctctccctacgttgcaccagctggccaagggggctccctagaggtcatctcgtccaagccctgtctgtctggtgggccttcagggagcctctgcgtacctctctcgtgaccaactagcttagtctgtaggggcacctgttttagagcccaggcccagctctgcaatgaatgcagaaaagagacaaagcaagatgggaggtactgtgggggcttagcaagggggacttacatagcctggaaagagggcggggcactggacctaggggctgaggacttagattccaggcagaggatgcagaggttgagcaaaggctgagaggtgacagggaaatgatgaattgggaagtcagagcccagatgataaggccttgaccgccagctcccctatgcccttgtccctggcagggtatcctcaggtccgagcccctggacagcagccccaggcccagctggccatggccctgtgcctgaagcaggtgttcgccaaggacaagacgttccggccgcggaagcgctttgagccgggcacacagcgctttgagctgtacaagaaggcacaggcctctctcaagtcgggcctggacctgcgcagtgtggtgaggctaccacccggggagaacatcgacgactggatcgccgtgcacgtggtggacttcttcaaccgcatcaacctcatctacggcactatggcggagcgctgcagtgagaccagctgcccggtcatggccggcgggccccgctacgagtaccgctggcaggacgagcgccagtaccggcggcccgccaagctctctgcgccgcgctatatggcgttgctcatggactggatcgaaggcctcatcaacgacgaagaggtctttcccacgcgtgttggagttcccttccctaagaacttccagcaggtctgcaccaagatcctgacccgcctcttccgagtctttgtccatgtctacatccaccacttcgatagcatcctcagcatgggggcagaggcgcacgtcaacacctgctacaagcacttctactacttcatccgcgagttcagtctggtggaccagcgggagctggagccactgagggagatgacagagcggatctgccactgagcccaggtctggacttttttggccatcagatggacgatctgaacatagggtggctggcagaggggacccccaggagcctgaaggaatctgaaggcactggaatcactccacacacccaaagcctctggacttctggttctcaggagtctgcctacctgtcgccctgaccgcttgtggatggagaaggggagagcatctaggcaggcaaacagaagggaagtggagttaaacctctggcatgaagtctgggagtagggtaggctagggggtttcttctatgacacttgacccttccatgctggttcccaagcctattggaggaatgtgggtgtggccgaggtgatggcaagaaaggtgcaagaaagtgagcagtctgcctgtgagtgagcacagatgccggggtgtgtgtgtgtgtgtgtgattttcactgtggggtgtgtctgtgagagctagctgccttacccctccttggcacatagtaggccttccataaatgttggatggatggataaatagattgggaccatcagaccatgaccactgtaggagtgatgacagctcagcgtccccactcagtgtatctgaccatgtgtgtaagtgcacaaaaatgtggttgtagatgttgctctacattcaaaccttccaggctacactcttccatcagcatgagtcctggagagctgggggaaggtaggaagaggagccttgccttgagttcctaaaccgacccactgcagacacaggctctgattctcttacccagagatgcccatgagctgacattttactcatccctctgcctccaagaaggcctgtattatacgtgtcctcctgggggttggagatgatccctcaagtacacaaaggtcccctggcccttcatctgggaatcatatactccactctagctcccagaatctacagacctggctcctcggatctgaagcccagcacaaaataatctccccgtccaaggagcttgtggaacttgaattgggaactttggagtcttgtctcccatcccagcacattgaggatgtagttggtgaatggactcttccaggcatggagatcctccatcctaaaagtacctgcctccttcccagccatccctgacacattccagccagttggatctcacagcacagctatccacagggagactgggatgttcacgcagcactccattactcagtacctccatacccagccctatacgcagacccacaggtggggaaactgaggcaggaacagggttctgccctcccagagcctccactctgggatgccagaatggaaagccagagggaacctgagaatcatccagtcttactgtctcaatgtacatacggggaaactgaagccaggagaagaagagggagaaactgtccagggcctcacagggaggcattcatggagctggagaaaccagggatcctgaccgcagggcccatcaattgctacatagagatacacatggaaagagggtttaacagaccctctctaggacacaactgtttctgctttgagcaataatttctaacctgaggccaacatgtcccactgccccttgggttggctggggttgtttcctgagccaagcatccaatatcatgccccactcaatggcctagaagctgcctgtactttggggaaacagatggagctcttgggcccagccagctgggcctgggacttctgcctctgccgcctccagagtggcctggcagctttgccagaggctgtggagcgagggtagtaggagcttttcccagagtgctgtgacttgcatgatggattctaggctgtggcaagggctgatttctgggatagggggagggttggaaaatttatttttatgaaacagagggaagactttattgttgttatttttggtaaaataaaaggcaaactaaagcagccactggtgggaagcggtgatctgggtgcaacatggctcttggcagaccatggaaggaactgagccaga

SEQ ID NO: 4892 - protein, 239 aa, Homo sapien
MPLSLAGYPQVRAPGQQPQAQLAMALCLKQVFAKDKTFRPRKRFEPGTQRFELYKKAQASLKSGLDLRSVVRLPPGENIDDWIAVHVVDFFNRINLIYGTMAERCSETSCPVMAGGPRYEYRWQDERQYRRPAKLSAPRYMALLMDWIEGLINDEEVFPTRVGVPFPKNFQQVCTKILTRLFRVFVHVYIHHFDSILSMGAEAHVNTCYKHFYYFIREFSLVDQRELEPLREMTERICH

SEQ ID NO: 4893 - DNA, 1086 bp, Homo sapien
  Unsure 763-881: Unknown base
tcaagggcctactttatggcagacattgtgctagtgcttttattctaacttttatttttatcagttacacatgatcataatttaaaaagtcaaggcttataacaaaaaagccccagcccattcctcccattcaagattcccactccccagaggtgaccactttcaactcttgagtttttcaggtatatacctccatgtttctaagtaatatgcttatattgttcacttcttttttttttattttttaaagaaatctatttcataccatggaggaaggctctgttccacatatatttccacttcttcattctctcggtatagttttgtcacaattatagattagatcaaaagtctacataactaatactcacagctgagctatgtagtatgctatgattaaatttacttatgtaacttttattgtctttggcattaacagtgtttcaaaaaattttctgtgtatacccatcagtgattcattcccaaatcttctagaagcataagtgtctcaatatattaaaacatattgaataatccttgttagagttatccttgcaggagtccttagtgctcctttatccaatttgtacttgatgccctctaggcagggtgtacagctagctgttgctctggtatttcctataaccttcttggggatttcttttacctcctgtgttagactcctgttttctggattcccccttttccctctttcttggtctactttttgtagaacacaagactctactagcttcctgagaannnnnnnnnnnnnnnnnnnnnnnnnnnnnnnnnnnnnnnnnnnnnnnnnnnnnnnnnnnnnnnnnnnnnnnnnnnnnnnnnnnnnnnnnnnnnnnnnnnnnnnnnnnnnnnnnnnnnnngagactcgaagccactgtttcattgtcactattgagaatctaaatggccattcggattctttcatcatctttataattttaccttcctatttctttcctgtccttttaatggagttttgggagagagcagaggtaaacatgatttgaaaaagccatgtctgaccagaaattctgtgctggcaagatatgtatttcacctttaggg

SEQ ID NO: 4894 - protein, 144 aa, Homo sapien
  unsure 57: unknown amino acid
  unsure 58: unknown amino acid
  unsure 59: unknown amino acid
  unsure 60: unknown amino acid
  unsure 61: unknown amino acid
  unsure 62: unknown amino acid
  unsure 63: unknown amino acid
  unsure 64: unknown amino acid
  unsure 65: unknown amino acid
  unsure 66: unknown amino acid
  unsure 67: unknown amino acid
  unsure 68: unknown amino acid
  unsure 69: unknown amino acid
  unsure 70: unknown amino acid
  unsure 71: unknown amino acid
  unsure 72: unknown amino acid
  unsure 73: unknown amino acid
  unsure 74: unknown amino acid
  unsure 75: unknown amino acid
  unsure 76: unknown amino acid
  unsure 77: unknown amino acid
  unsure 78: unknown amino acid
  unsure 79: unknown amino acid
  unsure 80: unknown amino acid
  unsure 81: unknown amino acid
  unsure 82: unknown amino acid
  unsure 83: unknown amino acid
  unsure 84: unknown amino acid
  unsure 85: unknown amino acid
  unsure 86: unknown amino acid
  unsure 87: unknown amino acid
  unsure 88: unknown amino acid
  unsure 89: unknown amino acid
  unsure 90: unknown amino acid
  unsure 91: unknown amino acid
  unsure 92: unknown amino acid
  unsure 93: unknown amino acid
  unsure 94: unknown amino acid
  unsure 95: unknown amino acid
  unsure 96: unknown amino acid
MPSRQGVQLAVALVFPITFLGISFTSCVRLLFSGFPLFPLSWSTFCRTQDSTSFLRXXXXXXXXXXXXXXXXXXXXXXXXXXXXXXXXXXXXXXXXETRSHCFIVTIENLNGHSDSFIIFIILPSYFFPVLLMEFWERAEVNMI

SEQ ID NO: 4895 - DNA, 1956 bp, Homo sapien
aatcccaatttattttctaactcttttattggatgtatttagaacacagtatacctatagtatacctatgtgtttattatgtttgtaaatggtaactgacatttaattattagaagtacttacccctgccttcctccatttttattcatggctacttgagaaagcaaaaggaaaaaataatagttatcagtagtgtcactggaaagaagagaggagggacaaaactgagcagcagaattcgtatagacatttacgtttaaattctaaaagcccaattgagatgttcagggagggtttgttttgccctttggcctcatgaatgggtttcatgaatgggcttcagtggcttataaactctgtaaaattctattctaaattttgtacatttattttgttccggttaattccagaagacatttcaaacatttttcttacaccatataataaaaatacttaactaaattgacagttataaaaataaatcagtgaaatgtaccttatactttaataaaaaatgttttcagaaatagataagtgaaagctgagtgtttctttgataggttcccctgtactataggagtgataattgcagctattgcaatagtagtaattgttaaatggatactaatgaatagcatagcatagtgggtaagagtttatatagcacaggctctagaatcagattaagtaggttcaaataccagttctgccagtaactggttttagaaccttggggcaagttaaagaatgtctcccagcctcaagtttccctatttgtcaacaatggaaatatggtagctacctcaaacctcattacgaattcaatgagttaaacttgaaaagacttattacagtagctggcacataaagacttgatagtagtttatatggatgctatctcatattagcatatatggaattaatagtgtatcactatactttttttttctttttttttttgaatagagatcagtctatcacccaggcgtggagtgtgcaggggtgacattcatagcttcacgttgtaacttcctcccattactctaccaatccttccgtgcctcagcaatccagacgggcgtgtgatgtgcagggtgtgcaccaccacacccagctacatttttttgtgggataaagagcgggggtctcactagtgttggcccagttcgtggttctcgagctccgcggcctcaagcaatcctcccactggcctcacaagtgtggggattacgggtataagccacggcacacggccttactatgctatcaattccatatatggaaaggtgttttccctttcagagctctttaaagctctgcagaagatttacatgtgtttatagagctaagagaaatcagggcatggaaattgagtgtgtaataaaaattaaactcttcatgttatataatcatgcataacttctatcttcattctctgaagttgcctagagcaccatcacagctaggaagcttccatcatgaattaccttatttccaaaagcaagtactcaaataattgtctcaagagaggaaggacaaaactgttacaagctgaaatatttggggatttgtttgacttgactagggaaccacaagttttcatataatgcctgatttagccctgtgcctaacagtttaaatcttaatgctaatgttaattgcttcccagttggttgaccttataagaaaacactgtgtggtattttaatgtggtaaacatgtgaatgaaggcctgtggctcagttaatcactcccacaactttgagctgtgagttttactggtggaaggaactttaacaggtcttcgctcttgtcattagatatcaaagaactgaaattagttggaattgtaagcagtgaatagatgtgttgttagaatgattccatcacttatacattgtttaaaatgctaataaagtaacttgctttgtaagaaagaaaaaagaagaaaaaatt

SEQ ID NO: 4896 - protein, 28 aa, Homo sapien
IPIYFLTLLLDVFRTQYTYSIPMCLLCL

SEQ ID NO: 4897 - DNA, 1898 bp, Homo sapien
agctgctggctgggctgcctgttgagtcagccttcttccctcacggctcttctcccggtccctgaaactcggctgccaggggagctggagccacctgcgaaggtgtcctcccatactggacccctacaggaagctccgtgtgcccagctggggcacagccccagctgatgccccagaggggccacccatcgcaagaggggctttgggctctgccctccctccccatggcgcatgggccaaagcctgagactgaaggactgttggacctcagcttcctgacagaggaggagcaggaggccattgctggcgtcctccaacgagatgcccgcctgcgccagctggaggaggggcgggtcagcaagctccgggcctcagtggcagaccctgggcagctgaagatcctgacaggggactggttccaggaagcacgctcccagcggcaccacaatgcccacttcggctctgaccttgtccgagcgtctatgcgcaggaagaagagcaccaggggagaccaggctccaggccacgacagggaggctgaggctgctgtgaaagagaaggaagaggggccagagcccaggctcaccattgatgaggcccctcaggagaggctcagggagactgaggcttcagatcctgaggaggcgtcccaggcccaggaagatcctggccaaggagaccaacaggtctgtgccgaggaggctgacccggagctggagcccgcgtcggggggagagcaggagccgcggccccagcaagcccagaccaaggccgcgtcccagatcctggagaatggggaggaggccccggggcccgacccctctctcgaccgcatgctcagcagcagctcctcggtgtccagccttaactcctccacgctgagcggcagccagatgagcctgtcaggcgacgcggaggcggtgcaggtccgcggctccgtgcacttcgcgctgcactacgagccgggcgccgccgagctgcgcgtgcacgtgatccagtgccagggcctggccgccgcccggcgccgccgctcggacccctacgtcaaaagctacctcctcccggataagcagagcaagcgcaagacggcggtgaagaaacggaatctgaatccggttttcaacgagactctccggtactccgtcccgcaggccgagcttcagggccgcgtgctgagcctgtctgtgtggcaccgcgaaagcctgggtcgcaacatctttctgggcgaagttgaagtgcccctggacacgtgggactggggctctgagcccacctggctccccctgcagccccgggtcccaccctctcccgacgaccttccgagccgcgggttactcgccctgtccctcaagtacgtccccgccggctccgagggcgcaggactgcccccgagcggggagctgcacttctgggtgaaggaggctcgggacctcctgccgctgcgggcaggatccctggacacttacgtacaatgcttcgtgctgcctgatgacagccaggccagccgccagcgtacaagggttgtgcgacgcagcctcagccctgtgttcaatcacaccatggtgtacgatggctttgggcctgctgacctgcgccaggcttgtgccgagctctccctctgggaccatggggccctggccaaccgccagctggggggcacacgcctcagcctgggcaccggcagcagctatgggctgcaggtgccctggatggattccacacctgaggagaagcagctgtggcaagccctcctggagcagccgtgcgaatgggtggatggccttctacccctcagaaccaacctggcccccaggacgtagccccaccaagcctctctctctggacccccatctcagggcctgcccttggctaaagtcaataaagtctattctaagagc

SEQ ID NO: 4898 - protein, 550 aa, Homo sapien
MPQRGHPSQEGLWALPSLPMAHGPKPETEGLLDLSFLTEEEQEAIAGVLQRDARLRQLEEGRVSKLRASVADPGQLKILTGDWFQEARSQRHHNAHFGSDLVRASMRRKKSTRGDQAPGHDREAEAAVKEKEEGPEPRLTIDEAPQERLRETEASDPEEASQAQEDPGQGDQQVCAEEADPELEPASGGEQEPRPQQAQTKAASQILENGEEAPGPDPSLDRMLSSSSSVSSLNSSTLSGSQMSLSGDAEAVQVRGSVHFALHYEPGAAELRVHVIQCQGLAAARRRRSDPYVKSYLLPDKQSKRKTAVKKRNLNPVFNETLRYSVPQAELQGRVLSLSVWHRESLGRNIFLGEVEVPLDTWDWGSEPTWLPLQPRVPPSPDDLPSRGLLALSLKYVPAGSEGAGLPPSGELHFWVKEARDLLPLRAGSLDTYVQCFVLPDDSQASRQRTRVVRRSLSPVFNHTMVYDGFGPADLRQACAELSLWDHGALANRQLGGTRLSLGTGSSYGLQVPWMDSTPEEKQLWQALLEQPCEWVDGLLPLRTNLAPRT

SEQ ID NO: 4899 - DNA, 434 bp, Homo sapien
tcagtctttgaattaaatgcgtttttttcttcccttacagatgattttttaaaaaatgaaattcttgaagagctgcaccttaaaaaataagacaaagtgaaagtattgtattatgttacaaacaatgcaggctccttcctcatttaactttacaaccttgcgaagtgggtccaggagatttggagtttgtggtaaagccagtaatgggcattgtcctgcattcccttcccttcatggtttgcctcgatcctctctaagcttctatcctggcctgaataactcaaagataattggtctcagagatcaagccatatcctcaggccttatttccatcttctcatgattctgccatcatacctttgcttctccgctaatgaaatgagctggcaagacctctgttcattgggaagtgcttctgaaagagcctaagaaaa

SEQ ID NO: 4900 - protein, 29 aa, Homo sapien
SVFELNAFFSSLTDDFLKNEILEELHLKK

SEQ ID NO: 4901 - DNA, 4351 bp, Homo sapien
gacggggcggggcgcagccttgcgaagccctaacgcagcgctggggaggggggcggccgaaaggggggcggtggtcgggccgcgcaagcggagatggaatggggcccgggctcagactggtcacggggggaggctgccggcgtggaccgcgggaaggcggggctggggctcggcgggaggccacccccacagccgccccgggaggagcgcgcccagcagctgctggacgcggtggagcagcggcagcggcagctcctggacaccatcgcagcctgcgaggagatgttacggcagctgggccgccggcgcccggagccggctggtggcgggaacgtctcagccaaacctggagcgcccccccagccggctgtctccgccagaggcggctttccaaaggatgctggcgatggagctgcggagccctgaccatccccgagcagaataccctgacttctctccctccccagggccggtggctggactctgaacaactcccttcagtaaaggggccagtcttcactggcagtggctggtacttggctctcagcctggagtggcagctctgctagcagctgggttcactcccacttcatcctggctgaaagcagtgctgtgctttgaaatgcagccaatgaatacccagtctgattacccagatttgggcagaccagcagtgctcgccagagtggtctggcctgctatgggggatccaggtggtgttacatgtccatttcatgttttgggggcttttagccccacaaaacaccttcagtagagccttgattaaaaggaaacctgcagactctcctggtgaccgacgtttcctttctgtcccctctccaagactgatggctgggaaggggggagtggtggaaaaatgtcaactatgggcagggttggtaagaaatgccacagatactaccagatttaaataagcatttaattaggatttcattagtatttaatattgctttttcaattccaaaaagttaaattttcactttttagcagatattttaaagtacaatattaagtttatacaaaatgagcaattaagcaaacaccattatttcacattcttcaaaaatacaaattcatatttattcttttttgggtttggaggtttcttcctttggaagtactgaacctgtaacgttttcacatcgctcagtggaagtccgttgttcccatgtttcacacttacttttacataatccaaataaaactatttgggattttaaaagttgtcaccaagaccccggccaatgattagtgtatgtcaaaaaaaagggctcttgggggctcttgcctttcctggctagaagatctgagccagaaattcagcaaaaatctgtttccagccaccctccccaaatagggactagaaagagttcacaggaaaagggaacagacaccttgaactctgacccccacccccacattctccaaaacacaacgaaggatgtagactgttgagtcaaacagcccttgggaggcctgagaacacagcaggaaaagggcaagagaaagcctctgacttggcacactacgaggataacaaggatattgcaaaaaacacccctgggttttggtgcaaaaaggttttatgaaaaattttcccataagaaaaagtagaaactgcattgagctgagaaagtgacactacattatcacccaatttttggcccaacaggcacaccaccaaaagggcagtgtgtggttttaaacctcaattccagtaaaaaagcttgtactatgtacacattgacataaagatccagtttaatttgcatttttcagtgcagactgagaagccctctcttgaacaggagtaacagtgagaaatgcccagtggtcgtcggcttccccaaagggcatcagaagaaatacaggactgtttccctctctccctaaaaaacatgcaagaggaaacaggccaaaatggctaaccaatcagaaatatgcttcagttttgttgcctccacccccaaatattaaggaacagacaatttctgatctatgtcacagcagaactatttgcatattggatctatgaaaatctttctgctttggctgaagtatattctaaaacttgtctattctatagcctgagaattgaagataaaatgggggaggtggagtaaaggaagaaagttgataatgattcatgggatgtaatgtttgtttataggatttaatgaaggctggaggcctttttgcttaaggaaccaacacaggtagtatggggagcagtatggaaatggctcatgttgccccctgccacccatgcctccccaaacatatttctgattggtggtgtaagacaattgtaaactcttgagaaatattgttgcagttccacaaatcaatggtttcaatcactctggaaaagtctttaaggacaatggatgtgattacaaatataaaagtctagaaggtgccaggtttctacctaggaacaatctgttccttcctttcaggcatcattttgtaatggtgaagagggaaaagatggcgagagaccaagaagtgatgaaaaagggcctcaacagtcagcagaaaacaggacccacagcagttcttcagagagcctgagggggcgccctggggcacacagggaaggcttgcatagattgagcggttgctgagaatgcataatagtgtttccctatggacagtctcacagcacagggctgattgagcggaaaaacgctgccaggccagggccacatgggacaacgaccatcaagctacacatattgcaccaaggtaagtgcttttcttttcacacctcaatttaactttttattctgagcaaaaaataaaactttgtggaaagtatatatatgtatatatacacacaaaagaaattgcagcaatcgggttaaagataaaataacctaaagtgcttttttattttattatttctttaatataccaatatgaggttctgcaaacttgtccctctggacacattcagcattatacaaagtctctcaggaaaacccacccaccctccaatatccccatcagtccacagccttgaccctgaaaataaaactctccgatctaccaactatcccagaggtgaagaagagaagccccttgccttttactcagagagatcttcacatcttaaggcccctcctgggctttgtaccatgatctccttctaaacggaggtggaattcaataaatgacaccacttctgtcaccaaactggtggtgcccccatgagactggccagaccctgccagcaaagactgggccaccttccctcaatgcccaacctacctgcctgggaagggccaagttcactaaggcagtttggtggtgccagccagtttccttaccacctcctaagtccatgaaccccaatccctggtgctaagcaccctttgaagcggttgtctaattggagatgttagtaggagctagaagataacgtacagggtgaaaatggttaagtttactatgggaggggaaaaaggcttgatttttacctgctagaattctacaaatcctccctaacctcaccctaggttcatttcccaagtttgggaaaccacactcaccatgaaggttctttctggctccagcttagctaggggccctctcttctccaaggtcctcggcactagagaccaggcttatggaaggacaggtaggaaaagagaactggaaaaggagggaaagaaagactgcctatcctgggaaataaacctgatcttcacaaccactcactggcattttaagcacattcctgatttttcaaaagctgattggatctgatagtctctcttgtaatctagagtcaccctcaaaaggcagatacttcagcttcttcaactggaaaaatctgtcagcctaaacactgtttaagatgctgcttcgtcacccccgatctttgagagtgaaaaggccactgacctgggtagggcccaacatgagcacagccctggctaaccaagaagagtcgctatttaaactgtgggtgcttcagatgtccttccctgggctcctatttcccacttccgccccagggaacccaaatcccaggtgaccacaggatggggatatgggaaggtcattactgccctctgatacaagcttactttggggtcccatcactactctctcagaagttgtaaacagcaagggccctacctcaaaacttcccatgggtgcgaggcccagagacagccaaggacaactcatgctcagcagttggttttccaggaggactggaaacctcctgccttatcaacttctgctgaggtcaatggtcaacagaagccacaatccttttggggaagggagtgcagaaggtcaaaaagaagtcaattcccta

SEQ ID NO: 4902 - protein, 188 aa, Homo sapien
RGGAQPCEALTQRWGGGRPKGGRWSGRASGDGMGPGLRLVTGGGCRRGPREGGAGARREATPTAAPGGARPAAAGRGGAAAAAAPGHHRSLRGDVTAAGPPAPGAGWWRERLSQTWSAPPAGCLRQRRLSKGCWRWSCGALTIPEQNTLTSLPPQGRWLDSEQLPSVKGPVFTGSGWYLALSLEWQLC

SEQ ID NO: 4903 - DNA, 1438 bp, Homo sapien
  Unsure 932: Unknown base
  Unsure 934-937: Unknown base
  Unsure 946: Unknown base
  Unsure 951-952: Unknown base
  Unsure 955: Unknown base
ctctctctccctctccctttcttttctacattgaaatctgttcttacataatagagaacagggctattgaataaagacccaatcctaccagatctttagttctaaagggcaacttgactgtgagtaggagggcccccaagaaagggaggaaagtccacacccagctaaccacacaacagggcttcattatggaaatattttaacaaaagtacatgttattaccaaccaaagagatgcatgtgcaatagaagccttccttaaaaacaggctaaataacctcattttatgcagcagtttaatctgagaacagagggaaaggtgtgcagtggttccagaggggccttatattctatttttagtctagatattttttgtttataaattcccaaggaattgttaacactttggtgacacctaatggattctttttgaaattccaaggtgcttcagttctttgcccaagtgaactgtgccttttattgcatttctgttcgtctcttggtggctcttctgactttttggagaatacccatcttgttggaggcagacttaagttgttatgctgtgccacacaatttactgagacaatcatatcttcctaagcatttaaggaaagttgaaaaaaatagaattagctataaaatatgtatggcacatcttgtttaattttgcatgtaacttctcttttgtacattgatgaggttttagtgacattgtcatccaacactttacctttattgttcagggaatgccttcgtgattttttgtactggttttattattcagactatggcctggatttgagtatattgttattaccacctggttttttaattattcatcccagtaaacttatattttgtgaagcatttgtttctcagattaagacactgttagaacctaaagtagtagctgatgggtatctgtgaatntnnnnttttttttnttttnnacntgaagtagattgtctgaataggcatcctcatctatatttacccaaaacctcgcttactgtcatgtgcactacaaattgcaatttggaaacctactgtattgaaattctgtcagtttatggttcttgaagactgatgtcctttcccaaacactggttactgcagcagcatttttaatgtgtaagtgaagaaaaaaggccactaaggccaaagattttttaagaatcattgtacaaatcattatgttaaactatctaagctttgctgtaatactgttttctcttcaatatgtgatggtacaggaaggatgttaaatgaaggggtggtattgcaggagagcattttaaatggcagaagtaaaaagttataatatttataattttgatgggtttaagtttatttttgtagggaagatttttctcccctaaaatagtttctagaatggcaaaagtgtttccattattaaaaattgaagttattagttg

SEQ ID NO: 4904 - protein, 94 aa, Homo sapien [sequence omitted]

SEQ ID NO: 4905 - DNA, 1421 bp, Homo sapien
gaagcgccaagtgcgcatggggacgctatagcaattcgtttgctgtccttcctctccttcgaagatgacaaggcctaccatcgtttcttcctgcctttgggccgtcaggcagttggttgggacccgctccaaccctcggttcttcctgcaatacagtggatacaatttgtcatggctactctgagtgttataggttcaagttcacttattgcctatgctgtattccataatatacagaaatctccagagataagaccacttttttatctgagcttctgtgacctgctcctgggactttgctggctcacggagacacttctctatggagcttcagtagcaaataaggacatcatctgctataacctacaagcagttggacaggtgatagattatacttgtcgagttggtcaaatggcctttgttttctcaagcctgatacctctgctattgatgacacctgtattctgtctgggaaatactagtgaatgtttccaaaacttcagtcagagccacaagtgtatcttgatgcactcaccaccatcagccatggctgaacttccaccttctgccaacacatctgtctgtagcacactttatttttatggtatcgccattttcctgggcagctttgtactcagcctccttaccattatggtcttacttatccgagcccagacattgtataagaagtttgtgaagtcaactggctttctggggagtgaacagtgggcagtgattcacattgtggaccaacgggtgcgcttctacccagtggccttcttttgctgctggggcccagctgtcattctaatgatcataaagctgactaagccacaggacaccaagcttcacatggccctttatgttctccaggctctaacggcaacatctcagggtctactcaactgtggagtatatggctggacgcagcacaaattccaccaactaaagcaggaggctcggcgtgatgcagatacccagacaccattattatgctcacagaagagattctatagcaggggcttaaattcactggaatccaccctgacttttcctgccagtacttctaccattttttgaaactacaatactggaacatccaggaactggagttattctacgctaatggattggaaagaatgttgggaaaggacatcttaaatcttttctaactatgccctaaactgcagaactcaaaggaaatatagtgccattgttagtagtcattctagatgaattgggagtatctctccagttattcccagattcactagtgatccttaaagtctctattcagggagaggaagacactttccatctcagagatagactcgtgttaccttgatggatattggatttgtctaagtctcttctagaaaaaataaattctagattattatttaaaaaaaaaaaaaaaaaaa

SEQ ID NO: 4906 - DNA, 1882 bp, Homo sapien
ggaaagagatggccaaataattagtaatgtcttttaacattacgaacaaatatatcttagtactagaattccaatgtatttgttcgtaatgttaaaagacattactaattatttggaaagagatggccaaaataatcaactctacaggcttcaagctggtgggggaatgctgttactcattaatgcttttttactgaatggtcggaatcacatatgcaccacacatactgatcttaagtaacattattttatagaactgtttaaatgggtttaaatggtgttctttagatgaaatgtgttctgttttgttcattgtcttaaactgaatagggctgaataggctttatgtaattcttcatttcatggtagagtttgatgctgtgtttaagtgggttcttgtttataggattttcaactacagtttgaatgccatggaggaatttgaataatatattaatgaaggacatattcttgtaatcacaaatttgcatttgctcaggtttcattgctgtgtgataggatttttcctctaacttgaaatttaaaaacttttatttcctattccttttgtcggtaaagcagtctgaatttggaacattttatcatggagtcaacagtgaagactaccagataattttgtattggagaagaggaaataacagctaaattgtggatttcagtgctttacatggtgcctttcgagtcagcttttacattataggggcttgttatagtttagctaagatgaccacttaacagtttatacagaactcatatgtataaatcaacattcttaggatattatttatatcctttgaataaatccctgtgaagtttttcctccccactaaaatggtgcataataaaacatgaaatatgtagtatgcagatatcatttattagatagtttgtagtgtatacatttagaacatacttcttttgacaaagggtgatctgattgctaatttaccattttattctgtcaggtacaggtgaaacaaattctcatcttgaatgatcagatgcaaaatcatttctgaaccctagagcagaagttagaaataacaaaatggccgtttcaaccttgactggccaaaaataactaataaacttttttgttttaagtcaggcaagtgattttctacatttagcagtttgaaagtccagtgttaatgcaatatttctagtgagaaatgcttgttattaaaagcatgggagtgatagtgtgaaatggtggtgagtgcttctatcatattactgtaggtacttggactggtgcaaacttgattccttttcatccccctgtttaggagctattaaaatattactgttaaaaatccaaaccattctttgttccatgtaataagaaaatagccaaaatcactttagagcttctcaactatttatgaagagctatcctgcttttattgaaagtcactagagttgaatgtggtaagaaaccacttagcctatgtattggacgagaaaatcagtatcatgataaaattttgaattaagagaacccttgtagagtttttaaaaaatgatttattttcaattaggtttaagaaatctatgttatgcagggaggcatatcagatgaatgttgtagcagacaaaagttttaaatcgtgttagacttgaattcatcaattgtttgaatgagggtgggtgggtagaaggataacaaaattactgttagtgtttctttccttacggaaaaagatgtgaatcccagccttatttcagggaagcctttgaagctatgatggacataagtctaaattaaatgtatgtatgtttcattatattgctcttaagactactgaggtggcagtttaattcttaaaaacaataaaatggaagcataaatactaaaaaa

SEQ ID NO: 4907 - protein, 11 aa, Homo sapien
ERDGQIISNVF

SEQ ID NO: 4908 - DNA, 2378 bp, Homo sapien
  Unsure 555-819: Unknown base
ctttcactaatttttggcagagttcacaatcccatcctatgtcagaaacttgaacctaacttaagaaattttgagtcatttttttggaggactgaggctttgttctacctactcttgaagaatcctgatgaaatattcaaacacataaagggatggccctggaggtctatcctgcatacctggagagcttctctggtcctgcccaccttgaaagttgcagactttgttgtaacatctatgtgatgagcttccctgtgaagccccatttgacaggtgggccagcagtgttttatcagcactctgatggcccacatttcccaggaaaacttcttgaaacttaccgttgtgggcagtggtcagagcgtgtagttcttatgactgtcttgtttcatctgtggagcacgtgtggagcacgttggtacagcagtttctgtggggtttggcatgggtgattttggttagtaaccatcctccaattgttgcttgtgaaagtcattcataacttgttccttttacttagttttgttgttactgctgttgttgtatggttaaggnnnnnnnnnnnnnnnnnnnnnnnnnnnnnnnnnnnnnnnnnnnnnnnnnnnnnnnnnnnnnnnnnnnnnnnnnnnnnnnnnnnnnnnnnnnnnnnnnnnnnnnnnnnnnnnnnnnnnnnnnnnnnnnnnnnnnnnnnnnnnnnnnnnnnnnnnnnnnnnnnnnnnnnnnnnnnnnnnnnnnnnnnnnnnnnnnnnnnnnnnnnnnnnnnnnnnnnnnnnnnnnnnnnnnnnnnnnnnnnnnnnnnnnnnnnnnnnnnnnnnnnnntgagccaccatgcctggcctgtttagttttgtttcaagttgaaatacctttcttgtgttttctaattagaaaagtaatatctactcattgtaaaaactcaaacagtgcagaaatgtagaaagtagaaagtgtaagtccctggttgtcccttctgcctgagacaaccactgctcacagtttgatgtatatccttccagagactctcaaatttaagcaaataatttttattaccatgtctttttatttgaagacgtacatttgcctccaaagttcaacacaagttcaactgaccatatccttccatgacctgaatagatgctatcctttatcacgatgttcaattgcctttgaaagagagtagtccaggtatattcctgatcaaaatttggcatttttgatgatactactctacacagatcagactcatgtgcagaatcgtgcctggagagagaggtttggttaagacagagatttctggaaacattcaaattgcaaatggaaacttgaaacccacaatctaatgaggaatgtactggaaaaataatctgaagagttgacaaattgtgtactagattgaacacatggaatgcaatgcaatgagactttctgcactaaaacttatcctcatatgtacaacaatgatgtgtgtattatataacagtgatgtgtacatttctgacaccccatacataatatacacagtttgtataaatgcatacatttaaaaatatatatgtacaatacagctaacataaaactgtagtacgcctgaaggatattactagtgcctaatattgagtatgagtcactgcgtgttcgcatcaacttggaagtgcagtaattgttataaaattaatcagtgcagccaacattatttatgaatcacatctttgaaactgtgcagtagcatatacatatatatttttaaataacatttttcacagttttccagagttactgttgaaatctgcatcaccaaaaaaaaaaaaagcaagatttttttaacaatgtagacactcttcagacccagtaatctgcgtgtgatttcctatttgtagattcccaagagactttagcagtcaccagccttaatgcatgtacaggatattattgtgacttaatttatctgcagtttttaatccatgtgaaattggaatttataaacggacttggattaaacatgtctgcctttctaaggttgcaaatgttacattaaatgatttatgttgtaaatgagagaagttgagttgtacgtaaaagacatccaccaatttctgtgaatatttttacacggaaacttgagaatcaaaatacgttcaagtcagttgttctggctcccagtttataatctcgaaaagcaatctttttgtttcataaatggcttaaatgtagctcccacagattatcagtatgaagtctgacatttttcatggaaaagaagtatgtttttcttcattataactatagtttactatttgtctttgctatttcctgatacatacacatacggcacacacggcggcggcacatggcatgcacgttatggcacatgcacggct

SEQ ID NO: 4909 - protein, 130 aa, Homo sapien
  unsure 4: unknown amino acid
  unsure 5: unknown amino acid
  unsure 6: unknown amino acid
  unsure 7: unknown amino acid
  unsure 8: unknown amino acid
  unsure 9: unknown amino acid
  unsure 10: unknown amino acid
  unsure 11: unknown amino acid
  unsure 12: unknown amino acid
  unsure 13: unknown amino acid
  unsure 14: unknown amino acid
  unsure 15: unknown amino acid
  unsure 16: unknown amino acid
  unsure 17: unknown amino acid
  unsure 18: unknown amino acid
  unsure 19: unknown amino acid
  unsure 20: unknown amino acid
  unsure 21: unknown amino acid
  unsure 22: unknown amino acid
  unsure 23: unknown amino acid
  unsure 24: unknown amino acid
  unsure 25: unknown amino acid
  unsure 26: unknown amino acid
  unsure 27: unknown amino acid
  unsure 28: unknown amino acid
  unsure 29: unknown amino acid
  unsure 30: unknown amino acid
  unsure 31: unknown amino acid
  unsure 32: unknown amino acid
  unsure 33: unknown amino acid
  unsure 34: unknown amino acid
  unsure 35: unknown amino acid
  unsure 36: unknown amino acid
  unsure 37: unknown amino acid
  unsure 38: unknown amino acid
  unsure 39: unknown amino acid
  unsure 40: unknown amino acid
  unsure 41: unknown amino acid
  unsure 42: unknown amino acid
  unsure 43: unknown amino acid
  unsure 44: unknown amino acid
  unsure 45: unknown amino acid
  unsure 46: unknown amino acid
  unsure 47: unknown amino acid
  unsure 48: unknown amino acid
  unsure 49: unknown amino acid
  unsure 50: unknown amino acid
  unsure 51: unknown amino acid
  unsure 52: unknown amino acid
  unsure 53: unknown amino acid
  unsure 54: unknown amino acid
  unsure 55: unknown amino acid
  unsure 56: unknown amino acid
  unsure 57: unknown amino acid
  unsure 58: unknown amino acid
  unsure 59: unknown amino acid
  unsure 60: unknown amino acid
  unsure 61: unknown amino acid
  unsure 62: unknown amino acid
  unsure 63: unknown amino acid
  unsure 64: unknown amino acid
  unsure 65: unknown amino acid
  unsure 66: unknown amino acid
  unsure 67: unknown amino acid
  unsure 68: unknown amino acid
  unsure 69: unknown amino acid
  unsure 70: unknown amino acid
  unsure 71: unknown amino acid
  unsure 72: unknown amino acid
  unsure 73: unknown amino acid
  unsure 74: unknown amino acid
  unsure 75: unknown amino acid
  unsure 76: unknown amino acid
  unsure 77: unknown amino acid
  unsure 78: unknown amino acid
  unsure 79: unknown amino acid
  unsure 80: unknown amino acid
  unsure 81: unknown amino acid
  unsure 82: unknown amino acid
  unsure 83: unknown amino acid
  unsure 84: unknown amino acid
  unsure 85: unknown amino acid
  unsure 86: unknown amino acid
  unsure 87: unknown amino acid
  unsure 88: unknown amino acid
  unsure 89: unknown amino acid
  unsure 90: unknown amino acid
  unsure 91: unknown amino acid
  unsure 92: unknown amino acid
MVKXXXXXXXXXXXXXXXXXXXXXXXXXXXXXXXXXXXXXXXXXXXXXXXXXXXXXXXXXXXXXXXXXXXXXXXXXXXXXXXXXXXXXXXXXEPPCLACLVLFQVEIPFLCFLIRKVISTHCKNSNSAEM

SEQ ID NO: 4910 - DNA, 862 bp, Homo sapien
actcggccgggcagccgcgggccgagcgcagccgcctccgccaccgatgcgcctggtggccagactccaagtgggaccggcggacacgcagcctcgcgtgtcaggggaagctgatggagaatcgagctctggatccagggactcgggactcctatggtgccaccagccacctccccaacaagggggccctggcgaaggtcaagaacaacttcaaagacttgatgtccaaactgacggagggccagtatgtgctgtgccggtggacagatggcctgtactacctcgggaagatcaagagggtcagcagctctaagcaaagctgcctcgtgactttcgaagataattccaaatactgggtcctatggaaggacatacagcatgccggtgttccaggagaggagcccaagtgcaacatctgcctagggaagacatcagggccgctgaatgagatcctcatctgcgggaagtgtggcctgggttaccaccagcagtgccacatccccatagcgggcagtgctgaccagcccctgctcacaccttggttctgccgacgctgcatcttcgcactggctgtgcgggtgagccttccatcctccccagtccctgcctctcctgcctcctccagtggggcagaccagagactcccatcacagagtctgagctccaagcagaagggccacacctgggctttggagacagatagcgcctctgccactgtccttggccaggatttgtagactccctgagcctcagtttcctcaactgtaaagtggagatgggtttggtgtcgggaataacgggaccaataaatgatgctttactattaaaaaagaaaaaaaaaaaaaaaaaaaaaaaaaaaaaa

SEQ ID NO: 4911 - protein, 207 aa, Homo sapien
MENRALDPGTRDSYGATSHLPNKGALAKVKNNFKDLMSKLTEGQYVLCRWTDGLYYLGKIKRVSSSKQSCLVTFEDNSKYWVLWKDIQHAGVPGEEPKCNICLGKTSGPLNEILICGKCGLGYHQQCHIPIAGSADQPLLTPWFCRRCIFALAVRVSLPSSPVPASPASSSGADQRLPSQSLSSKQKGHTWALETDSASATVLGQDL

SEQ ID NO: 4912 - DNA, 3682 bp, Homo sapien; identical to SEQ ID NO: 4607

SEQ ID NO: 4913 - DNA, 2006 bp, Homo sapien
gggggactggggatcccgccgccgggccgcagcatggggcgcttccgcgggggcctgcggtgcatcaagtacctgctgcttggcttcaacctgctcttctggctggctggatcggccgtcattgcttttggactatggtttcggttcggaggtgccataaaggagttatcatcagaggacaagtccccagagtatttctatgtggggctgtatgttctggttggagccggggccctgatgatggccgtggggttcttcggatgctgcggagccatgcgggagtcgcaatgtgtgcttggatcattttttacctgcctcctggtgatatttgctgctgaagtaaccactggagtatttgcttttataggcaagggggtagctatccgacatgttcagaccatgtatgaagaggcttacaatgattaccttaaagacaggggaaaaggcaatgggacactcatcaccttccactcaacatttcagtgctgtggaaaagaaagctccgaacaggtccaacctacatgcccaaaggagcttctaggacacaagaattgcatcgatgaaattgagaccataatcagtgttaagctccagctcattggaattgtcggtattggaattgcaggtctgacgatctttggcatgatattcagcatggtcctctgctgtgcgatacgaaactcacgagatgtgatatgaagctacttctacatgaaaattgcagtctaaagctttcataccaaatgtcacaggagctgtctcccagctcatttttaacactgaaatgacattaggatctaaaataatttgctgtcaattgtacatttgcatgagtacgtatgtttggctcattactggtttaccccttgagtgaatgcctgtttatgatgactgagagcatattcatgtgtgatctgcgtgtttctggaatatgctttatacgtaatgaaatctgtttgctgggaattcctgattcttgttatataagaagaacaacctatttcgctcccagaaaaaaaaagatcaaagagctttcagaaactttgagaacttggctatttagaaaaagtgataatgggtcagtttctcagactgtagccattgaaaattagatgcagagaattcagagatttcttcttaatggaagtaataagctgtaagaattgagagatcacaatggagtgttaaaactgactgtgtctaagttgggtgtaagggtttcctgggtttttttatatacatgctctccccagaatacagtaaaccacagttttagaactaaacacatctgtaaaactaaatatagcatggaaaatccaatttgaataagtcatgctttcctagaatttaaaaataaaaaagtcttcctctggaaagagaagtcacacagacaatcatgtgccctataaaagtgagtgtttataggactaaaaaacttttaacaactttttaaggaaatatttttgttcttatacaaaaacatgtaaatattgctttattactttcattttctgaccctgctgtaaactactgcaaccctcacatcctcaaagggacttttatgtcaaactcttctgtttctccaaatataaggaaaaaagactaaagcaagagatctggcagttgaaaattgtgggaaagagaatttgtatgggcactgtatctatgaaatacctcataacttacgtttacatgttttcctaactttttgtatttttcttgtatagccacctagagaattcttcatagattaagaactacagttttcaccacttaacataagtaaaacaaagtccttcataatttaaccattagcatctttggccaaaccaaaataaagaaaagcatcttctcctagttgtgtgtgggcaacagaaacaagttaaggaaacaaaaatacttatatatacacagaacaaaaataatgttctttttatgcaaatcccctgtgaaaataaaattttcaatgttttagaaaaaaaaaaaaaaaaaaaaaaaaaaaaaaa

SEQ ID NO: 4914 - protein, 221 aa, Homo sapien
MGRFRGGLRCIKYLLLGFNLLFWLAGSAVIAFGLWFRFGGAIKELSSEDKSPEYFYVGLYVLVGAGALMMAVGFFGCCGAMRESQCVLGSFFTCLLVIFAAEVTTGVFAFIGKGVAIRHVQTMYEEAYNDYLKDRGKGNGTLITFHSTFQCCGKESSEQVQPTCPKELLGHKNCIDEIETIISVKLQLIGIVGIGIAGLTIFGMIFSMVLCCAIRNSRDVI

SEQ ID NO: 4915 - DNA, 2744 bp, Homo sapien
aaactttatgaggcagctgtgaagaaagttcccaatagtgaggagtatcactctcacctcttcatggcctatgccagagtgggtgaatacaagaaaatgcaacaggctggcatggctctatataagattgtccccaaaaatccctactacttttggtctgtgatgagcttaattatgcaatctatatcggcacaggatgaaaacctctcaaaaacaatgtttctgccccttgctgagagaatggtcgaaaaaatggtgaaagaggacaagatagaagctgaggctgaagttgaactttattatatgaccctggaacgtttgggaaagtaccaggaggccttggatgtcatcagagggaaattaggagagaagttgacaagtgagattcagagtcgggaaaataaatgcatggctatgtacaagaagctgagcaggtggccagagtgcaatgccctttcccggcgcctcttactaaaaaactcagatgactggcagttctatctgacttatttcgattctgtctttcgactgattgaagaggcctggagtcctcctgctgaaggtgaacactctttagaaggagaagtacattattctgcagaaaaagctgtgaagtttatagaagatcggataacggaagaatctaaaagttctcgccatctccgaggaccacatctagctaaattggagctgattaggcgtttacgaagtcaaggttgtaacgatgagtacaaactgggtgatccagaagaattaatgttccagtattttaaaaagtttggcgataaaccttgttgttttacagaccttaaggtgtttgttgacctcttacctgctacacagtgtacaaaatttattaatcagttacttggagttgttcctttgtcgacaccaacagaggataagctggcactgcctgctgacatcagagctctgcagcaacatttgtgtgtggtgcagctgacgaggttacttggcttgtaccacaccatggataaaaatcagaaattgagtgtggtcagagaattgatgttaaggtaccagcatggactggaatttgggaaaacctgtttgaaaacagaattgcaattttctgactcttactgtctccttgctgtccatgcgcttattgatgtatggagggaaacaggtgatgagaccactgtgtggcaggccctgactttgctggaagagggattaacccatagcccttccaatgctcagttcaaattgctgcttgttcgaatctactgtatgctgggtgcatttgaaccagtggtggatctttactccagcctcgatgctaagcatatccagcatgataccattggttatcttttgacccgatatgctgaatctctaggtcagtatgctgctgcgtcccaatcctgtaacttcgcactcaggttttttcactccaaccagaaagatacctcagaatatattattcaagcttacaaatatggtgcatttgagaagatcccagagtttatcgcttttaggaacaggctgaataattctcttcattttgcacaagtccgtactgaacggatgctgttagaccttctacttgaagcaaatatatcaaccagtttagcagaaagtataaagtcaatgaaccttaggccagaagaagatgacattccatgggaagatttgcgagacaacagagacttaaatgtttttttcagctgggatccaaaagacagggacgttactgaagaacataagaaactttccttagaggaggagaccttgtggttaagaatccgatccttaacattgaggctgataagtggacttccaagtctcaaccaccctgtggagccaaagaactcggagaagactgccgagaatggggtatcctcccggattgatattcttcgtttgctccttcaacagctggaggcaaccctggagacaggaaagcgatttattgagaaggatattcagtatcctttccttggtcctgtacctaccagaatgggtggattctttaattctggctgttctcagtgccagataagctctttttatcttgtcaatgatatttatgagctggataccagtggtttagaggatacaatggagattcaggaacgaatagaaaatagttttaagtctttactagaccagctaaaagatgtcttcagtaaatgtaaaggtgacctcttagaagttaaagatggtaacttgaaaacacatcctactcttttagaaaatctagttttctttgttgagactatttctgttatcctttgggtatccagttactgtgagagtgtcctacgaccatacaaactaaatttacagaaaaagaaaaagaagaaaaaagaaaccagcatcatcatgccacctgtctttaccagtttccaagactatgttactgggcttcagactttaatttccaatgttgtggatcatattaaagggcttgaaacacatctaattgcacttaaacttgaagaacttattttagaagacacttctctctcaccggaagagagaaaattttcaaagactgtgcaagggaaggtgcagagcagttatctgcactcacttctggaaatgggggagctgctgaaaaaaagacttgagaccacaaagaaactaaaaatttaaggaagtatctatcatgggcactgatgactctgcaacagaatatgacaccatcttcccaggcaaaagcaacatctggttgaccatgattttaatccagaacttcctcataaaatgcatgaagg

SEQ ID NO: 4916 - protein, 852 aa, Homo sapien
MAYARVGEYKKMQQAGMALYKIVPKNPYYFWSVMSLIMQSISAQDENLSKTMFLPLAERMVEKMVKEDKIEAEAEVELYYMTLERLGKYQEALDVIRGKLGEKLTSEIQSRENKCMAMYKKLSRWPECNALSRRLLLKNSDDWQFYLTYFDSVFRLIEEAWSPPAEGEHSLEGEVHYSAEKAVKFIEDRITEESKSSRHLRGPHLAKLELIRRLRSQGCNDEYKLGDPEELMFQYFKKFGDKPCCFTDLKVFVDLLPATQCTKFINQLLGVVPLSTPTEDKLALPADIRALQQHLCVVQLTRLLGLYHTMDKNQKLSVVRELMLRYQHGLEFGKTCLKTELQFSDSYCLLAVHALIDVWRETGDETTVWQALTLLEEGLTHSPSNAQFKLLLVRIYCMLGAFEPVVDLYSSLDAKHIQHDTIGYLLTRYAESLGQYAAASQSCNFALRFFHSNQKDTSEYIIQAYKYGAFEKIPEFIAFRNRLNNSLHFAQVRTERMLLDLLLEANISTSLAESIKSMNLRPEEDDIPWEDLRDNRDLNVFFSWDPKDRDVTEEHKKLSLEEETLWLRIRSLTLRLISGLPSLNHPVEPKNSEKTAENGVSSRIDILRLLLQQLEATLETGKRFIEKDIQYPFLGPVPTRMGGFFNSGCSQCQISSFYLVNDIYELDTSGLEDTMEIQERIENSFKSLLDQLKDVFSKCKGDLLEVKDGNLKTHPTLLENLVFFVETISVILWVSSYCESVLRPYKLNLQKKKKKKKETSIIMPPVFTSFQDYVTGLQTLISNVVDHIKGLETHLIALKLEELILEDTSLSPEERKFSKTVQGKVQSSYLHSLLEMGELLKKRLETTKKLKI

SEQ ID NO: 4917 - DNA, 1844 bp, Homo sapien
ccgggacagctcgcggcccccgagagctctagccgtcgaggagctgcctggggacgtttgccttggggccccagcctggcccgggtcaccctggcatgaggagatgggcctgttgctcctggtcccgttgctcctgctgcccggctcctacggactgcccttctacaacggcttctactactccaacagcgccaacgaccagaacctaggcaacggtcatggcaaagacctccttaatggagtgaagctggtggtggagacacccgaggagaccctgttcacctaccaaggggccagtgtgatcctgccctgccgctaccgctacgagccggccctggtctccccgcggcgtgtgcgtgtcaaatggtggaagctgtcggagaacggggccccagagaaggacgtgctggtggccatcgggctgaggcaccgctcctttggggactaccaaggccgcgtgcacctgcggcaggacaaagagcatgacgtctcgctggagatccaggatctgcggctggaggactatgggcgttaccgctgtgaggtcattgacgggctggaggatgaaagcggtctggtggagctggagctgcggggtgtggtctttccttaccagtcccccaacgggcgctaccagttcaacttccacgagggccagcaggtctgtgcagagcaggctgcggtggtggcctcctttgagcagctcttccgggcctgggaggagggcctggactggtgcaacgcgggctggctgcaggatgccacggtgcagtaccccatcatgttgccccggcagccctgcggtggcccgggcctggcacctggcgtgcgaagctacggcccccgccaccgccgcctgcaccgctatgatgtattctgcttcgctactgccctcaaggggcgggtgtactacctggagcaccctgagaagctgacgctgacagaggcaagggaggcctgccaggaagatgatgccacgatcgccaaggtgggacagctctttgccgcctggaagttccatggcctggaccgctgcgacgctggctggctggcagatggtagcgtccgctaccctgtggttcacccgcatcctaactgtgggcccccagagcctggggtccgaagctttggcttccccgacccgcagagccgcttgtacggtgtttactgctaccgccagcactaggacctggggccctcccctgccgcattccctcactggctgtgtatttattgagtggttcgttttcccttgtgggttggagccattttaactgtttttatacttctcaatttaaattttctttaaacatttttttactattttttgtaaagcaaacagaacccaatgcctccctttgctcctggatgccccactccaggaatcatgcttgctcccctgggccatttgcggttttgtgggcttctggagggttccccgccatccaggctggtctccctcccttaaggaggttggtgcccagagtgggcggtggcctgtctagaatgccgccgggagtccgggcatggtgggcacagttctccctgcccctcagcctgggggaagaagagggcctcgggggcctccggagctgggctttgggcctctcctgcccacctctacttctctgtgaagccgctgactgtaacccagttctaggcttccaggcgaaagctgagggaaggaagaaactcccctccccgttccccttcccctctcggttccaaagaatctgttttgttgtcatttgtttctcctgtttccctgtgtggggaggggccctcaggtgtgtgtactttggacaataaatggtgctatgactgccttccgccaaaaaaaaaaa

SEQ ID NO: 4918 - protein, 360 aa, Homo sapien
MGLLLLVPLLLLPGSYGLPFYNGFYYSNSANDQNLGNGHGKDLLNGVKLVVETPEETLFTYQGASVILPCRYRYEPALVSPRRVRVKWWKLSENGAPEKDVLVAIGLRHRSFGDYQGRVHLRQDKEHDVSLEIQDLRLEDYGRYRCEVIDGLEDESGLVELELRGVVFPYQSPNGRYQFNFHEGQQVCAEQAAVVASFEQLFRAWEEGLDWCNAGWLQDATVQYPIMLPRQPCGGPGLAPGVRSYGPRHRRLHRYDVFCFATALKGRVYYLEHPEKLTLTEAREACQEDDATIAKVGQLFAAWKFHGLDRCDAGWLADGSVRYPVVHPHPNCGPPEPGVRSFGFPDPQSRLYGVYCYRQH

SEQ ID NO: 4919 - DNA, 4068 bp, Homo sapien
ttagaggtcctttctgctttataacattaggttcttcttgtgaggccttaagcatttgctaaacaggttcaagtaagtttagtaaagtttcattactgccattgattcaattatcaaactgcttttgtacatataaagaattcttcagatgcatggtttctattaacaagatccaatgccttccttttatttccccttcagttcaacatctaatatataaagattgctctgactactacgcaataggcaaaagaagcagtgagacctacagagttacacctgatcccaaaaatagtagctttgaagtttactgtgacatggagaccatggggggaggctggacagtgctgcaggcacgtctcgatgggagcaccaacttcaccagaacatggcaagactacaaagcaggctttggaaacctcagaagggaattttggctggggaacgataaaattcatcttctgaccaagagtaaggaaatgattctgagaatagatcttgaagactttaatggtgtcgaactatatgccttgtatgatcagttttatgtggctaatgagtttctcaaatatcgtttacacgttggtaactataatggcacagctggagatgcattacgtttcaacaaacattacaaccacgatctgaagtttttcaccactccagataaagacaatgatcgatatccttctgggaactgtgggctgtactacagttcaggctggtggtttgatgcatgtctttctgcaaacttaaatggcaaatattatcaccaaaaatacagaggtgtccgtaatgggattttctggggtacctggcctggtgtaagtgaggcacaccctggtggctacaagtcctccttcaaagaggctaagatgatgatcagacccaagcactttaagccataaatcactctgttcattcctccaggtattcgttatctaatagggcaattaattccttcagcactttagaatatgccttgtttcatatttttcatagctaaaaaatgatgtctgacggctaggttcttatgctacacagcatttgaaataaagctgaaaaacaatgcattttaaaggagtcctttgttgttatgctgttatccaatgaacacttgcaagcaattagcaatattgagaattatacattagatttacaattcttttaatttctattgaaactttttctattgcttgtattacttgctgtatttaaaaaataattgttggctgggtgtggtagctcacgcctgtaatcccagcactttggaatgtcaaggcaggcagatcacttgaggtcaggagtttgagaccagcctggccaaacatgtgaaacgctgtctctattaaaaatacaaaaattagccgggcatggtggtacatgcctgtaatcctagctacttgggaggctgaggcaggagaatcgcttgaacctgagaggaagaggttgcagtgagccaagactgagccactgcactccagcatgggtgacagagaaaactctgtctcaaacaaaaaaataataaaatttattcagtaggctggattctacacaaagtaatctgtatttgggccatgatttaagcacatctgaaggtatatcactcttttcaggctataattatttgggtaatcttcattctgagacaaacttaatctatatcatttactttgcaacagaacaaccctacagcattttggttcccagactaagggaactaatatctatataattaaacttgttcatttatcattcatgaaatataaaatacttgtcatttaaaccgtttaaaaatgtggtagcataatgtcaccccaaaaagcattcagaaagcaatgtaactgtgaagaccagggtttaaaggtaattcatttatagtttataactccttagatgtttgatgttgaaaactgctttaacatgaaaattatcttcctctgctctgtgtgaacaatagcttttaatttaagattgctcactactgtactagactactggtaggtttttttggggggggtgggtagggatatgtgggtaatgaagcatttacttacaggctatcatactctgaggccaattttatctccaaagcaataatatcattaagtgattcacttcatagaaggctaagtttctctaggacagatagaaaacatgaattttgaaatatatagaacagtagttaaaatactatatatttcaaccctggctggtagattgcttattttactatcagaaactaaaagatagatttttacccaaacagaagtatctgtaatttttataattcatcaattctggaatgctatatataatatttaaaagactttttaaatgtgtttaatttcatcatcgtaaaaagggatcatctcagagagaacagcagtattctgcgtatttttaaaaatgctctagagtaacatttgaagtaattcactgtagtgtatgccagtcctagaaataatttttttaatttctggtgtctgtttctaatacactaaccaagttttcaaaatatatttacaaagatgcatctttacccattattttaaaatgattaaggaggatagttgcttcaggtaacaagctaatttttcaaatattaggcccttacagaactatttagtcaaaaagtaagatattcctttaaaatatataacccaaagctttcagttaaacatgatatatcacaaatactattaaaatgttaaagagaaatgcaaatagcattaaatgatgaccaaaatgtaaaatattgtagatttcaaaagctgtgtctctattaggtgggataccaaatgtaaatgatgtaactgacgttgttttttactttttactttttaaaaaagactaaaaacgttttgatattatacaatgtatttgtttcagataaggtcattgtcatttagtatatataattaatatatgtacaagtttaagtaaattcctgtgagtaaaaatggacttatcacaaaacatagttctaaagaaaggtatatgctcatatacacggtgtccattaatttaatgggaactaggtataacttcaggagaatttggcaaataattcattaatccatgtaaatattcaaaagcttgttctatccacattatttcaagggatcactttatttttcattatactttcacagcacttttctagtaaattctgtaacacagaaattccattttggaatcatttcatgttaccaataattctagacttttataacatttaacatgttgatggaaatagattacatctgctagaaccttttgccttaactattcaccaatatatgctaatattcataaatatggattgactgtttacaaacattagaatcttgtcttggttccattttgatggctaatatttgttatcttaattaagactatttctgaggtcatgattacttgaaaatattgactaaaactgggtccttagaaattccaggtggagctgatttacctatgactgaggggaaaaaaaaatcaaattttactgataatagtaatgctccaaatgaattaatgacacatctgttcaataaataaagagcttaaatatacaaaacataagaaatctgggcaacaaaacttgtggtctttacttttgaatagctacccaagaaaaggttttaaaggtaaaagttatgagtaatgtcatcacaataagctcttgtttaaaattcttttcttttatgtataattaggtttatgtttcatgtctttttaaaaccttataaaagatttaattatcacatctattcttcaatgtggaaatattaaatattgttggttgtaaaataatatttatgtacttacttgtgtctgaaaagttgtaaaatgcttacctcagctatacaatatctgtgactctgaagactttaatgagtactatttcattaacaagaagtcagaggcaaatagaggaacaccattatcttacttccctctagaatactgttgaaacatttgaaatacaaaagtttcagtttcattttgtggcattcaacttcctctcctctttttccgttattagtgttgctgctctggttagcc

SEQ ID NO: 4920 - DNA, 4806 bp, Homo sapien
  Unsure 1497-1620: Unknown base
cattcactatccaagctgcaccatcttcggggtcattgtgtgccaggcatatcaactcttttcaataaaaatggatggaaaggcagatgtaaagtccctcatggcgaaatataacacggggggcaacccgacagaggatgtctcagtcaatagccgacccttcagagtcacagggccaaactcatcttcaggaatacaagcaagaaagaacttattcaacaaccaaggaaatgccagccctcctgcaggacccagcaatgtacctaagtttgggtccccaaagccacctgtggcagtcaaaccttcttctgaggaaaagcctgacaaggaacccaagcccccgtttctaaagcccactggagcaggccaaagattcggaacaccagccagcttgaccaccagagaccccgaggcgaaagtgggatttctgaaacctgtaggccccaagcccatcaacttgcccaaagaagattccaaacctacatttccctggcctcctggaaacaagccatctcttcacagtgtaaaccaagaccatgacttaaagccactaggcccgaaatctgggcctactcctccaacctcagaaaatgaacagaagcaagcgtttcccaaattgactggggttaaagggaaatttatgtcagcatcacaagatcttgaacccaagcccctcttccccaaacccgcctttggccagaagccgcccctaagtaccgagaactcccatgaagacgaaagccccatgaagaatgtgtcttcatcaaaagggtccccagctcccctgggagtcaggtccaaaagcggccctttaaaaccagcaagggaagactcagaaaataaagaccatgcaggggagatttcaagtttgccctttcctggagtggttttgaaacctgctgcgagcaggggaggcccaggtctctccaaaaatggtgaagaaaaaaaggaagataggaagatagatgctgctaagaacaccttccagagcaaaataaatcaggaagagttggcctcagggactcctcctgccaggttccctaaggccccttctaagctgacagtgggggggccatggggccaaagtcaggaaaaggaaaagggagacaagaattcagccaccccgaaacagaagccattgcctcccttgtttaccttgggtccacctccaccaaaacccaacagaccaccaaatgttgacctgacgaaattccacaaaacctcttctggaaacagtactagcaaaggccagacgtcttactcaacaacttccctgccaccacctccaccatcccatccggccagccaaccaccattgccagcatctcacccatcacaaccaccagtcccaagcctacctcccagaaacattaaacctccgtttgacctaaaaagccctatcaatgaagacaatcaagatggtgtcacgcactctgatggtgctggaaatctagatgaggaacaagacagtgaaggagaaacatatgaagacatagnnnnnnnnnnnnnnnnnnnnnnnnnnnnnnnnnnnnnnnnnnnnnnnnnnnnnnnnnnnnnnnnnnnnnnnnnnnnnnnnnnnnnnnnnnnnnnnnnnnnnnnnnnnnnnnnnnnnnnnnnnnnaggccctattcaagtcatccatcttgcaaaagcttgttgtgatgtcaaaggaggaaagaatgaactgagcttcaagcaaggagagcaaattgaaatcatccgcatcacagacaacccagaaggaaaatggttgggcagaacagcaaggggttcatatggctatattaaaacaactgctgtagagattgactatgattctttgaaactgaaaaaagactctcttggtgccccttcaagacctattgaagatgaccaagaagtatatgatgatgttgcagagcaggatgatattagcagccacagtcagagtggaagtggagggatattccctccaccaccagatgatgacatttatgatgggattgaagaggaagatgctgatgatggctccacactacaggttcaagagaagagtaatacgtggtcctgggggattttgaagatgttaaagggaaaagatgacagaaagaaaagtatacgagagaaacctaaagtctctgactcagacaataatgaaggttcatcgtaagagtcaaccaaccaaatccagttttccctgctcctcctaaacaattggacatgggagatgaagtttacgatgatgtggatacctctgatttccctgtttcatcagcagagatgagtcaaggaactaattttggaaaagctaagacagaagaaaaggaccttaagaagctaaaaaagcaggaaaaagaagaaaaagacttcaggaaaaaatttaaatatgatggtgaaattagagtcctatattcaactaaagttacaacttccataacttctaaaaagtggggaaccagagatctacaggtaaaacctggtgaatctctagaagttatacaaaccacagatgacacaaaagttctctgcagaaatgaagaagggaaatatggttatgtccttcggagttacctagcggacaatgatggagagatctatgatgatattgctgatggctgcatctatgacaatgactagcactcaactttggtcattctgctgtgttcattaggtgccaatgtgaagtctggattttaattggcatgttattgggtatcaagaaaattaatgcacaaaaccacttattatcatttgttatgaaatcccaattatctttacaaagtgtttaaagtttgaacatagaaaataatctctctgcttaattgttatctcagaagactacattagtgagatgtaagaattattaaatattccatttccgctttggctacaattatgaagaagttgaaggtacttcttttagaccaccagtaaataatcctccttcaaaaaataaaaataaaagaaaaaggaaaatcattcaggaagaaatgacctgtctaaaaaaacctaaggaagaataataatataagaaaggaaatttaaaaacattccacaagaagaaaaattattgtttatacttctacttatggttatatcttatattctctattcaagtgacctgtcttttaaaaaggcagtgctgtcttacctcttgctagtgggttaaatgttttcaaaaattatagcagtagtagaagttttgtataaaatttgtccttatttgttaattgtatataaatgttaattatttgatacgaatgttatgcatttagtatgcacattgaagtctaaactgtagaagagtctaaaacaagttctctttttgcagattcacatactaatggtttaattctgtgctctgtttaaagtactattataactagagtagatctgaatgaggataaccctaaaatcatgaggaatggaagaatggaccttgaaactacctaggcttttatgcatggcacctctttataatgaagacactttttaaagtttttgtttttgtttcaattaccgctagatttttttttctctttttttaaaatccattttactggaaagttggccagcagagggagtagaaattattaaaattctagtgtttggattgggcccttctctaacagtacatactcattcccaaagcaatccaaaaacaaaatgtgaaccatttgggtttcaaatgttaagaacactaaatagcatgatttaaaaaatgaaaaatgctaacacccaagaaaagaagatattaagtgctttttaacaactcctagagtacaaaatgagtacatcataatgctggctcttctactaatgaaccatcgagtgatattgaataaattatttatcttctcagtttccttatctgtaaattacaatattagactaagtaagtttttccaactcttcactaccaattaccttaggcttttataatgctccgcctacttcagtcccatgtttcagaagcttttgtctattttttaaactcattgattaaataatgattaatgcattctccacattttaatattgcaaaggcccattggagtttctgaagtggctccacagaattgaaataatttcaaataactgtaaaggaactgaaaatcttcacagagatgaagtggggtttccattaggtgctttgaaatttgataacaaatcatcaacttccactggtcaatatatagattttgggtgtctgaggccccaagattagatgccactaatctccaaagattccctccaattatgaaatattttaatgtctacttttagagagcactagccagtatatgaccatgtgattaatttcttttcacactagataaaattacctggttcaaaagtggtttttgtttattaaatttggtaataaatatatataatacacagacaggatagtttttatgctgaagtttttggccagctttagtttgaggactccttgataagcttgctaaactttcagagtgccctgagacacttccagccatccctcctcctgccttcattggggcagacttgcattgcagtctgacagtaattttttttctgattgagaattatgtaaattcaatacaatgtcagtttttaaaagtcaaagttagatcaagagaatatttcagagttttggtttacacatcaagaaacagacacacatacctaggaaagatttacacaatagataatcatcttaatgtgaaagatatttgaagtattaattttaatatattaaatatgatttctgttatagtcttctgtatggaattttgtcacttaagatgagctgcaaataaataataccttcaatggaaa

SEQ ID NO: 4921 - protein, 715 aa, Homo sapien
  unsure 499: unknown amino acid
  unsure 500: unknown amino acid
  unsure 501: unknown amino acid
  unsure 502: unknown amino acid
  unsure 503: unknown amino acid
  unsure 504: unknown amino acid
  unsure 505: unknown amino acid
  unsure 506: unknown amino acid
  unsure 507: unknown amino acid
  unsure 508: unknown amino acid
  unsure 509: unknown amino acid
  unsure 510: unknown amino acid
  unsure 511: unknown amino acid
  unsure 512: unknown amino acid
  unsure 513: unknown amino acid
  unsure 514: unknown amino acid
  unsure 515: unknown amino acid
  unsure 516: unknown amino acid
  unsure 517: unknown amino acid
  unsure 518: unknown amino acid
  unsure 519: unknown amino acid
  unsure 520: unknown amino acid
  unsure 521: unknown amino acid
  unsure 522: unknown amino acid
  unsure 523: unknown amino acid
  unsure 524: unknown amino acid
  unsure 525: unknown amino acid
  unsure 526: unknown amino acid
  unsure 527: unknown amino acid
  unsure 528: unknown amino acid
  unsure 529: unknown amino acid
  unsure 530: unknown amino acid
  unsure 531: unknown amino acid
  unsure 532: unknown amino acid
  unsure 533: unknown amino acid
  unsure 534: unknown amino acid
  unsure 535: unknown amino acid
  unsure 536: unknown amino acid
  unsure 537: unknown amino acid
  unsure 538: unknown amino acid
  unsure 539: unknown amino acid
  unsure 540: unknown amino acid
IHYPSCTIFGVIVCQAYQLFSIKMDGKADVKSLMAKYNTGGNPTEDVSVNSRPFRVTGPNSSSGIQARKNLFNNQGNASPPAGPSNVPKFGSPKPPVAVKPSSEEKPDKEPKPPFLKPTGAGQRFGTPASLTTRDPEAKVGFLKPVGPKPINLPKEDSKPTFPWPPGNKPSLHSVNQDHDLKPLGPKSGPTPPTSENEQKQAFPKLTGVKGKFMSASQDLEPKPLFPKPAFGQKPPLSTENSHEDESPMKNVSSSKGSPAPLGVRSKSGPLKPAREDSENKDHAGEISSLPFPGVVLKPAASRGGPGLSKNGEEKKEDRKIDAAKNTFQSKINQEELASGTPPARFPKAPSKLTVGGPWGQSQEKEKGDKNSATPKQKPLPPLFTLGPPPPKPNRPPNVDLTKFHKTSSGNSTSKGQTSYSTTSLPPPPPSHPASQPPLPASHPSQPPVPSLPPRNIKPPFDLKSPINEDNQDGVTHSDGAGNLDEEQDSEGETYEDIXXXXXXXXXXXXXXXXXXXXXXXXXXXXXXXXXXXXXXXXXXGPIQVIHLAKACCDVKGGKNELSFKQGEQIEIIRITDNPEGKWLGRTARGSYGYIKTTAVEIDYDSLKLKKDSLGAPSRPIEDDQEVYDDVAEQDDISSHSQSGSGGIFPPPPDDDIYDGIEEEDADDGSTLQVQEKSNTWSWGILKMLKGKDDRKKSIREKPKVSDSDNNEGSS

SEQ ID NO: 4922 - DNA, 2847 bp, Homo sapien
ggaaattttttaacagagagaaacaaatagaaacatcttcaaatcttcctaagtgaatatttaaaatgcagaattgcttatcttctgtttttctgtattcagacacttatatctgttgtatatattagtttagacactctcactaatatacacagtatttaagactctaaatgagatttcttaagtattttattttattctctgtaaatggttttgtataatctttaaacatctacactttgcctttgtagatatttaagggaaaccatttggggttgtcttgcatgtatatttttgttgtagataagtgttgcttagttatttctgcaaattttggttgaaatgcttacagactttaatacagtatatattttcaaaatataaacttttatatttctgtgataagttaggatatgcgttttaggcaatatttttcattaatatcacttgttcttttgaaaaatagcatactggtttggtgccaattttttcattagaatataatgctcttatattgttggagagcaggttaatcttttttcgaagtaattgcgtttgaagtataatttcaaaatgtattgaatttgtgaataagccttaccattaggatcagtaaatttttcaactttgcaactacataagtagtttaagatctccccgtaaattctcactgtgtggcagttgatggagtttgtgaacagagccttaagcttgttgcaaaaaaatttaaaaagggtaatacgggttgtttcctccatgcaacgtaagccatgctgatggactgaatgcagtctgtaattcatggctaatccgaagagtttgattgagttgatggcggcagggaccagatagacaccttggtgattgtctttggccataagaatagaccaaggataggttttccagagacaccttcatactgtaaacatggtttagacacggtcatagggaaggctgctggtccatcatttgttctgaacaaatggcatttcctgctcctgaccctggcagttggccccagattccttgtcgatgacttggaaacgtccattctgggtaaggtcagcactccctgagagatgttaacaaagtttacctatgagtcttactgtgtagacaatctgaagtcaattttagttacacaatcagcattcccatgtgtcctcagtgtcttatcaatgaactatgtgtatcaagccatactaaactggagtttagcaggacaaaggcaaactaaatgtagaacataacatatcagctgaatatgtctatccaggactgtttttctagaacataaatcatggagctccttgacagtgtatccactgtttttggggtttaataaaaccaactagaatttagacttaaaaagaaattattattccttttggttgtccacataaagtagtccagggctatcatatggctaaaatcaagttatttggttcatctctggtatgtatttataaagtcaacttatcagccattaagatggagatttgctttaaatttttgcagtgtgtgtggcagtcagaaaaacccatatctagttttcaacttcacctctggtgtttttatggcttaaccttatatcattgatccaacatctagcctgatgctggagctcttatttctagcctgatgctggagctcttatatctagcctgatgctggagctcttgaagctgactcttggaagtttggagggtgtagagtttcccatctagtatttaatttgtccctgtgccattagtcccagcttgaagtcatttgccagtgtcgatgttgacaggattgtgacaatattgcctttcataaaaccgagaaccaaagaattccattattctaacaaagcctgagtttcatagattgtgggcacatctagacagatatgtgcatgcttgatggtgcagagaaactgctgacttccaccaacctcatgctccccctggctggccatacagagggattcgttgtcatattgaaaaggctctgaaagatgagtttctaattgaagctcactatctcaggttggtgtttctactgtgtagtcccaagcctgtatccatatcataaaagtggaggcctggtactcctccaggttatctggccagtgtagactcctccatctgaatatgaacctccagggtaagaatttttcagacatgtctatactgaacagtaggatcctgcactttccaaatgtctgcctccttttgttcttcattgacccattctaattcctgttaggtgtgagaagaattgtcttcagttctctctccattctcattcatgatggaatcattgatccattgaccagttgagaaatgattgatgctgaagaagtggtattctattggtaaggcttattaccaaacttccgataatgaagcaggctaccaaaaacttatccagcccaccctaggagtgtttggatttgatcatggatgtagcatacaccaaaatccaccgagacctttgcaaaattaggctacttgttttattttgccagattatcatgggagagtctttaactagttctgaatatttgtaagtctgagtacttcatagaattataaagaaggtacagctgaccccttctcaccatgttgtaaatatttactgagactgggtgcagtactgagggataataatcttctgatttatcaaatcctgactgtctagagcaaattgtacactctctttgtgaatggtcctgtaacgtgtatgaacacatttctgggtgccttagaagttgtatttttcatgtgtgctaatatgcagtatttatacattgtgagaagctgctttgaataaaaaggttgaaacttaaaaaacaaaaaaagg

SEQ ID NO: 4923 - protein, 17 aa, Homo sapien
KFFNREKQIETSSNLPK

SEQ ID NO: 4924 - DNA, 461 bp, Homo sapien
ggcacgagggggcggcgggtcacgtcggccgggcatggctgcatggagcccggccgcggcagcgcctctcctccgcgggatccgcgggcttccacttcaccatcggatgtttgccactcagactgagggggagctcagagtgacccaaattctcaaagaaaagtttccacgagctacagctataaaagtcactgacatttcaggcactaaaagaagaaatcaaagagatgcatggattgcggatatttacctctgtccccaaacgctgaccacgccctggctgcatagatgctgctgcttaagaccttggatgaacttcactgacatcattcttccctaagcagtcaccaaaaaatttatatattttgctcatatacatttccatattataattatagaagatgtataatctatttagatgttaattaaaggaaacaaacaactgaagcttttgaagggcc

SEQ ID NO: 4925 - protein, 112 aa, Homo sapien [sequence omitted]

SEQ ID NO: 4926 - DNA, 1312 bp, Homo sapien
acgccaaggcggccacgtcctgctccccctggtgaagaagctgccctgggcttgtcgtcctagggtctccagacatgtctgaggtgaagagccggaagaagtcggggcccaagggagcccctgctgcggagcccgggaagcggagcgagggcgggaagacccccgtggcccggagcagcggaggcgggggctgggcagacccccgaacgtgcctgagcctgctgtcgctggggacgtgcctgggcctggcctggtttgtatttcagcagtcagaaaaatttgcaaaggtggaaaaccaataccagttactgaaactagaaaccaatgaattccaacaacttcaaagtaaaatcagtttaatttcagaaaagtggcagaaatctgaagctatcatggaacaattgaagtcttttcaaataattgctcatctaaagcgtctacaggaagaaattaatgaggtaaaaacttggtccaataggataactgaaaaacaggatatactgaacaacagtctgacgacgctttctcaagacattacaaaagtagaccaaagtacaacttccatggcaaaagatgttggtctcaagattacaagtgtaaaaacagatatacgacggatttcaggtttagtaactgatgtaatatcattgacagattctgtgcaagaactagaaaataaaatagagaaagtagaaaaaaatacagtaaaaaatataggtgatcttctttcaagcagtattgatcgaacagcaacgctccgaaagacagcatctgaaaattcacaaagaattaactctgttaagaagacgctaaccgaactaaagagtgacttcgacaaacatacagatagatttctaagcttagaaggtgacagagccaaagttctgaagacagtgacttttgcaaatgatctaaaaccaaaggtgtataatctaaagaaggacttttcccgtttagaaccattagtaaatgatttaacactacgcattgggagattggttaccgacttactacaaagagagaaagaaattgctttcttaagtgaaaaaatatctaatttaacaatagtccaagctgagattaaggatattaaagatgaaatagcacacatttcagatatgaattagtttgacattattgagattagactaaggtaatttttttaatgggacctctcatgagaagactggtaaatcaaaaataatgatattttggagcaaaagtcattttatatttaatcctattttgtacagtaaaaataaaactttaaagcaggttgattttccaaaataaatatgctaaaacctaaaaa

SEQ ID NO: 4927 - protein, 350 aa, Homo sapien
MSEVKSRKKSGPKGAPAAEPGKRSEGGKTPVARSSGGGGWADPRTCLSLLSLGTCLGLAWFVFQQSEKFAKVENQYQLLKLETNEFQQLQSKISLISEKWQKSEAIMEQLKSFQIIAHLKRLQEEINEVKTWSNRITEKQDILNNSLTTLSQDITKVDQSTTSMAKDVGLKITSVKTDIRRISGLVTDVISLTDSVQELENKIEKVEKNTVKNIGDLLSSSIDRTATLRKTASENSQRINSVKKTLTELKSDFDKHTDRFLSLEGDRAKVLKTVTFANDLKPKVYNLKKDFSRLEPLVNDLTLRIGRLVTDLLQREKEIAFLSEKISNLTIVQAEIKDIKDEIAHISDMN

SEQ ID NO: 4928 - DNA, 557 bp, Homo sapien
  Unsure 307: Unknown base
ccgccgtctccccagaagccccctcctccttcccccatgggtcatatgttgaaagtctattttaaaaactatgttccttgccgtagattgcagagctaatttatcacgtttctctcctgtgagaccccccttttatatgatatatccagaggaagttttgtaatataaaacaggacgcccacactgatggttttgcactggtttttgtgaatgtttcttacaaaaagaaaaaggaacaaagaataaatagtgaccgtgaaaaaaggtggtcttgatttggggttggggatagactggggcgaggcanaagcttgacaagaggctgctgatggctggagggagctgggagaagaggcgttccaggtcaccccaaacggagcgtagagcgggcccacaccgagctttcctcgctggacttaagggcccactacaattagctctaaccaagccacccagtattttgtgagcacagctgtgtgccagagcctggacagcctcatggggtaaggccacgccaccctcccatcccacagatgagtgtggaagactggatgtct

SEQ ID NO: 4929 - protein, 32 aa, Homo sapien
PPSPQKPPPPSPMGHMLKVYFKNYVPCRRLQS

SEQ ID NO: 4930 - DNA, 1150 bp, Homo sapien
gcggccgcggagccccacccgctcctactccagtcctctcacgcccactgacttaccctgcgcacgcgcgctgaggctccgtggggccgccgcgggccccgccccgaggtgggagggcctgacgcatccacagctggccaatcggcggatggcctcgcgcgcccgccccctccccctgcccccggcgccgggctccacgtgccagtgtttgtgtacgtgcggccgtggcggggctggacagggtccgggtcgttgaggattaggctgctcgggcgtaaccggagctggggcgcggctgccaagggccggcccggaagtcccagcggtctttaaattctcccgtgctagggccagcctgcgcattcttacctgtcggggtgcggcgagtgtctcacctctctgcacttccaaggactcttgtcatctgccttaggcgggaaatgctgttgctggattgcaaccccgaggtggatggtctgaagcatttgctggagacaggggcctcggtcaacgcacccccggatccctgcaagcagtcgcctgtccacttagccgcaggaagcggccttgcttgctttcttctctggcagctgcaaacgggcgctgacctcaaccagcaggatgttttaggagaagctccactacacaaggcagcaaaagttggaagcctggagtgcctaagcctgcttgtagccagtgatgcccaaattgatttatgtaataagaacgggcaaacagctgaagatctcgcttggtcatgtggatttccagactgtgccaagtttcttacaacaattaaatgtatgcagacaataaaagcaagtgaacaccctgacaggaatgattgtgttgccgtgctcagacagaaacggagtctcggaagtgtagaaaataccagtgggaaaaggaagtgctgatgtcacgtgggttatgaagaagtctgaagaacgccttcatttcatgcaaatctataagctcctgcttttggctttaccatatgttgtgtctaatctccttctgagaaggacgaaaaactttcttccaagtgaagatccatttaagaacacatgtatttacatgcctataatatgctggttgtgtatgctttgtcttttaagtggatcttcacttggaagaaagtttttcgtcc

SEQ ID NO: 4931 - protein, 158 aa, Homo sapien
MLLLDCNPEVDGLKHLLETGASVNAPPDPCKQSPVHLAAGSGLACFLLWQLQTGADLNQQDVLGEAPLHKAAKVGSLECLSLLVASDAQIDLCNKNGQTAEDLAWSCGFPDCAKFLTTIKCMQTIKASEHPDRNDCVAVLRQKRSLGSVENTSGKRKC

SEQ ID NO: 4932 - DNA, 3550 bp, Homo sapien
  Unsure 1158: Unknown base
gcgagaacctttgcacgcgcacaaactacggggacgatttctgattgatttttggcgctttcgatccaccctcctcccttctcatgggactttggggacaaagcgtcccgaccgcctcgagcgctcgagcagggcgctatccaggagccaggacagcgtcgggaaccagaccatggctcctggaccccaagatccttaagttcgtcgtcttcatcgtcgcggttctgctgccggtccgggttgactctgccaccatcccccggcaggacgaagttccccagcagacagtggccccacagcaacagaggcgcagcctcaaggaggaggagtgtccagcaggatctcatagatcagaatatactggagcctgtaacccgtgcacagagggtgtggattacaccattgcttccaacaatttgccttcttgcctgctatgtacagtttgtaaatcaggtcaaacaaataaaagttcctgtaccacgaccagagacaccgtgtgtcagtgtgaaaaaggaagcttccaggataaaaactcccctgagatgtgccggacgtgtagaacagggtgtcccagagggatggtcaaggtcagtaattgtacgccccggagtgacatcaagtgcaaaaatgaatcagctgccagttccactgggaaaaccccagcagcggaggagacagtgaccaccatcctggggatgcttgcctctccctatcactaccttatcatcatagtggttttagtcatcattttagctgtggttgtggttggcttttcatgtcggaagaaattcatttcttacctcaaaggcatctgctcaggtggtggaggaggtcccgaacgtgtgcacagagtccttttccggcggcgttcatgtccttcacgagttcctggggcggaggacaatgcccgcaacgagaccctgagtaacagatacttgcagcccacccaggtctctgagcaggaaatccaaggtcaggagctggcagagctaacaggtgtgactgtagagttgccagaggagccacagcgtctgctggaacaggcagaagctgaagggtgtcagaggaggaggctgctggttccagtgaatgacgctgactccgctgacatcagcaccttgctggatgcctcggcaacactggaagaaggacatgcanaggaaacaattcaggaccaactggtgggctccgaaaagctcttttatgaagaagatgaggcaggctctgctacgtcctgcctgtgaaagaatctcttcaggaaaccagagcttccctcatttaccttttctcctacaaagggaagcagcctggaagaaacagtccagtacttgacccatgccccaacaaactctactatccaatatggggcagcttaccaatggtcctagaactttgttaacgcacttggagtaatttttatgaaatactgcgtgtgataagcaaacgggagaaatttatatcagattcttggctgcatagttatacgattgtgtattaagggtcgttttaggccacatgcggtggctcatgcctgtaatcccagcactttgataggctgaggcaggtggattgcttgagctcgggagtttgagaccagcctcatcaacacagtgaaactccatctcaatttaaaaagaaaaaaagtggttttaggatgtcattctttgcagttcttcatcatgagacaagtctttttttctgcttcttatattgcaagctccatctctactggtgtgtgcatttaatgacatctaactacagatgccgcacagccacaatgctttgccttatagttttttaactttagaacgggattatctgttattacctgtattttcagtttcggatatttttgacttaatgatgagattatcaagacgtagccctatgctaagtcatgagcatatggacttacgagggttcgacttagagttttgagctttaagataggattattggggcttacccccaccttaattagagaaacatttatattgcttactactgtaggctgtacatctcttttccgatttttgtataatgatgtaaacatggaaaactttaggaaatgcacttattaggctgtttacatgggttgcctggatacaaatcagcagtcaaaaatgactaaaaatataactagtgacggagggagaaatcctccctctgtgggaggcacttactgcattccagttctccctcctgcgccctgagactggaccagggtttgatggctggcagcttctcaaggggcagcttgtcttacttgttaattttagaggtatatagccatatttatttataaataaatatttatttatttatttataagtagatgtttacatatgcccaggattttgaagagcctggtatctttgggaagccatgtgtctggtttgtcgtgctgggacagtcatgggactgcatcttccgacttgtccacagcagatgaggacagtgagaattaagttagatccgagactgcgaagagcttctctttcaagcgccattacagttgaacgttagtgaatcttgagcctcatttgggctcagggcagagcaggtgtttatctgccccggcatctgccatggcatcaagagggaagagtggacggtgcttgggaatggtgtgaaatggttgccgactcaggcatggatgggcccctctcgcttctggtggtctgtgaactgagtccctgggatgccttttagggcagagattcctgagctgcgttttagggtacagattccctgtttgaggagcttggcccctctgtaagcatctgactcatctcagagatatcaattcttaaacactgtgacaacgggatctaaaatggctgacacatttgtccttgtgtcacgttccattattttatttaaaaacctcagtaatcgttttagcttctttccagcaaactcttctccacagtagcccagtcgtggtaggataaattacggatatagtcattctaggggtttcagtcttttccatctcaaggcattgtgtgttttgttccgggactggtttggctgggacaaagttagaactgcctgaagttcgcacattcagattgttgtgtccatggagttttaggaggggatggcctttccggtcttcgcacttccatcctctcccacttccatctggcgtcccacaccttgtcccctgcacttctggatgacacagggtgctgctgcctcctagtctttgcctttgctgggccttctgtgcaggagacttggtctcaaagctcagagagagccagtccggtcccagctcctttgtcccttcctcagaggccttccttgaagatgcatctagactaccagccttatcagtgtttaagcttattcctttaacataagcttcctgacaacatgaaattgttggggttttttggcgttggttgatttgtttaggttttgctttatacccgggccaaatagcacataacacctggttatatatgaaatactcatatgtttatgaccaaaataaatatgaaacctcatgttaaaaaaaaaaaaaaaaaaaaaaaaaaaaaaa

SEQ ID NO: 4933 - protein, 386 aa, Homo sapien
  unsure 359: unknown amino acid
MGLWGQSVPTASSARAGRYPGARTASGTRPWLLDPKILKFVVFIVAVLLPVRVDSATIPRQDEVPQQTVAPQQQRRSLKEEECPAGSHRSEYTGACNPCTEGVDYTIASNNLPSCLLCTVCKSGQTNKSSCTTTRDTVCQCEKGSFQDKNSPEMCRTCRTGCPRGMVKVSNCTPRSDIKCKNESAASSTGKTPAAEETVTTILGMLASPYHYLIIIVVLVIILAVVVVGFSCRKKFISYLKGICSGGGGGPERVHRVLFRRRSCPSRVPGAEDNARNETLSNRYLQPTQVSEQEIQGQELAELTGVTVELPEEPQRLLEQAEAEGCQRRRLLVPVNDADSADISTLLDASATLEEGHAXETIQDQLVGSEKLFYEEDEAGSATSCL

SEQ ID NO: 4934 - DNA, 3741 bp, Homo sapien
  Unsure 2475-2760: Unknown base
ggtgagaagcactagaaatatccattcagttattagtggggattaggttcaggtctgttgtttaaggagcccttaaactttaaatttcaacacaggaatggaggtccctgtgtaaggattgggaatgggacctaataactgctccctcaaggtgagttgcgagtcagctggccatctccatctcccatgcattaccttgatgtaccttccagtccaccatctgcttgtgcaccaggctgcacctactgttccatgatggaagggaaggtagaagttgggctggaaggagatgttggtccagatctgggtacatttaccccttgtggtacctcttgggagcaagaaagtccaggccctggagccttccactgacaactcttgaaggcccacctcaactgaagcctcactgatagcactttcatgagatgctggtcagggaagagcttctgatttggcctaggctagtggcagtgccaccaggcaattgcttaaaatcttctttctgccaaattctgtgatgtattaaagtatgcgatacatgaaaattgagagtggctttggttttgttgtaggtctggatctatttacctttattaagctctggagactgacatatgatatttttagatgtatgagtgcagatttatggagatattggttctggatttagtatgagatgctaaacctggtccccattgttctcaaggccactgcacctggccgataacagatgttttaatagtaagataaaaagtaaaatttccagtgtgtcgaaggaagaaaattacagcctagaattttatcttcatgtacattatttaagtgtgagggaatagtttcagtgacattatgtcattgaagaccttagaagatttccctcgctaaaggagataaagcgactggcacaacatgtatttctctgagtaagtagaagtgttcttttctggctgtactgaagggactttcatgatttcttcgtttttgtactcttagttttataatattgcatagtagctaaggcctggctgtagcagttataaactgttctgcaagtgcgggaagtaatagttattcctatctcaaggatgtggggtttaaatgggttagtgcacaaaaggacatttattaaatttagtcataatcatctcaaggacatggtaagtgaaagagtgtacataaagtacttaatgtaatgttgctacttaatgttcaataactcaaagagaccaccaccactactacattttacttttattagtaattaataataattaataattagtaattcagtggtaattagtatactaccaaagaaagtacttgagcagaagagccaaaattcaaaccatagaatcattttactgtgcttttattctacctcaaacactaatctccaggccttggataaagggattatttctctgaaggggaaagttatcctctttttgcccaagtcacacttgtgtcatttcttatactgtaaacatgtggttccaattctgaggtattttcccggcttgtaggacccaaaaagaagttaggcttgagaaattttaagtgaagagaacaattctagttcagagtgattggctcttcctaaaagctgacatttgactgaaaattttgaggggagggaaagaaacaataccttttacggcatgtaataggaagaagacctggattttagttgctgctctgatgtcccaacttgggtaaggcaacataacataaatgtcagtttcttcagatttgtgatgaagctgataatccatgctcagcttcctttatgggtctcttgcctatcaaataaggtacagtatgtgaagatacattgcagattatcttatgcattgcttcaggggatgattaaaccatcctttattatagccagagtctagtctaagggaagaaggtcattctctataccagtgaaggctccatccaaaccagtgtttgggggcatagtcataattgaaaaatgattgttttccttatctgtaaaacaggtaaatggtattaatcctcaggtggttgtgaggattaagtgatacatgtaaaaaaaagaaagctttggatagtacctattataagaaactcagtgttgctgcaatgtatgtattataatggatttgaaatttgccctaaccaagagtcacagacagaaaaaaggaagttaatgtatctcttgatcactatcaagatgtggtattgaaccttcaagatccttttcagggaatatgtgagatcaaaatttttatactggcactatgatgttatttgccttttcctcatattcacaagtgaacagtggagttttacagaagctatataatgtcatgacatcactgatgggtaatagaatgtgtgcttgtatattccgaaactttcagttccaatttcttcgatcaatgtaatcctcataagtaaaagttatttgaggacctcagacatttttaaaaatgtaaagggggtggnnnnnnnnnnnnnnnnnnnnnnnnnnnnnnnnnnnnnnnnnnnnnnnnnnnnnnnnnnnnnnnnnnnnnnnnnnnnnnnnnnnnnnnnnnnnnnnnnnnnnnnnnnnnnnnnnnnnnnnnnnnnnnnnnnnnnnnnnnnnnnnnnnnnnnnnnnnnnnnnnnnnnnnnnnnnnnnnnnnnnnnnnnnnnnnnnnnnnnnnnnnnnnnnnnnnnnnnnnnnnnnnnnnnnnnnnnnnnnnnnnnnnnnnnnnnnnnnnnnnnnnnnnnnnnnnnnnnnnnnnnnnnnggtgtacagggattgtatatttgacaacttggtatgtaggatgtgctacctctaatgttccatgctgttacttagttttcactcactactatattttggagatttgttcatattgctctgtgtacatttaattcttcagtgtgtatccaccacatttaacttattcacttacagaactatgcaagaatttctctggtaaatttcactaagtacttatgtacttttcagaacgattgtgagtttacacccctaccagcaggactgagttgagtacccatttcctcacatccttgccagtacttcatttgcctaatttttgccattctcataatgtggcaattgttcaattttgcatttcttccattttatttttttgcatctctgcttttcttttggttagctttgccagttctgcctattatattaatctcccagaatcagcttttagttttgttaaatctctgacatgtttcgttgattcctgctttcatcttaaacatttcttcgttgttaatttgtgtttgctataaaataagcaacatcttaaatgcttgatttgctttcgatgtttattctgtaataagatatttaaagatataattttttccctaaatgctttattagacttttctcataagttttgactggtactgttttcattgttatttaattttgtgttttttaacttctttcatgatttccttttaactgaaggttttcttagatatttagtttgctggtatattcttttaaaattgtatcattgctttctttctatattggattattgtcagagaacatgatttgcatgatattaactttttggagtatattgttgcatctttgtggcctagtacatagttaatttagtgaatgcttccagttgtacttgaaaagaatgtatattttctgattattgagggtaaatttctctatatatgttttcctgtttaataaatatgtagctatgtgcttatgaaa

SEQ ID NO: 4935 - protein, 14 aa, Homo sapien
VRSTRNIHSVISGD

SEQ ID NO: 4936 - DNA, 3132 bp, Homo sapien
ccgcagaacttggggagccgccgccgccatccgccgccgcagccagcttccgccgccgcaggaccggcccctgccccagcctccgcagccgcggcgcgtccacgcccgcccgcgcccagggcgagtcggggtcgccgcctgcacgcttctcagtgttccccgcgccccgcatgtaacccggccaggcccccgcaacggtgtcccctgcagctccagccccgggctgcacccccccgccccgacaccagctctccagcctgctcgtccaggatggccgcggccaaggccgagatgcagctgatgtccccgctgcagatctctgacccgttcggatcctttcctcactcgcccaccatggacaactaccctaagctggaggagatgatgctgctgagcaacggggctccccagttcctcggcgccgccggggccccagagggcagcggcagcaacagcagcagcagcagcagcgggggcggtggaggcggcgggggcggcagcaacagcagcagcagcagcagcaccttcaaccctcaggcggacacgggcgagcagccctacgagcacctgaccgcagagtcttttcctgacatctctctgaacaacgagaaggtgctggtggagaccagttaccccagccaaaccactcgactgccccccatcacctatactggccgcttttccctggagcctgcacccaacagtggcaacaccttgtggcccgagcccctcttcagcttggtcagtggcctagtgagcatgaccaacccaccggcctcctcgtcctcagcaccatctccagcggcctcctccgcctccgcctcccagagcccacccctgagctgcgcagtgccatccaacgacagcagtcccatttactcagcggcacccaccttccccacgccgaacactgacattttccctgagccacaaagccaggccttcccgggctcggcagggacagcgctccagtacccgcctcctgcctaccctgccgccaagggtggcttccaggttcccatgatccccgactacctgtttccacagcagcagggggatctgggcctgggcaccccagaccagaagcccttccagggcctggagagccgcacccagcagccttcgctaacccctctgtctactattaaggcctttgccactcagtcgggctcccaggacctgaaggccctcaataccagctaccagtcccagctcatcaaacccagccgcatgcgcaagtatcccaaccggcccagcaagacgcccccccacgaacgcccttacgcttgcccagtggagtcctgtgatcgccgcttctcccgctccgacgagctcacccgccacatccgcatccacacaggccagaagcccttccagtgccgcatctgcatgcgcaacttcagccgcagcgaccacctcaccacccacatccgcacccacacaggcgaaaagcccttcgcctgcgacatctgtggaagaaagtttgccaggagcgatgaacgcaagaggcataccaagatccacttgcggcagaaggacaagaaagcagacaaaagtgttgtggcctcttcggccacctcctctctctcttcctacccgtccccggttgctacctcttacccgtccccggttactacctcttatccatccccggccaccacctcatacccatcccctgtgcccacctccttctcctctcccggctcctcgacctacccatcccctgtgcacagtggcttcccctccccgtcggtggccaccacgtactcctctgttccccctgctttcccggcccaggtcagcagcttcccttcctcagctgtcaccaactccttcagcgcctccacagggctttcggacatgacagcaaccttttctcccaggacaattgaaatttgctaaagggaaaggggaaagaaagggaaaagggagaaaaagaaacacaagagacttaaaggacaggaggaggagatggccataggagaggagggttcctcttaggtcagatggaggttctcagagccaagtcctccctctctactggagtggaaggtctattggccaacaatcctttctgcccacttccccttccccaattactattccctttgacttcagctgcctgaaacagccatgtccaagttcttcacctctatccaaagaacttgatttgcatggattttggataaatcatttcagtatcatctccatcatatgcctgaccccttgctcccttcaatgctagaaaatcgagttggcaaaatggggtttgggcccctcagagccctgccctgcacccttgtacagtgtctgtgccatggatttcgtttttcttggggtactcttgatgtgaagataatttgcatattctattgtattatttggagttaggtcctcacttgggggaaaaaaaaaaaaaaaagccaagcaaaccaatggtgatcctctattttgtgatgatgctgtgacaataagtttgaacctttttttttgaaacagcagtcccagtattctcagagcatgtgtcagagtgttgttccgttaacctttttgtaaatactgcttgaccgtactctcacatgtggcaaaatatggtttggtttttcttttttttttttgaaagtgttttttcttcgtccttttggtttaaaaagtttcacgtcttggtgccttttgtgtgatgccccttgctgatggcttgacatgtgcaattgtgagggacatgctcacctctagccttaaggggggcagggagtgatgatttgggggaggctttgggagcaaaataaggaagagggctgagctgagcttcggttctccagaatgtaagaaaacaaaatctaaaacaaaatctgaactctcaaaagtctatttttttaactgaaaatgtaaatttataaatatattcaggagttggaatgttgtagttacctactgagtaggcggcgatttttgtatgttatgaacatgcagttcattattttgtggttctattttactttgtacttgtgtttgcttaaacaaagtgactgtttggcttataaacacattgaatgcgctttattgcccatgggatatgtggtgtatatccttccaaaaaattaaaacgaaaataaagtagctgcgattggg

SEQ ID NO: 4937 - protein, 543 aa, Homo sapien
MAAAKAEMQLMSPLQISDPFGSFPHSPTMDNYPKLEEMMLLSNGAPQFLGAAGAPEGSGSNSSSSSSGGGGGGGGGSNSSSSSSTFNPQADTGEQPYEHLTAESFPDISLNNEKVLVETSYPSQTTRLPPITYTGRFSLEPAPNSGNTLWPEPLFSLVSGLVSMTNPPASSSSAPSPAASSASASQSPPLSCAVPSNDSSPIYSAAPTFPTPNTDIFPEPQSQAFPGSAGTALQYPPPAYPAAKGGFQVPMIPDYLFPQQQGDLGLGTPDQKPFQGLESRTQQPSLTPLSTIKAFATQSGSQDLKALNTSYQSQLIKPSRMRKYPNRPSKTPPHERPYACPVESCDRRFSRSDELTRHIRIHTGQKPFQCRICMRNFSRSDHLTTHIRTHTGEKPFACDICGRKFARSDERKRHTKIHLRQKDKKADKSVVASSATSSLSSYPSPVATSYPSPVTTSYPSPATTSYPSPVPTSFSSPGSSTYPSPVHSGFPSPSVATTYSSVPPAFPAQVSSFPSSAVTNSFSASTGLSDMTATFSPRTIEIC

SEQ ID NO: 4938 - DNA, 4066 bp, Homo sapien
ggcgaccgtggggaggtgccgccggggtcgcaggtgagcggttctatgctggaggaggcggccagggaagcggcggctccgtgaccagtgggtgccctcgcagtgggtagggtcccggaggggtcagcggcaattggcgcaacgcttgctgccgggtttggtccaagggctgcgacgtagcgggactgcacgctcgggagaagtgccacgcgcgtctgtcgcctgaccggggaggctggggagggcccaggccacggaaacaagactgcagaagtttctgggcactcagtcgggactctcatttaatacccagagagaggagatcttccaggttgccccgactcccaccgggactcctaccagcagcaacctcatcattgtggccgaggcaggtgcgcgcccctgctcccctgggtggccttccgggagcccagtctaactcgattcttcccaggggctctttttggacggtcccaaaggaggcagcgggagggaggtgaaagatactttgataaccgtcgacccataagtatacttgttatgcacctaccacgagttttagagaagaacatactttttggcagggaagtgaatcccctataagaatataggggaggggaaagccacactttaaagagaatttgggtagggtttgatattgtagatttgtgatgcttttcttcttgaactgcttaactaatttaccctcaaatttttttgatccggaacttgccgtctggtttttctcagacttcttaattctgacttatcatgaagtatctaggaacttcattctcaagtttcagtgcttgtaaaaagttgcctggttatattatgccattggcagtacatcatcttcacaaggattacgtaagtgaactacatctcattcctgtttccaactagtgaagaacgattgtgaaatgggattttagaaaatggctgttctctgtgactgggcatagaaggtttgtaagttttagagactgcagctgttgaatcctttctgctaagagagcgatgacaggcaatagaaaagggatagtgtttgacatctaaaatgacatattttcacattttatgaggtgttatatccccagcaccaaaaatagtgcctttcacacagtaggagctcagtaagtattttttgaggaaattattggggaatgaatggatggtagaaaacccaagcttctgttacttggataccggcatataaaggagaggacaggaagacaaacatttctggaaatggcttttatccaggaattatccagactgccttgccactagatgaatggaagacaatgatttgaactaagggccagcaaagaattatccctggtttttgtgctttgcagcattcctcaaattgttttcacatctcttaccataaaaactgcattgaaattgaaaatgaagcagttgaaaagaaaaaggaaaagcaattttagtgttcaagaaactcagacccttttgaaagaaattacgaaaaggaaagaagtcattttttccaagcagctcaatacaacaattaatgtgatgaagcgaatggcttgggaagagattgcacagtgtgtgaatgctgtaggagaaggagaacagaggacagggacggaggtgaaaagaaggtaccttgactggcgagcacttatgaagagaaagaggatgaaggccaacattaagctggttggttcaggatttccccttccctcctctgatttggatgactctctcactgaagagatagatgaaaagattggattccgaaatgatgcaaattttgactggcaaaatgtggcagatttcagggatgcaggtggatccttaactgaggtcaaggtggaagaggaagaaagggatccgcagagtcctgaatttgaaattgaggaggaggaagaaatgttgtcatccgtcataccagattccaggagagaaaatgaacttcccgatttcccccacattgatgagttttttacccttaactcaacaccatctagatctgcatatgatgagcctcatttgctcgtaaatattgagaaacagaaactagagttggaaaaacgacgactggatatcgaggccgaaaggctgcaggtagaaaaggaacgcctacaaatcgagaaagagaggctgcggcatttagacatggaacatgagcggcttcagctagagaaggagcggctgcagattgaaagagaaaagttgaggttacagatagtcaattcagagaaaccgtccttggaaaatgaacttggtcaaggagaaaaatccatgcttcaaccacaggacatagaaacagagaagttaaaacttgagcgagaacgcttgcaactggaaaaggataggctgcagtttttgaagtttgaatctgagaagctgcagattgaaaaggaacgcttacaggtagagaaagacagacttcgaattcagaaagaaggacacttgcagtgatttttccaggcttccatttagcaaatgtttgaaaactctagatttttctcatatcaggtgatataatgatggttgctggattagctgtggtttcttgtctaatgtcagtgttcagtaggaaaaagttatatgtggataactgtatgcctaagtagtatataaaagctgtgccctagcgtaaacagtatagcagaaacttactgtgctggactctttaccttataatattacatagagtcttgtattgtctgtgtacccagagtttacaattatgtccatataaaattctagcccagaagttctcatctggggtagattttggccttcagaagaccaatttggtgatgtctggagacatgttgggttgtcaaaactggggtggggaaaaggttgctactgtgcaatgcatacctcctcaacacccccccacactcagtaaagaattttccaacccaaaatatcattagtcctgaggttgagaaaccctgtcctagcctaactgtgtacctctatagctatgttttatagttttagaatattaaaacctcagatatttatgtgggtaggtacttaaatggccaaaaactttaactatgaaatgttactgtgtagtatattgaatataggaagtgatgaagattataggtattttattcccatgtttccatctataaatagccttctcagattcagaaaacaatacagagaacatcagaaattttctaaaatgggtcactttgaaaagaattctttttctcactattaatgctttagaagcaagacgcaattttaaagctttagttccttttctttcagtcattgtcttagtttgggtacaaaaatgtcatttcagtaatgtactgaaatcttataagtgaatagttgaagctagtaaaaatgataccagtataaaaatggtacttgtagtccatgagcttgaacccaatgactgattgtttgacttttaaaataagtaatagcagccatttgggagtagggggtaggtggggaagatgtactccgtatcaaataataatgatgttgaaataatgatagtaggtatgtattatggattggagaagcacttattacactatctaacctaatatgtagaacaattcttgagagttgtatctgtcgttatttctgaatgtgaagctcagagaagtgacacagagtaaatggctgatcttctatattgtagtatattttgtccttccctcttccctgaggaacaaagcacgtatctttagtctctttgatatttattctgagaccaagggcttgcttgacctgatgattttccttcagctctctgaaggtgctttttccacaatccaagtgattctgatacacactaaagttgagaatcactgcactagatcactttgtgttttctgattttcaaggttgatacgtagctttaatacagctcttctgttgacagttattactttaattttgcatttgttccttgtaagaatggctggaaactgtgtgttgacatttgaggatgggtatgcaaggaaaaaatatacttctgtttacttactctgactttgaaatagtgttatttttctatatctgaaataaatgcttctaccatagaaat

SEQ ID NO: 4939 - DNA, 2794 bp, Homo sapien
acttatcttgcatgggcaaggggatttccaaaaaatccttgacacctattcacagcaccatacttcggtgtgtgaagtatttgaaagtgattgtggaaacaacaaaaatgaacagaaagatgcaaaaacaggagtctgcatcactgctctaaaaacagaaataaaaaacatagatactgtgagtactactcaagaaaagccacattgtcaaagagacacaggaatatcttcctccctaatgggtaagaatgttcagagggaactcagaaggggaggaaggagaaactggacccattctgatgcatttcgagtctccttggatcaagatgtggagactgagactgagccatcggactacagcaatgatgagggagctgttttcaacaagtctctgagtggcagccagacttccagtgcttggagcaacttatcagggtttagttcctctgcaagctgggaggaagtgaattatcacgttgacgacaggtcagccagaaaagagcctggcaaagaacatctggtggacactcagtgttccactgccttgtctgaggagctagagaatgacagggaaggcagagctatgcattcattgcgttcacagcttcatgatctctctcttcaggaacccaacaatgacaatttggagccttctcaaaatcagccacagcaacagatgcccttgacacccttctcgcctcataataccccaggcattttcttggcccctggtgcagggcttctagaaggagctccagaaggtatccaggaagtcagaaatatgggacccagaaatacttctgctcactccagaccctcatatcgttctgcttcttggtcttctgattctggtaggcccaagaatataggcacacatccttcagtccaaaaagaagaagcctttgaaataattgttgagtttccagaaaccaactgcgatgtcaaagacaggcaggggaaagagcagggagaagaaattagtgaaagaggcgcaggccctacatttaaagctagtccctcttgggttgacccagaaggagaaacagcagaaagcactgaagatgcacccttagactttcacagggtcctgcacaattctctgggaaacatttccatgctgccatgtagctccttcacccctaattggcctgttcaaaatcctgactccagaaaaagtggtggcccagtcgcagagcagggcatcgaccctgatgcctccacagtggatgaggaggggcaactgctcgacagcacggatgttccctgcacaaatgggcacggctctcatagactgtgcattctgagacagccgcctggtcagagggcggagacccccaattcctctgtaagcggtaacatcctcttccctgtcctcagcgaggactgcactaccacagaggaaggaaatcagcctggaaacatgctaaactgcagccagaactccagctcatcctcagtgtggtggctgaaatcacctgcattttccagtggttcttctgagggggacagcccttggtcctatctgaattccagtgggagttcttgggtttcattgccgggaaagatgaggaaagagatccttgaggctcgcaccttgcaacctgatgactttgaaaagctgttggcaggagtgaggcatgattggctgtttcagagactagagaatacgggggtttttaagcccagtcaactccaccgagcacatagtgctcttttgttaaaatattcaaaaaaatctgaactgtggacggcccaggaaactattgtctatttgggggactacttgactgtgaagaaaaaaggcagacaaagaaatgctttttgggttcatcatcttcatcaagaagaaattctggggaggtatgttgggaaagactataaggagcagaaggggctctggcaccacttcactgatgtggagcggcagatgaccgcacagcactatgtgacagaatttaacaagagactctatgaacaaaacattcccacccagatattctacatcccatccacaatactactgattttagaggacaagacaataaagggatgtatcagtgtggagccttacatactgggagaatttgtaaaattgtcaaataacacgaaagtggtgaaaacagaatacaaagccacagaatatggcttggcctatggccatttttcttatgagttttctaatcatagagatgttgtggtcgatttacaaggttgggtaaccggtaatggaaaaggactcatctacctcacagatccccagattcactccgttgatcagaaagttttcactaccaattttggaaagagaggaattttttacttctttaataaccagcatgtggaatgtaatgaaatctgccatcgtctttctttgactagaccttcaatggagaaaccatgcacatagaatacggcacagtctggtcctttggggcttgggcagggccgtgacacaggttctggccaatgatttgcaagaggaattgatcagtatcactttaagccctgcatttaattggcagcacaagatcctgcagagcctctttccctctgccacagttatcaagaatgggtcaggagaccgctgcttctgggcataagtcctgcaaggaaagcaacatggaaaacagccccaactcacccatgagggatgaaaagcactgttgagaaaggcatgtgttgtttaagccattgagattttagagctttttgtcactatctgtcaagactgatactactggggcttttcctattgatttgggagttctttacatattaaaaaaatgtgagcctt

SEQ ID NO: 4940 - DNA, 2059 bp, Homo sapien
gcagtgatataaatatatttttttcttagactaaatatgagctgactatctcttttgatgtgtgtacataggtgtgagtgtgtgtgtatgcgtgcctgtctgtgtgcgggtgtgtgtatgtgcatagcctcatgcttaggactacccatgaatgttgtggaatgctacacctggagagttctggttttccaccagtttcaagatgaagaactacatgatacagtggacctggagaccatccccttggaaagacaacccagagatgttcagcatcctgtatctacacgcatcctgtatctacacgtgtattttgtagctgtcacactaaccttaataagaattctacagctttggacagaggcattttcaccttaatggtgaagtaatttaaaatataaatccattcaggtgacaacccatcatcaaaattacaaattttctgattgaactcatctgaatcatcagttccttgatggagagagagaaggagatggaatgtgtctggtaaccccaaatggagtacaagtagcctttgttttcctgcataaatggacttgttgaatgcgaacgaatatatgcaattcatatacttttggagatgaacgtagatatgtgtgtcagctttgagatggtgtgtcctggattaatactttgtctcccaatatcacagaaaaatacatgccagtgactcttgaggttaaggtagttgggatgaaatggcctcaggcaatttcacattccctaattacctggaaagttctacagtaattaatatgcagctaactcctgttgccctcacaagagcatcagccttctagaatcggagctccggagtgtgaagattcagtattgatatgatatgtataccaaactccagccaacttactgccatttttcataatctgagtggctgccttgcttatcctaagctgtggttgcagaaaccgtggccatttatataagctataacatcaaatcagggaaaaatgaggaaaaaaaatagattctgaaccatttattgttgaataagtagagaaaatcatcaataaatatttattacattctgacagggtgtgtggcattgtgttctatgccagagtgacaaagttgattcacccctttttggggaccttaatatattttttaagggatgtgcctatgcattgatgcctgaaaaatatgtataaagaaatgaggttgactcttctgagcagttcatcttttccagaggtaagggtaggaggccaacttcaggatctgggtctaagcccgtgggcaagccctggccgagtgagctccaatgctaactcatgtgccgatctctagagcagtgggaaactaccccgctgcaccaaatcaagtagcttcaccttgtgtatgcaggccccaagttattttttagcaatcttacgagtgaaatgttctggtgggttgaaaaacgttcttattttaaagaaaggttgtgctcgctacactgctggtgtgtgcgttctgagacctcttgtattcaatctgtgaaggatatgtgtattaatccgtacacccgtatagcctcaatatttgtctgaagacacttaaattctgacccataaaggaaagttctagaagcaatattttcacttatttaacattctccaaacaacatcaagcattgatacacactgaagagtgcgtttattttttgtatcactctaagtatgttggaatatgcaaggactgtggttcaaattagaatgtataaggcatattataatttagttcatactgaaaaagaaattaacagaacattgttcggttcacacgttccaaaatttgagtgatttctggagttagacatagattttctattttgttttaatttgtcaaggtatttttcttcccttcatgaactttaggtacacataacttatgtcatttatttatggtcttttatacctagtttgtaaaattgtaaaatagcaaactaaatgcaaagagtttgcatttgaaaataataaagtagttaccgtatacaaaaaaaaaaaaaaaaaaaaaaaaaaaaaaaaaaaaaaaaaaaaaa

SEQ ID NO: 4941 - protein, 105 aa, Homo sapien [sequence omitted]

SEQ ID NO: 4942 - DNA, 1562 bp, Homo sapien
aacacaaagtccagggttggagcaggagcaggggagggacaatggaagctgccccgtccaggttcatgttcctcttatttctcctcacgtgtgagctggctgcagaagttgctgcagaagttgagaaatcctcagatggtcctggtgctgcccaggaacccacgtggctcacagatgtcccagctgccatggaattcattgctgccactgaggtggctgtcataggcttcttccaggatttagaaataccagcggtgcccatactccatagcatggtgcaaaaattcccaggcgtgtcatttgggatcagcactgattctgaggttctgacacactacaacatcactgggaacaccatctgcctctttcgcctggtagacaatgaacaactgaatttagaggacgaagacattgaaagcattgatgccaccaaattgagccgtttcattgagatcaacagcctccacatggtgacagagtacaaccctgtgactgtgattgggttattcaacagcgtaattcagattcatctcctcctgataatgaacaaggcctccccagagtatgaagagaacatgcacagataccagaaggcagccaagctcttccaggggaagattctctttattctggtggacagtggtatgaaagaaaatgggaaggtgatatcatttttcaaactaaaggagtctcaactgccagctttggcaatttaccagactctagatgacgagtgggatacactgcccacagcagaagtttccgtagagcatgtgcaaaacttttgtgatggattcctaagtggaaaattgttgaaagaaaatcgtgaatcagaaggaaagactccaaaggtggaactctgacttctccttggaactacatatggccaagtatctactttatgcaaagtaaaaaggcacaactcaaatctcagagacactaaacaacaggatcactaggcctgccaaccacacacacacgcacgtgcacacacgcacgcacgcgtgcacacacacacgcgcacacacacacgcacacacacagagcttcatttcctgtcttaaaatctcgttttctcttcttccttcttttaaatttcatatcctcactccctatccaatttccttcttatcgtgcattcatactctgtaagcccatctgtaacacacctagatcaaggctttaagagactcactgtgatgcctctatgaaagagaggcattcctagagaaagattgttccaatttgtcatttaatatcaagtttgtatactgcacatgacttacacacaacatagttcctgctcttttaaggttacctaagggttgaaactctaccttctttcataagcacatgtccgtctctgattcaggatcaaaaaccaaaggatggttttaaacacctttgtgaaattgtctttttgccagaagttaaaggctgtctccaagtccctgaactcagcagaaatagaccatgtgaaaactccatgcttggttagcatctccaactccctatgtaaatcaacaacctgcataataaataaaaggcaatcatgttatagg

SEQ ID NO: 4943 - protein, 273 aa, Homo sapien
MEAAPSRFMFLLFLLTCELAAEVAAEVEKSSDGPGAAQEPTWLTDVPAAMEFIAATEVAVIGFFQDLEIPAVPILHSMVQKFPGVSFGISTDSEVLTHYNITGNTICLFRLVDNEQLNLEDEDIESIDATKLSRFIEINSLHMVTEYNPVTVIGLFNSVIQIHLLLIMNKASPEYEENMHRYQKAAKLFQGKILFILVDSGMKENGKVISFFKLKESQLPALAIYQTLDDEWDTLPTAEVSVEHVQNFCDGFLSGKLLKENRESEGKTPKVEL

SEQ ID NO: 4944 - DNA, 3639 bp, Homo sapien
ctcgaggctccgcaccagccgcgcttctgtccgcctgcagggcattccagaaagatgaggatatttgctgtctttatattcatgacctactggcatttgctgaacgcatttactgtcacggttcccaaggacctatatgtggtagagtatggtagcaatatgacaattgaatgcaaattcccagtagaaaaacaattagacctggctgcactaattgtctattgggaaatggaggataagaacattattcaatttgtgcatggagaggaagacctgaaggttcagcatagtagctacagacagagggcccggctgttgaaggaccagctctccctgggaaatgctgcacttcagatcacagatgtgaaattgcaggatgcaggggtgtaccgctgcatgatcagctatggtggtgccgactacaagcgaattactgtgaaagtcaatgccccatacaacaaaatcaaccaaagaattttggttgtggatccagtcacctctgaacatgaactgacatgtcaggctgagggctaccccaaggccgaagtcatctggacaagcagtgaccatcaagtcctgagtggtaagaccaccaccaccaattccaagagagaggagaagcttttcaatgtgaccagcacactgagaatcaacacaacaactaatgagattttctactgcacttttaggagattagatcctgaggaaaaccatacagctgaattggtcatcccagaactacctctggcacatcctccaaatgaaaggactcacttggtaattctgggagccatcttattatgccttggtgtagcactgacattcatcttccgtttaagaaaagggagaatgatggatgtgaaaaaatgtggcatccaagatacaaactcaaagaagcaaagtgatacacatttggaggagacgtaatccagcattggaacttctgatcttcaagcagggattctcaacctgtggtttaggggttcatcggggctgagcgtgacaagaggaaggaatggacccgtgggatgcaggcaatgtgggacttaaaaggcccaagcactgaaaatggaacctggcgaaagcagaggaggagaatgaagaaagatggagtcaaacagggagcctggagggagaccttgatactttcaaatgcctgaggggctcatcgacgcctgtgacagggagaaaggatacttctgaacaaggagcctccaagcaaatcatccattgctcatcctaggaagacgggttgagaatccctaatttgagggtcagttcctgcagaagtgccctttgcctccactcaatgcctcaatttcttttctgcatgactgagagtctcagtgttggaacgggacagtatttatgtatgagtttttcctatttattttgagtctgtgaggtcttcttgtcatgtgagtgtggttgtgaatgatttcttttgaagatatattgtagtagatgttacaattttgtcgccaaactaaacttgctgcttaatgatttgctcacatctagtaaaacatggagtatttgtaaggtgcttggtctcctctataactacaagtatacattggaagcataaagatcaaaccgttggttgcataggatgtcacctttatttaacccattaatactctggttgacctaatcttattctcagacctcaagtgtctgtgcagtatctgttccatttaaatatcagctttacaattatgtggtagcctacacacataatctcatttcatcgctgtaaccaccctgttgtgataaccactattattttacccatcgtacagctgaggaagcaaacagattaagtaacttgcccaaaccagtaaatagcagacctcagactgccacccactgtccttttataatacaatttacagctatattttactttaagcaattcttttattcaaaaaccatttattaagtgcccttgcaatatcaatcgctgtgccagggcattgaatctacagatgtgaggcaagacaaagtacctgtcctcaaggagctcatagtataatgaggagattaacaagaaaatgtattattacaatttagtccagtgtcatagcataaggatgatgcgaggggaaaacccgagcagtgttgccaagaggaggaaataggccaatgtggtctgggacggttggatatacttaaacatcttaataatcagagtaattttcatttacaaagagaggtcggtacttaaaataaccctgaaaaataacactggaattccttttctagcattatatttattcctgatttgcctttgccatataatctaatgcttgtttatatagtgtctggtattgtttaacagttctgtcttttctatttaaatgccactaaattttaaattcatacctttccatgattcaaaattcaaaagatcccatgggagatggttggaaaatctccacttcatcctccaagccattcaagtttcctttccagaagcaactgctactgcctttcattcatatgttcttctaaagatagtctacatttggaaatgtatgttaaaagcacgtatttttaaaatttttttcctaaatagtaacacattgtatgtctgctgtgtactttgctatttttatttattttagtgtttcttatatagcagatggaatgaatttgaagttcccagggctgaggatccatgccttctttgtttctaagttatctttcccatagcttttcattatctttcatatgatccagtatatgttaaatatgtcctacatatacatttagacaaccaccatttgttaagtatttgctctaggacagagtttggatttgtttatgtttgctcaaaaggagacccatgggctctccagggtgcactgagtcaatctagtcctaaaaagcaatcttattattaactctgtatgacagaatcatgtctggaacttttgttttctgctttctgtcaagtataaacttcactttgatgctgtacttgcaaaatcacattttctttctggaaattccggcagtgtaccttgactgctagctaccctgtgccagaaaagcctcattcgttgtgcttgaacccttgaatgccaccagctgtcatcactacacagccctcctaagaggcttcctggaggtttcgagattcagatgccctgggagatcccagagtttcctttccctcttggccatattctggtgtcaatgacaaggagtaccttggctttgccacatgtcaaggctgaagaaacagtgtctccaacagagctccttgtgttatctgtttgtacatgtgcatttgtacagtaattggtgtgacagtgttctttgtgtgaattacaggcaagaattgtggctgagcaaggcacatagtctactcagtctattcctaagtcctaactcctccttgtggtgttggatttgtaaggcactttatcccttttgtctcatgtttcatcgtaaatggcataggcagagatgatacctaattctgcatttgattgtcactttttgtacctgcattaatttaataaaatattcttatttattttgttacttggtacaccagcatgtccattttcttgtttattttgtgtttaataaaatgttcagtttaacatcccagtggagaaagttaaaaaa

SEQ ID NO: 4945 - protein, 308 aa, Homo sapien
LEAPHQPRFCPPAGHSRKMRIFAVFIFMTYWHLLNAFTVTVPKDLYVVEYGSNMTIECKFPVEKQLDLAALIVYWEMEDKNIIQFVHGEEDLKVQHSSYRQRARLLKDQLSLGNAALQITDVKLQDAGVYRCMISYGGADYKRITVKVNAPYNKINQRILVVDPVTSEHELTCQAEGYPKAEVIWTSSDHQVLSGKTTTTNSKREEKLFNVTSTLRINTTTNEIFYCTFRRLDPEENHTAELVIPELPLAHPPNERTHLVILGAILLCLGVALTFIFRLRKGRMMDVKKCGIQDTNSKKQSDTHLEET

SEQ ID NO: 4946 - DNA, 3774 bp, Homo sapien
  Unsure 2829-3124: Unknown base
agtggagcctgcaccgcccgctcccggcacccccggacaccgccccggtctcacgcatgcgcagagggccgatccagttcttttcggctggaatggggaatttgtgaggtcaaggatgcattccaggaaagttctataaaaatataccatcaactccaacctgatatttgacctagccatggaaaacctcattggctcctcactggatcagaccataaaaatgatccaggaatgaaaatctaagataaattcccaccacttcaagatgttcttatacaagtcaacagtctagcagatcagccagtctctttcatcatcaagcagacatactcaagaaagaggaatagtgaagtgaaatatacagaagcatgttcaagttcatctgttgaatctggaattgtgaatagtgacaatattgagaaaaatactgactccaatctgcaaacttcaacttcatttgagccacatttcaaaaagaaaaaagtaagtgcaagacgttataatgaagattacttaaaatatggctttatcaaatgtgaaaaaccctttgaaaatgacagacctcagtgtgttatttgtaataatattcttgcgaatgaaagcttaaaaccttcgaaattaaaaaggcacttagaaactcagcatgctgaacttattgataagcctcttgaatattttcaaagaaagaaaaaagacataaagttatcaacacaatttcttagttgttctactgctgttagtgagaaagccttattatcatcatatttagttgcatatcgtgtggcaaaagagaaaatagctaacacagctgctgaaaaaattattcttccagcatgtttggatatggtgcgtacaatatttgatgataaatcagctgataaattaaaaactatacctaatgataacacagtatctcttcgaatttgtactattgcagaacatttagaaacaatgcttattactcgtttacagtctggtatagattttgcaatccagcttgatgaaagcactgatattggaagctgcacaacacttttagtttatgtcagatatgcgtggcaagatgattttttggaggattttttgtgttttttaaatttaacctcacacctaagtggattagatatttttacagaattagaaaggcgcatagttggccaatataaattaaactggaaaaactgtaaaggaattacaagtgatggcacagcaaccatgactggaaaacatagcagagtaattaaaaaattactagaagttactaataatggtgctgtgtggaatcattgttttatacatcgtgaaggtttagcatccagagaaattccacagaatctcatggaagtattgaaaaatgcagtgaaagttgttaattttattaaaggaagctcattgaatagccggcttcttgaaacattttgttcagagattggaactaatcatacccacttactatatcataccaaaattcgttggttgtctcaagggaaaatactaagcagggtttatgagctcaggaatgagattcacttttttctcattgaaaaaaaatctcatttggcaagtatttttgaagatgatacttgggtaacaaaattggcatatttaactgatatttttagcattcttaatgaactgagtttaaaactacaggggaaaaacagtgatgtattccaacatgttgaacgtatccagggatttcgaaagacattattgttatggcaagtaagacttaaaagtaatcgtcctagctattacatgtttccaagatttttgcagcatattgaagagaatattattaatgaaaacattttgaaagaaataaaattagagatattgttgcatctcacttctctgtctcaaacttttaaccatttctttccagaagaaaaatttgaaacattaagggaaaacagttgggtaaaagatccatttgcttttcgaaaccctgaatcaataattgagctaaacttggtgcctgaagaagagaatgaattattgcagcttagttcttcatatacattgaagaatgattatgaaaccttaagtttatcagcattttggatgaaggtaaaggaagactttccattgttaagtagaaagagtgtcctgctattgctaccattcacaacaactagtttgtgtgaactagggttttccatcttaacgcagttaaaaacaaaggaaagaaatgggctgaattgtgcagcagttatgcgggtagcattatcttcctgtgttccagactggaatgaacttatgaacaggcaagcacacccatcatagtaaataaaaatcttacctagcttttgtctttgtatttcttattttgtagtatttttctatgttatatttaaatggtactataatactgtgatacttttgttatgttttaatttttgttatatttaataaaattattttatgttcattgaacaaaaatttaatgaatttctgttagaggccaggaactattctagagacatttgggatacaaaagtgaacaaaacaggtaattccctagtagagtttatatcctggcaaggagaaattgacaataaacctaataaataaggtttataatatttagaagctattaagtgctatggaaagagtagtaagaaggaaggtcagggaagtactggggaaccaaaccatgaagggttctgtagaccattattgggcctctggcttttgtcagtggactagagaacagttgaagggtttaagcgaaggagagaaatgatctgagctaggttttaaaagacactctggtcactattttaaattcttagggtaagtctgaattaaatgttactttcccctcannnnnnnnnnnnnnnnnnnnnnnnnnnnnnnnnnnnnnnnnnnnnnnnnnnnnnnnnnnnnnnnnnnnnnnnnnnnnnnnnnnnnnnnnnnnnnnnnnnnnnnnnnnnnnnnnnnnnnnnnnnnnnnnnnnnnnnnnnnnnnnnnnnnnnnnnnnnnnnnnnnnnnnnnnnnnnnnnnnnnnnnnnnnnnnnnnnnnnnnnnnnnnnnnnnnnnnnnnnnnnnnnnnnnnnnnnnnnnnnnnnnnnnnnnnnnnnnnnnnnnnnnnnnnnnnnnnnnnnnnnnnnnnnnnnnnnnngttacttccctaaaaaaaccttttctaaccaccctagggtaaatcctccattattcctttatttctttgttttccttgtagtatataatttgtaataattttgattactgattgtcattctgccaccctggagtatataatttttaattatctgattactgttattcttccatagtaggggaggtgatatccatttgcctgatacatagtatgtgttcaatacacatttgctaaagaataaatgaatcaataatacctaacatctctaatttgcagtcattcccaagagtaattattaaatatgtggcaaatttctttgcctttttacttttaaaaatctaattttgacataactgctgtaaccatccagaaacggcattgatgttgcttcacgttgctgatgcttaagcaatgtatattgtgtaatatacaatgtagtcttcaaactaatttcaacttctgcctttctgtgtactcccttatcccactgggtgatattatttggcatggtcattgtcattaaaatcatacaggatagtaattcctttccatctgctaccatgcctagccttatttaatttttcagattttctgttctattgaaggtaattgattttttctttttttttaatgcttgaaataaagtgttg

SEQ ID NO: 4947 - protein, 480 aa, Homo sapien
MVRTIFDDKSADKLKTIPNDNTVSLRICTIAEHLETMLITRLQSGIDFAIQLDESTDIGSCTTLLVYVRYAWQDDFLEDFLCFLNLTSHLSGLDIFTELERRIVGQYKLNWKNCKGITSDGTATMTGKHSRVIKKLLEVTNNGAVWNHCFIHREGLASREIPQNLMEVLKNAVKVVNFIKGSSLNSRLLETFCSEIGTNHTHLLYHTKIRWLSQGKILSRVYELRNEIHFFLIEKKSHLASIFEDDTWVTKLAYLTDIFSILNELSLKLQGKNSDVFQHVERIQGFRKTLLLWQVRLKSNRPSYYMFPRFLQHIEENIINENILKEIKLEILLHLTSLSQTFNHFFPEEKFETLRENSWVKDPFAFRNPESIIELNLVPEEENELLQLSSSYTLKNDYETLSLSAFWMKVKEDFPLLSRKSVLLLLPFTTTSLCELGFSILTQLKTKERNGLNCAAVMRVALSSCVPDWNELMNRQAHPS

SEQ ID NO: 4948 - DNA, 1259 bp, Homo sapien
gcgggcgcgaggcggcggcggaggcccgagcccggcccagcctcgtcccgcccggagcccgcctggctgctaccccgaccccggctccggtcccgtcctgtcccggcgcgccgcggcctcgccccggcccccgctcggcgcctcccgagggagcggcgctgccggccgagagcgcaggcccggccatgaccgacttcaaattgggtatcgtgcggctcggccgggtggccgggaagaccaaatacacgctgatcgatgagcaggacatcccgctggtggagagctactcctttgaggcccgaatggaagtggatgcagatggaaatggtgctaagatatttgcctatgcctttgacaagaaccgaggaaggggctctgggagactccttcatgagctgctgtgggagcggcaccgggggggcgtggccccgggcttccaggtggtgcacctcaacgctgtgaccgtggacaatcgcctggacaacctgcaactggtgccgtggggctggcggcccaaggctgaagagacctccagcaagcagagggagcaaagcttgtattggcttgcaattcagcagctgcctacagaccctatagaagaacagtttcctgtcctaaatgtgacccggtattataatgccaacggggatgtagtggaagaggaggagaactcttgcacctactatgagtgccactaccctccctgcacagtgattgagaagcagctccgggagttcaacatctgtgggcgctgccaggtggcccggtactgcggctcccagtgccagcagaaggactggcctgcccacaagaagcactgtcgggagaggaagcgtcccttccagcatgagcttgagccagagcgatgacgggcaggggagccacacatactcacagcccccgggctctaccctgggcacagcagagacagactggtggttgaacctggaggtgccaaaaaagccagctgcgggcccaggacagctgccgtgagactcccgatgtcacaggcagtctgtgtggttacagcgcccctcagtgttcatctccagcagagacaacggaggaggctcccaccaggacggttctcattatttatatgttaatatgtttgtaaactcatgtacagttttttttgggggggaggcaatgggaagggtagaaattacaaatagaatcatttgcaaaaaaaaaaaaaaaaaaaaaaaaaaaaaaaaaaaaaaaaaaaaaaaaaaaaaaaaaaaaaaaaaaaaaaaaaa

SEQ ID NO: 4949 - protein, 227 aa, Homo sapien
MTDFKLGIVRLGRVAGKTKYTLIDEQDIPLVESYSFEARMEVDADGNGAKIFAYAFDKNRGRGSGRLLHELLWERHRGGVAPGFQVVHLNAVTVDNRLDNLQLVPWGWRPKAEETSSKQREQSLYWLAIQQLPTDPIEEQFPVLNVTRYYNANGDVVEEEENSCTYYECHYPPCTVIEKQLREFNICGRCQVARYCGSQCQQKDWPAHKKHCRERKRPFQHELEPER

SEQ ID NO: 4950 - DNA, 1763 bp, Homo sapien
aagcaattaacaaagaaggaacatttacagttcagttttatgatggagtaattcagttgtttaaaaagaatgcacattaaagccatgcccgaggatgctaaggggcaggtgaaatcccagcatccactaagctggtgttgtcctatcgacccagctggatcgtgtaaccagtctatgggaagtgaggattggatagctttagtcaaagcagctgctgcagctgcagccaagaacaaaacagggagtaaacctcgaaccagcgctaacagcaataaagataaggataaagatgagagaaagtggtttaaagtaccttcaaagaaggaggaaacttcaacttgtatagccacaccagacgtagagaagaaggaagatctgcctacatctagtgaaacatttggacttcatgtagagaacgttccaaagatggtctttccacagccagagagcacattatcaaacaagaggaaaaataatcaaggcaactcgtttcaggcaaagagagctcgacttaacaagattactggtttgttggcatccaaagctgttggggttgatggtgctgaaaaaaaggaagactacaatgaaacagctccaatgctggagcaggcgatttcacctaaacctcaaagtcagaaaaaaaatgaagctgacattagcagttctgccaacactcagaaacctgcactgttatcctcaactttgtcttcagggaaggctcgcagcaagaaatgcaaacatgaatctggagattcttctgggtgtataaaaccccctaaatcaccactttccccagaattaatacaagtcgaggatttgacgcttgtatctcagctttcttcttcagtgataaataaaactagtcctccacagcctgtgaatccccctagacctttcaagcatagtgagcggagaagaagatctcagcgtttagccaccttacccatgcctgatgattctgtagaaaaggtttcttctccctctccagccactgatgggaaagtattctccatcagttctcaaaatcagcaagaatcttcagtaccagaggtgcctgatgttgcacatttgccacttgagaagctgggaccctgtctccctcttgacttaagtcgtggttcagaagttacagcaccggtagcctcagattcctcttaccgtaatgaatgtcccagggcagaaaaagaggatacacagatgcttccaaatccttcttccaaagcaatagctgatggaagaggagctccagcagcagcaggaatatcgaaaacagaaaaaaaagtgaaattggaagacaaaagctcaacagcatttggtatcaggagttgggatttctcagcactgctaatgaagatcccctcttatagtccaataagcttatcaggacttccagagtcatgacatgaacagtttaattgaacccatccactctgggcaggtgactggaatagctgattaaaacataaatgctgcttttaggttaaccacaaaggaacaactcaggatcagtcgtgattgctaaagtattcacttttatcttttaggtaagagaaaagaaaaagataaggaaagaagagagaagagagacaaagatcactacagaccaaaacagaagaagaagaggcacctctggtactgaagattcctgctgattttgagaactggatggagaatactttcccatcaggggctggagagggagaagaaacctttttctacagaatcatcaggcatgggtaaggtggctaacgctgagatctctt

SEQ ID NO: 4951 - protein, 443 aa, Homo sapien
MHIKAMPEDAKGQVKSQHPLSWCCPIDPAGSCNQSMGSEDWIALVKAAAAAAAKNKTGSKPRTSANSNKDKDKDERKWFKVPSKKEETSTCIATPDVEKKEDLPTSSETFGLHVENVPKMVFPQPESTLSNKRKNNQGNSFQAKRARLNKITGLLASKAVGVDGAEKKEDYNETAPMLEQAISPKPQSQKKNEADISSSANTQKPALLSSTLSSGKARSKKCKHESGDSSGCIKPPKSPLSPELIQVEDLTLVSQLSSSVINKTSPPQPVNPPRPFKHSERRRRSQRLATLPMPDDSVEKVSSPSPATDGKVFSISSQNQQESSVPEVPDVAHLPLEKLGPCLPLDLSRGSEVTAPVASDSSYRNECPRAEKEDTQMLPNPSSKAIADGRGAPAAAGISKTEKKVKLEDKSSTAFGIRSWDFSALLMKIPSYSPISLSGLPES

SEQ ID NO: 4952 - DNA, 2874 bp, Homo sapien
  Unsure 227-254: Unknown base
agattaggaattcatgttgtgtttaccatttagaagctgggattgcttttaaaggtttttctttttaaaattggcatgtttttgatttatcatgtctttctattcagattattgggtatcaaagattaatgaggacaccagaatcttggttaaatagacaagtggtatcattactgtttgagtcttttaatattctccatacctgccaccagtgaaaaaacttgccnnnnnnnnnnnnnnnnnnnnnnnnnnnntattatcaaacaatttattttggctttattgaaaaaagagtatttggtctaaatgtgccaccataggtgttaaattctcctatctgcaattgtctttatcctatattgtgttcatttcttttcttaataatttactttgttgtgtgtttctacactttcatccctgttttttatcttgtatatcatcaggaaattgtgatttaatcattaacattggtttttttgtgtgtgtggtaaaaatcaacactaggctcatggtacatatttttattctgtacatttgcttgtaactatcaatttgtaactctgtttatctactacatgtgtatatatacttagagcattttctctaacacattttaatgttagtattttttaaaaggtctgaccagtctagcaaattgtcagtccaacgtcattactttaaattaagaagcagtcttcttctggtaaaccttgttggtatttgtaaaataattttgaaggtcttaatttcttcctttgtaaaaggaaaaggttttttttaaagtttttaggttggcatggaggcagaagttggtgattacttgatttacaacagattttttccagatcatacaaaaggccatacagtaagtatagaagtaggtatggggagggcttactaatatcaaataggcaaggccttagtgagtgggcaggataccacctgagagtggccagatctggggaggttactctgctctgggtgctctcattcatgaatcgacaaggatacattagattattttgaaacatttttttaagaagcagaattctttaataattccttcctagacattgaatatacttataaaattaaagacttggggaaggagacactgagagacttgccagtttggttcctcatgaacaaaagaggacagtttgataactaccagaatagaatatccctagttttaaaatagtgagaatctctgaagttcatcaacatcttaagatgcacttacttgaaagtttgagattctgtttatcatttgaaaacacattttgctttaattctttctttgacatgttgttttttcatatcaagaaatatatgaacaaaataataaccttttgaccctgaccttgctgggtgaattagctctgaaacactctctacaaccagtaatgcatttgtcccacatttcattctgatagaaaatgaacaccatagcaccaaacaaaaatccgaggcgttagataatgtctggattaaataatttaagactctctaggattttggttgtcattttttatttataacagactttaagtcactttctgttgcctcataggtcacattttagacaggtttgtgtctgttccttgcatctgaattcctgattgtaaagacacctatgaggtctcttagtttttgtcattcattttcttggtttatcacccctcccttctttttgttgtttttccctgactgttaagcagtttcatctttgcttttgttaaatatttgacagcagttagtttgtgttaagctcttgaaacttgtgattgtactttctgtgtagatatacatgtaattattttttatttttcaatcatagattcaagcttccttcttttttaccacaaatcattaaagttatttgtgtttccatatacctgtgtcttgtataaaattggcttattctgtgctgttgaatgaggctcaacatgacttggtgaggaagtctattaactaacaaaagcttatcttttttaacataatgctttttaattaattttgaataaaaatatttctaaagtgtactagatactttattaccttagattattccgaatacagtataactttgatagtttggaatagtcattaagaaacaattacacactgattgctttgtgtctctaaaagtgagaggctggtagcttttccacattctcatggctattttctagttctacttgaatttataactgtttccctttttccttgacagctgccactttgtagctatttttctgtctctgctaatactttaccatatctatctcaattgttttttcttttgacttgctgaaaaatagaaaccagatgggaagtatattagcattatgattgaaataagggtaaatgagcaatgtgtgaaggttttcactgacttcacctaaaagatagtttagctacttgaattttagtaaatagaatttttcctttatttcatcggtccccccaccttttctttttttttgcacctgccttgtaaatttaatagttaagtgacctctgcctagaggatgatatttggggaggtttgatgtttcctgtgggaataagacgattcacaggtgagagtggggccacattagctgttattgtttccatgggtcagtgtggaaaatggattaatcatattctaaacgttcatggacctcattacagtcacaattgtctattctgtttcctaccctgaacacattaaaatggtaggaactaatgcttatttaattactaaaagccaccattttctttgatagattgagctacagattgtaaacttcatgtatttctttataagtcaacccttttcaaagatatgcacatccagctgaatgaataaataaatattgagaagtt

SEQ ID NO: 4953 - protein, 21 aa, Homo sapien
IRNSCCVYHLEAGIAFKGFSF

SEQ ID NO: 4954 - DNA, 1578 bp, Homo sapien
ggcgcgctccggctcggccatggagctgccagctgttggcgagcacgtcttcgcggtggagagcatcgagaagaagcggatccgcaagggcagagtggagtatctggtgaaatggagaggctggtcgcccaaatataacacgtgggaaccggaggagaacatcctggaccccaggctgctgatcgccttccagaacagggaacggcaggagcagctgatgggatatcggaagagagggccgaagcccaaaccgctagtggtgcaggtgcctacctttgcccgtcgttccaatgtcctgaccggcctccaggactcctccactgacaaccgtgccaagctggatttgggcgcgcaggggaagggccaggggcatcagtacgagctcaacagcaagaagcaccaccaccacgccgtcggcctgaatctctcccacgtgcgcaagcgctgcctctccgagacccacggcgagcgcgagccctgcaagaagcggctgactgcgcgcagcatcagcacccccacctgcctggggggcagcccagccgctgagcgcccggccgacctgccaccagccgccgccctcccgcagcccgaggtcatcctgctagactcagacctggatgaacccatagacttgcgctgcgtcaagacgcgcagcgaggccggggagccgcccagctccctccaggtgaagcccgagacaccggcgtcggcggcggtggcggtggcggcggcagcggcacccaccacgacggcggagaagcctccagccgaggcccaggacgaacctgcagagtcgctgagcgagttcaagcccttctttgggaatataattatcaccgacgtcaccgcgaactgcctcaccgttactttcaaggagtacgtgacggtgtagccggagggcgtcggaaggggaagcgccattcccgcgggggggcggggagctgagcacctggggcctcggggcgggctcccctctcgccaacccgccaaccgcgagagacccaggctggcccccagggtgaggacgcccggagcggaggtaaccatgttccccctgcggcggctgtcagacctgggcggaggccccttccacgcggtgccggcggggctcgccctctcctgcccttccccgctggagatggacccccggaacggacagggcagctctgcgcccggcctcagagttctagtattatattttaaccgtgctaacttgtcaagtgctgactctactcccgtttgtacgtggtgttattattgaaatgtattgtttgagctcaaaaggcccgaccaccccccttcgggctgctatatatatatttatttgtaggtatttatatattgaaatataaaaacctagatttatggagtttcctctagatcatgttatattctatatcagacaaactattttcttttgacctttcttcccctccatccagtatttcggttgatttcattttctcccctctcttccccttccacgaactgcaataccagtaaccttggtatatattttttgatactgtacacatggatgtcttgtttctatgtgcaaaaaaaaaaaaaaaaaaaaaa

SEQ ID NO: 4955 - protein, 290 aa, Homo sapien
MELPAVGEHVFAVESIEKKRIRKGRVEYLVKWRGWSPKYNTWEPEENILDPRLLIAFQNRERQEQLMGYRKRGPKPKPLVVQVPTFARRSNVLTGLQDSSTDNRAKLDLGAQGKGQGHQYELNSKKHHHHAVGLNLSHVRKRCLSETHGEREPCKKRLTARSISTPTCLGGSPAAERPADLPPAAALPQPEVILLDSDLDEPIDLRCVKTRSEAGEPPSSLQVKPETPASAAVAVAAAAAPTTTAEKPPAEAQDEPAESLSEFKPFFGNIIITDVTANCLTVTFKEYVTV

SEQ ID NO: 4956 - DNA, 3688 bp, Homo sapien
  Unsure 2564-2602: Unknown base
gtagcggaggagacggtttcaggcctccggtgcggctgcaatgctgagctcccgggccgaggcggcgatgaccgcggccgacagggccatccagcgcttcctgcggaccggggcggccgtcagatataaagtcatgaagaactggggagttataggtggaattgctgctgctcttgcagcaggaatatatgttatttggggtcccattacagaaagaaagaagcgtagaaaagggcttgtgcctggccttgttaatttagggaacacctgcttcatgaactccctgctacaaggcctgtctgcctgtcctgctttcatcaggtggctggaagagttcacctcccagtactccagggatcagaaggagcccccctcacaccagtatttatccttaacactcttgcaccttctgaaagccttgtcctgccaagaagttactgatgatgaggtcttagatgcaagctgcttgttggatgtcttaagaatgtacagatggcagatctcatcatttgaagaacaggatgctcacgaattattccatgtcattacctcgtcattggaagatgagcgagaccgccagcctcgggtcacacatttgtttgatgtgcattccctggagcagcagtcagaaataactcccaaacaaattacctgccgcacaagagggtcacctcaccccacatccaatcactggaagtctcaacatccttttcatggaagactcactagtaatatggtctgcaaacactgtgaacaccagagtcctgttcgatttgatacctttgatagcctttcactaagtattccagccgccacatggggtcacccattgaccctggaccactgccttcaccacttcatctcatcagaatcagtgcgggatgttgtgtgtgacaactgtacaaagattgaagccaagggaacgttgaacggggaaaaggtggaacaccagaggaccacttttgttaaacagttaaaactagggaagctccctcagtgtctctgcatccacctacagcggctgagctggtccagccacggcacgcctctgaagcggcatgagcacgtgcagttcaatgagttcctgatgatggacatttacaagtaccacctccttggacataaacctagtcaacacaaccctaaactgaacaagaacccagggcctacactggagctgcaggatgggccgggagcccccacaccagttctgaatcagccaggggcccccaaaacacagatttttatgaatggcgcctgctccccatctttattgccaacgctgtcagcgccgatgcccttccctctcccagttgttcccgactacagctcctccacatacctcttccggctgatggcagttgtcgtccaccatggagacatgcactctggacactttgtcacttaccgacggtccccaccttctgccaggaaccctctctcaactagcaatcagtggctgtgggtctccgatgacactgtccgcaaggccagcctgcaggaggtcctgtcctccagcgcctacctgctgttctacgagcgcgtcctttccaggatgcagcaccagagccaggagtgcaagtctgaagaatgactgtgccctcctgcaaggctagagctgatggcactgtctgcactgtccaggaaaaaagtaaaactgtactgttgcgtgtgcaagcggccccactagagccttccagccttctggtgtgttctaagagcaggctccacctgggagccagccccagttcacaccaaaccaggctccctgaacagtcctgttcatgtgtgtaggtggttctgttgtgttaagaaagcattcattatgtccggagtgtctttttactcatctgatacaggtaattaaaagaactcagattcttgaagccaccgttttcatattgtaatgttaggtgttctcagaggggaggtacctttgtctaatcaacgtttccacttagatcttttatttttaataagcaggcccataaaaattgttgacaagaattaatgaaattattaaaggcaacaatttagaagaaaaagtgcctttcactttcgattgcttttgtagcacgtccattgtgaaatattccttccaggctactcaaaggatagcaagagaacaggtaaatgatgcctaaagaacaccttcctttttctatgccttttctaatctttcaattctttctatggagtaaaggctcatctgccaaatctgccccctggggaaactctttcactactttgtcagttataagtgaagagcttacttgttgcttttatcttttgtatattggactgagatgtaattacactgtattataaaactctgtgaatagccagaactgagctggatctttgcaacacctgattcctctgctctgtggaaaactttttcttacacaaggatccactgtggacggttactttcatctgtttatttattgcccatgcagagctcttaaggtttacaggtgggagcttggggctgtataaaaaaataatccctgccctgagttgacacctggcttaggaaggaagggctgactatggggctgcannnnnnnnnnnnnnnnnnnnnnnnnnnnnnnnnnnnnnnggttagatttgatgaccaccaaagttcagcccttttcacgaaaaggagaaagcagcttttgactttttaaaaaacatataactacagctggcatctagtattgtcatgttgctctaggtccatattctgaatttattcatttccaatagcctaatacaaaaagtatatattgagcactttcttcccttttcaggtaagtctctgaatgcagcccagggccaaaggaattttgatgacacagtagtacctatgttttaagctatatttttaatttagaaaaatggataccaaattcaaaccgactcatcagaggtaagatttggaatcagacctttccaaaaggtcatctgaggtaaggctaagaccgcacttcctctgctgggggtgagctggcagacacaccaaacagtgccttggcagcagctcacagtgcaggaagcccaggtgatcactcttctgctgggcccaggctgcaccctgaggactcagtaactcactctcaacagaatattctgtgcaggctctccaggctctgggcgtcagggtgcaaggggcagcttgaactgtacggtccgtcctgcactcacccgatgcagaccttgactttgatgttgaaatgaacacacttgttttacccaagtctggtggaacaaatgcccaatcatgtgaccttaaagtgtactgcaaagctgtagctttaagtaattgctgttctgccactgcttactctgaaatctaccatcaaagaaagatagagaaaaggggctgagccttggaatatatggttataagcagatctttctttggtcagagaccagggtttgagccaaggctgtaaatgtgaacaatagctgtgcaaagccttttaacctgacttcttcattttgtaaattattatgcattaagtagcagcccaataatctgatttctagttttattttcaaagtaagtagcttcttttgggaaaaacctaagttaaactagtagttttgccataataactgctgatttatgtatttgctaaaggtacttttgtatctgctgtgtattatagcaataaaataatcattttgttagaaaaaaatc

SEQ ID NO: 4957 - protein, 530 aa, Homo sapien
VARRRFQASGAAAMLSSRAEAAMTAADRAIQRFLRTGAAVRYKVMKNWGVIGGIAAALAAGIYVIWGPITERKKRRKGLVPGLVNLGNTCFMNSLLQGLSACPAFIRWLEEFTSQYSRDQKEPPSHQYLSLTLLHLLKALSCQEVTDDEVLDASCLLDVLRMYRWQISSFEEQDAHELFHVITSSLEDERDRQPRVTHLFDVHSLEQQSEITPKQITCRTRGSPHPTSNHWKSQHPFHGRLTSNMVCKHCEHQSPVRFDTFDSLSLSIPAATWGHPLTLDHCLHHFISSESVRDVVCDNCTKIEAKGTLNGEKVEHQRTTFVKQLKLGKLPQCLCIHLQRLSWSSHGTPLKRHEHVQFNEFLMMDIYKYHLLGHKPSQHNPKLNKNPGPTLELQDGPGAPTPVLNQPGAPKTQIFMNGACSPSLLPTLSAPMPFPLPVVPDYSSSTYLFRLMAVVVHHGDMHSGHFVTYRRSPPSARNPLSTSNQWLWVSDDTVRKASLQEVLSSSAYLLFYERVLSRMQHQSQECKSEE

SEQ ID NO: 4958 - DNA, 3498 bp, Homo sapien
ctcggaagtcgagagaccagggcctggccagattctccctgcagaacctctagacgattccaagaatgccacagggaactcagcctcaggcctgggggctggcaggaccgcagaagataccgtggaagatgcctgcccagccgagggcagcagggaggccagacccaacacgcaccccggcccggcccccaccccggccgagctgccctggaccaatattgacctcaaggaggccaagaaagtgcccagccactcggccgctggcttccccgagaccaccagcctctcctctctggggctcctcccactgggcttggaggagccgtatggggtggatgaccacccgctgtgggcctgggtgtcgggaggcggctgcgtggtggaggcatgtgccatgcccagatggttcactgtccaggcgggtaagggctcctgcagggcctgggggcatccacatggccaggtgccctgggggtgtggggtgtgggaggaggccggggtcagggggctcgggcaggcctgctgtcctccctggacgcctcactgtgctcagcagctctgagccaggcattgcgctcctctgtggcctccagagaccagcccgaggctgtcaggacctggaagcacggtggccagtgccccttcccctgtctgcagcccctcccctgtgctagcggtggtggctgctttccaggctgaattactgggggagagcaactcatccatcagggcaaagggtggaaggaggcttaacagagagcgtagcttttgagctagaaagggctgatttggtggaggggagcgccgtggcttcctgcccagctgcgggcaggacagtgccccggccctgaggctctctctgccccacaggcctgtcctcctcggtacacatgctgtccctgtccatcacgccggcccagaccgctgcctggaggaagcagatcttccagcagctcacggaaaggaccaagcgggagctggagaacttcagacactacgagcaggccgtggagcagtcggtgtgggtgaagaccggggcgctgcagtggtggtgcgactggaagccccacaagtgggtggacgtgcgcttggccctggagcagttcacggggcacgacggcgtccgggacagcatcctcttcatctactatgtggtccacgaggagaagaagtacatccacatattcctgaatgaggtggtggcgctggtcccagtgctgaacgagaccaagcactcctttgccctgtacacccctgagcggacacggcagaggtggccggtgcgtctggctgctgccaccgagcaggacatgaatgactggctcgccctgctcagcctgtcttgctgcgagagccggaaggtgcagggccgcccgtccccgcaggccatctggtccatcacctgcaagggggacatcttcgtgagcgagcccacccagacctggaggcccacgagcaccccctgccctgcgaccagatgttttggcggcagatgggaggccacctgcggatggtggaggccaacagccggggcgtggtgtggggcatcggctatgaccacacggcctgggtatacacaggcggctatggaggcggctgcttccaaggcctggccagcagcaccagtaacatctacacgcagtcagacgtgaagtgtgttcacatctatgagaaccagcgctggaaccccgtcacaggctacaccagcaggggtctgcccacggaccggtacatgtggagcgatgcctcggggctgcaggagtgcacgaaggctggcacgaagcccccgtccctgcagtgggcctgggtttccgactggttcgtggatttcagcgttccggggggcacggaccaggaggggtggcagtatgccagcgacttccctgcctcataccatgggtccaaaacgatgaaggattttgtgaggaggaggtgctgggccagaaaatgcaagctggtgaccagtgggccctggctggaggtgccccccatcgccctcagggacgtgtccatcatcccggagagcccgggtgccgaggggagtgggcacagcatcgccctctgggccgtcagcgacaagggggatgtgctgtgccgcctgggcgtgtcggagctcaaccctgcgggctcctcctggctgcacgttggcaccgaccagctcttcgcctccatctccatcggggcctgctaccaggtgtgggccgtggcaagggacggctccgccttctaccggggatccgtgtacccctcgcagccagccggtgactgctggtaccacatcccgtccccaccgagacagaggctgaagcaggtgtccgcggggcagacgtcggtgtatgccctggatgagaatggaaacctgtggtatcgccaagggatcacgcccagctacccgcagggctccagctgggagcacgtgtccaacaacgtgtgccgagtgtccgtggggcccctggaccaggtctgggtgatcgccaacaaagtgcagggcagccacagcctgagccgggggacagtgtgtcatcgcaccggcgtgcagcctcacgagcccaagggccacggctgggactacggcatcgggggaggctgggaccatatctctgtccgggccaatgccaccagggccccccggagctcgtcccaggagcaggagccgagtgccccaccagaggcccatggccccgtctgctgctgaggcccccccacacacctacatgcagggacggtgcccagtttgggggatcaaggctgagccattcttgtgctggagtgtgcaccgtgggagcaatgtggcccaggtggactcaggagggaacctggccccaaggctgcggccacttcagaggcactggctgagacggccctgaaatgtgaagctccgcggacactcccacacgtgtccccgtctgcgaggagtcccggggtgtggggcatggggtggggctgcacctcccagaggcccctcccacccttcccttcccctctcccttctgcctttccaggactagaaccgggaacctggagccctccgggaacgccggccctggggcagcagagccaggatggagccctcctgagctggcatctcagacagcacccgggcccgccacccctcaccaagagagatggccatggggctcagggcctctttaccatgtgcagtgaccatttctcagagcaggacttgcaaagaggctttaatttcaaaagtgaaggaaggaggccaggcgccgtggctcacgcctgtaatcccagcactttgggaggctgaggttttctctgggcattacgatttgttcccctacaacagtgacctgtgcattctgctgtggcctgctgtgtctgcaggtggctctcagcgaggtacggggagggcgtcaccctgcagaacggcagagtgacgcgtcctctcgctgctgagcaccagctgtttacctgccctgcatcacttcctcggatactttactcaataaagcattttcccctggaaaaaaaaaa

SEQ ID NO: 4959 - protein, 405 aa, Homo sapien
MFWRQMGGHLRMVEANSRGVVWGIGYDHTAWVYTGGYGGGCFQGLASSTSNIYTQSDVKCVHIYENQRWNPVTGYTSRGLPTDRYMWSDASGLQECTKAGTKPPSLQWAWVSDWFVDFSVPGGTDQEGWQYASDFPASYHGSKTMKDFVRRRCWARKCKLVTSGPWLEVPPIALRDVSIIPESPGAEGSGHSIALWAVSDKGDVLCRLGVSELNPAGSSWLHVGTDQLFASISIGACYQVWAVARDGSAFYRGSVYPSQPAGDCWYHIPSPPRQRLKQVSAGQTSVYALDENGNLWYRQGITPSYPQGSSWEHVSNNVCRVSVGPLDQVWVIANKVQGSHSLSRGTVCHRTGVQPHEPKGHGWDYGIGGGWDHISVRANATRAPRSSSQEQEPSAPPEAHGPVCC

SEQ ID NO: 4960 - DNA, 3589 bp, Homo sapien
  Unsure 1865-2138: Unknown base
tttataagctgtccagttaatggaattttgttattgtagcccaaatatactaagacaacaaccaatatagttaaaattactatgcatgttctactttatattaagttctagtgtacgttgtataatgcttacatcaaataaaaggtaaggttaatttacataaaacatgtttaggtaggataattgtaaaaattatttattagagaaattggtaaaattgtggctttgcatagaggcaggagaaagaaaagagcaaggcactagtgagaaaaattgctatggagaatattgagaatagatacaaggagacctacaggtttacaacattaatattggccaatacttgattggacagtttaaatttttcaacctgaaaggcctttgtgccccaaagtttggtaaggagattttgtaaaaacaaacaacaatagcaataaaaaatcagggaagattaagagatttcataaggagcaagaatttataggtaatacttaaaaggtataggtatgattactattttggtgaataataggcacatggtagactgaaattcggcaacagctactgtgcaaataagcatatctgtgattatggcttatatctggttggggacccctgttgtaagccattctttttagtacaggttaagctccatttctcaatcacagttctgttattttcatctgtgggaaataatgaattctgtttcagattttgattgtcttttgtgttctttgtcatccaacagaattgcacatttcactttgtaaaatttttataactagtgtttgacacttgaaactggcttttgagtcttctataatagtttgtgcagaagtctgaggtttaatgttatgatggccttattcatactgtagaaatatatactgcagcaatatgcacccaaatggtcaaatggtcagtaagctttttaaatgaactagctagatttttagttttgattttaattcttggtttgaattgctaaaagctatcttgaccttaggaaaatgaaagcttacatgaggtttagccacttaaaacaaagtatttcttgtgtctccagttcatgtgaaacctgacttttatttacaatatttatgttaggagcacttttattaggatcttttgaagcctttcaagagttttctttcagttattattaatagtactaataaagaaggtgagcaggatttaaagctgaaaggagcatcagagataattgaactttgtttatgccattcattgttaccctatgcaatgtcttttgtttgtttttaattaattgccaatatttaagaagagggtcatagaacagtcattattccagattctcttgaaaaactggaagatctggcaactacaggtttatgttcttgcatgttaacaatatacaggggctggaattaacctgctctgagtccctttagatgtgcatactctctccgatttgccacagttcccaccaattcttatttctcctctctttacttggcccacatcattgggcctatctcattaatttctattaaatattttattactgaggccattagtttatgacccctgaggccaagacagctgttaagaacttgcattactggtggcaaaattatacctttacgattacttactaggttttagaaatctcacttttctaacaagaggtattatggtaatcataagttcaaaagaattaaagttcatttgagataattaaatcaaaacctctagtctgggttggagggtgataaagttatctggcgaaatatatgaacttctgttaccttcctcttctgctaaatgaatggtaaaatgaatcctgatttgtttaggcagtttacttatgaagttgggagaatttnnnnnnnnnnnnnnnnnnnnnnnnnnnnnnnnnnnnnnnnnnnnnnnnnnnnnnnnnnnnnnnnnnnnnnnnnnnnnnnnnnnnnnnnnnnnnnnnnnnnnnnnnnnnnnnnnnnnnnnnnnnnnnnnnnnnnnnnnnnnnnnnnnnnnnnnnnnnnnnnnnnnnnnnnnnnnnnnnnnnnnnnnnnnnnnnnnnnnnnnnnnnnnnnnnnnnnnnnnnnnnnnnnnnnnnnnnnnnnnnnnnnnnnnnnnnnnnnnnnnnnnnnnnnnnnnnntgaggttgggagaaattttgtccatttctttagaaccaaaattggcaaccagagagtatttggatgttacacaaaatatttagtttccctttctagcctaaattgggttgtttatagcacccgtctctccatttgagaaaaatggttaggatgctggtgcagggatgaggccttattaaaacagagaaggtacccaaatggtggttcaaacacaggctggctaataagctgtgaggtgacttaccaacccaccccaacaacaaaaacccttgaacttctgctttcaacttctactttatgctagattatttggtccaatcttcctggtctaacacctggctacatataacaacaaacatctgcttgaatgtgttggaaaggtgatgattaattgccaggctgatatattaaataaaatggaaatctcaaaagttgaacttgctattcagtctgcttttgctctggaggggggatttgttagccaagaagaggctgaaaacatgagtagtgtactttgggagactagaaggacgaacgttaaaagtatacgacctccaaggttgtgactctggtagaattctttggttagagatcctgaaggacagcatcctagggataatggtgaaacagaagtagaccattcacatagagtgtagtttagcattaaatcatcaaggtggattagtaaattgtgagattttggaagtggactaaggtgaccttaggtttctaatgcccctaggaacctgaaagatagaaacctggaggaagaatattttcctaggcctcaaattatttgggtactttttcaaatacagtatctccacataccctggatacaggaggagaaaggcggaatgaaaactggcagaaacagtagacccaaaggggcaccaaataattgcattgtgaggtagactttaagtatgtttactgtattcaaggagataaaagatggaaaatttccatatagaattggaaactataaaaaagtcactgcagatttgttaaaaaaaaaagaaagccaaatataaatttgaaaacttgaaaaaccaaacagtgaaaattaagaactccaaatgtgttagttatctattggctgtgtaacatactgctcaaacttgacttacatacgtttattatctcagtttttgttggtcaggaatccaagcatggcctaagtgggttctctgctttaggctgcaatcaaagcattggtcggggtagggtctcctctggaggctgagctggggaaggatctgcttcagatttatgtagttgctagcaggttcttggactgaggacctcagtagcttcctggctgttggatgaaagcattcttcagttccttgtcccatggacctctcctttaggacagcttacaacctgggcagcttgccagagggaacctatagagcccatagagtgagtctgctaacaagacaatgaag

SEQ ID NO: 4961 - protein, 156 aa, Homo sapien
  unsure 21: unknown amino acid
  unsure 22: unknown amino acid
  unsure 23: unknown amino acid
  unsure 24: unknown amino acid
  unsure 25: unknown amino acid
  unsure 26: unknown amino acid
  unsure 27: unknown amino acid
  unsure 28: unknown amino acid
  unsure 29: unknown amino acid
  unsure 30: unknown amino acid
  unsure 31: unknown amino acid
  unsure 32: unknown amino acid
  unsure 33: unknown amino acid
  unsure 34: unknown amino acid
  unsure 35: unknown amino acid
  unsure 36: unknown amino acid
  unsure 37: unknown amino acid
  unsure 38: unknown amino acid
  unsure 39: unknown amino acid
  unsure 40: unknown amino acid
  unsure 41: unknown amino acid
  unsure 42: unknown amino acid
  unsure 43: unknown amino acid
  unsure 44: unknown amino acid
  unsure 45: unknown amino acid
  unsure 46: unknown amino acid
  unsure 47: unknown amino acid
  unsure 48: unknown amino acid
  unsure 49: unknown amino acid
  unsure 50: unknown amino acid
  unsure 51: unknown amino acid
  unsure 52: unknown amino acid
  unsure 53: unknown amino acid
  unsure 54: unknown amino acid
  unsure 55: unknown amino acid
  unsure 56: unknown amino acid
  unsure 57: unknown amino acid
  unsure 58: unknown amino acid
  unsure 59: unknown amino acid
  unsure 60: unknown amino acid
  unsure 61: unknown amino acid
  unsure 62: unknown amino acid
  unsure 63: unknown amino acid
  unsure 64: unknown amino acid
  unsure 65: unknown amino acid
  unsure 66: unknown amino acid
  unsure 67: unknown amino acid
  unsure 68: unknown amino acid
  unsure 69: unknown amino acid
  unsure 70: unknown amino acid
  unsure 71: unknown amino acid
  unsure 72: unknown amino acid
  unsure 73: unknown amino acid
  unsure 74: unknown amino acid
  unsure 75: unknown amino acid
  unsure 76: unknown amino acid
  unsure 77: unknown amino acid
  unsure 78: unknown amino acid
  unsure 79: unknown amino acid
  unsure 80: unknown amino acid
  unsure 81: unknown amino acid
  unsure 82: unknown amino acid
  unsure 83: unknown amino acid
  unsure 84: unknown amino acid
  unsure 85: unknown amino acid
  unsure 86: unknown amino acid
  unsure 87: unknown amino acid
  unsure 88: unknown amino acid
  unsure 89: unknown amino acid
  unsure 90: unknown amino acid
  unsure 91: unknown amino acid
  unsure 92: unknown amino acid
  unsure 93: unknown amino acid
  unsure 94: unknown amino acid
  unsure 95: unknown amino acid
  unsure 96: unknown amino acid
  unsure 97: unknown amino acid
  unsure 98: unknown amino acid
  unsure 99: unknown amino acid
  unsure 100: unknown amino acid
  unsure 101: unknown amino acid
  unsure 102: unknown amino acid
  unsure 103: unknown amino acid
  unsure 104: unknown amino acid
  unsure 105: unknown amino acid
  unsure 106: unknown amino acid
  unsure 107: unknown amino acid
  unsure 108: unknown amino acid
  unsure 109: unknown amino acid
  unsure 110: unknown amino acid
  unsure 111: unknown amino acid
  unsure 112: unknown amino acid
MNGKMNPDLFRQFTYEVGRIXXXXXXXXXXXXXXXXXXXXXXXXXXXXXXXXXXXXXXXXXXXXXXXXXXXXXXXXXXXXXXXXXXXXXXXXXXXXXXXXXXXXXXXXXXXXEVGRNFVHFFRTKIGNQRVFGCYTKYLVSLSSLNWVVYSTRLSI

SEQ ID NO: 4962 - DNA, 4052 bp, Homo sapien
gaagtataagtgggattttcaccaaaaccctatccttccccagactccagtgacagtttaacggtcagctgcatcaaggcttgtgtactgtgcagtcttaaaaggcaccactcctgtccatctcggtgaaattgatggtggagcaaaagggagtttaggtggttccggtctggggagaagacgtgcagggtttcagatgcgaaagtcgcacccaaccgcttcactcgggctctaggccatccgcaggggccctgcttccttccacctgcgagctttttctgcagaatgcgggaagccgccgccgccgccacagaggagggggcggaggcagaggcggaggcggcacccaggggccggggcaggggaggccgggaccatcgcagtgacaatttattttcctgcagcagcggcagcagggacggttgctgcaggttcggggtcggccggcctgcgcgtgggcttgcgaggacgctgttcgtcccctgcgctggggtgtccgacagcgaggaggagaacgacgcacggagcccgcgcgactggaaccagcaaagctccatctgtcggcagaggagaagggggaggaggcacggccgaggcaaacgagcggacgcctcgtcgccgggtgccggtatcaccccgctgcaacgccttccagcaaaagccaccgcggcccgggttgcagcagccggacggatgccaaggccacacggcagccacgggggcagccgtcgcagtcgccgtcccacacgggctgcggacaccaagggttgctaatgaagtgattgagaagaaacagtgaacatcctcatttcacagataagacaacatggatcagccttttactgtgaattctctgaaaaagttagctgctatgcctgaccatacagatgtttccctaagcccagaagagcgagtccgtgccctaagcaagcttggttgtaatatcaccatcagtgaagacatcactccacgacgttactttaggtctggagtagagatggagaggatggcgtctgtgtatttggaagaaggaaatttggaaaatgcctttgttctttataataaatttataaccttatttgtagaaaagcttcctaaccatcgagattaccagcaatgtgcagtacctgaaaagcaggatattatgaagaaactgaaggagattgcattcccaaggacagatgaattgaaaaacgaccttttaaagaaatataacgtagaataccaagaatatttgcaaagcaaaaacaaatataaagctgaaattctcaaaaaattggagcatcagagattgatagaggcagaaaggaagcggattgctcagatgcgccagcagcagctagaatcggagcagtttctgtttttcgaagatcaactcaagaagcaagagttagcccgaggtcaaatgcgaagtcagcaaacctcagggctgtcagagcagattgatgggagcgctttgtcctgcttttccacacaccagaacaattccttgctgaatgtatttgcagatcaacctaataaaagtgatgcaaccaattatgctagccactctcctcctgtaaacagggccttaacgccagctgctactctaagtgctgttcagaatttagtggttgaaggactgcgatgtgtagttttgccagaagatctttgccacaaatttctgcaactggcagaatctaatacagtgagaggaatagaaacctgtggaatactctgtggaaaactgacacataatgaatttactattacccatgtaattgtgccaaagcagtctgcgggaccagactattgtgacatggagaatgtagaggaattattcaatgttcaggatcaacatgatctcctcactctaggatggatccatacacatcccactcaaactgcatttttatccagcgttgatcttcacactcactgttcctatcaactcatgttgccagaggccattgccattgtttgctcaccaaagcataaagacactggcatcttcaggctcaccaatgctggcatgcttgaggtttctgcttgtaaaaaaaagggctttcatccacacaccaaggagcccaggctgttcagtattcagaaattcctttctgggataatttctggcactgctttggagatggagcccctgaaaattggctatggaccaaatggattcccactcttggggatctctaggtcatcatcaccatctgaacagctctgagagagacaagaagtggaatggagaaggtgattaggtaatccaagaattgccaggcgaacaattgtgaaaatctttcatagagttcccgatgaaaacaactctttcttgttagccattatctctgcctttcctttctaaagaaaaacacgtcatttcatcttgattatcagtttctcaagtactcatggatgtgaggccaggtaccctgtcaccttggctctgtttgggatgcaatgttgtgtttgtcaccacttcccattccccaaaagcatctttaacatagaccattcattcttcagattcaaaatgcttaagctgaactaacctcaaagggccctcattaatttacagacatttgaataacacccatattcatttctgctactgaaccaaagccttttccaaaaaaatcatctagcaaactgtttttgccaggccaaatattaacaggtatatatatttgcatacataaatatttacctctatgtcttgtgtgtttttgttatgagacagagtctcactctgtcgcccaggctggagtgcagtggcacagtctcagctcactgcaacctccacctcccaggttcaagcgattctcatgcctcagcctcccgagtagcgaggactacaggcgtgcaccaccacgcccagctaatttttgtatttttagtagagatggggttttaccctgttggccagggtggtctcgaattcctgacctctgatgatctgcccgcctggacctctcaaagtgctgggattacagacatgagccactgtgccctgcctctgttttgtgtatttacataaatacatgtctccagagctttaaattcttcttaaattttaaaactagaactaaaccagacattgagaggacccagaaatataccctgactaacgtgggtggaatttcatttggcttgactctttggtgaaaaaaaaaaaaatcaggctctcaaggactcaatttggtgaaccaatgccaaatagaaaaatgttcttgacattttccccaaaatagatgtctaaagattttgcacttcaaattggtactttatgtattaaaagtgatattgaaactaaattcctacccaattagttgaaaaatatgaaaaaagcaattgctagagaatgcaatttattaaatgttggtggtcttttaaaaaatgaattcctcttgtagccagtgagatcagttatttatttatttattttaatagtaacaaggtctcactatattgtccaggctgatcttgaactcctggcctcaagctgtcctcccatctcagcttcccaaagtgctgagattataggcatgagccaccatgcctggctagttaatggttattaagtaatacaaacatttctgtgaattccaccagatcattgactttggcatagttcacttaagactttgtttgataaaataaatctctttcactctaattaggaagcatttttgggatcctgattaatgctctaatattgtggggccaaaaaatatgtggaacgtggccctgcagttagatgagctgagatcactatagtactatatagcgctctaaatcctaaatgctagatcactgtaatactgtacagatcagccacttgctggcttgtgactctgggccatttacttcacctctcaaaaggcatatttaaagtgaggaaaataataagtttattttggaaattcagttagatgatgcaaattgtttactgtaatttctagcatgtagttcgtgctccatgcatttaactgttattacaggttgtattagtatcacattaaattacccactgaagtgaaagtgaaaccagaatgctgtcaacgatt

SEQ ID NO: 4963 - DNA, 2010 bp, Homo sapien
gcagcggcagcagggacggttgctgcaggttcggggtcggccggcctgcgcgtgggcttgcgaggacgctgttcgtcccctgcgctggggtgtccgacagcgaggaggagaacgacgcacggagcccgcgcgactggaaccagcaaagctccatctgtcggcagaggagaagggggaggaggcacggccgaggcaaacgagcggacgcctcgtcgccgggtgccggtatcaccccgctgcaacgccttccagcaaaagccaccgcggcccgggttgcagcagccggacggatgccaaggccacacggcagccacgggggcagccgtcgcagtcgccgtcccacacgggctgcggacaccaagggttgctaatgaagtgattgagaagaaacagtgaacatcctcatttcacagataagacaacatggatcagccttttactgtgaattctctgaaaaagttagctgctatgcctgaccatacagatgtttccctaagcccagaagagcgagtccgtgccctaagcaagcttggttgtaatatcaccatcagtgaagacatcactccacgacgttactttaggtctggagtagagatggagaggatggcgtctgtgtatttggaagaaggaaatttggaaaatgcctttgttctttataataaatttataaccttatttgtagaaaagcttcctaaccatcgagattaccagcaatgtgcagtacctgaaaagcaggatattatgaagaaactgaaggagattgcattcccaaggacagatgaattgaaaaacgaccttttaaagaaatataacgtagaataccaagaatatttgcaaagcaaaaacaaatataaagctgaaattctcaaaaaattggagcatcagagattgatagaggcagaaaggaagcggattgctcagatgcgccagcagcagctagaatcggagcagtttctgtttttcgaagatcaactcaagaagcaagagttagcccgaggtcaaatgcgaagtcagcaaacctcagggctgtcagagcagattgatgggagcgctttgtcctgcttttccacacaccagaacaattccttgctgaatgtatttgcagatcaacctaataaaagtgatgcaaccaattatgctagccactctcctcctgtaaacagggccttaacaccagctgctactctaagtgctgttcagaatttagtggttgaaggactgcgatgtgtagttttgccagaagatctttgccacaaatttctgcaactggcagaatctaatacagtgagaggaatagaaacctgtggaatactctgtggaaaactgacacataatgaatttactattacccatgtaattgtgccaaagcagtctgcgggaccagactattgtgacatggagaatgtagaggaattattcaatgttcaggatcaacatgatctcctcactctaggatggatccatacacatcccactcaaactgcatttttatccagcgttgatcttcacactcactgttcctatcaactcatgttgccagaggccattgccattgtttgctcaccaaagcataaagacactggcatcttcaggctcaccaatgctggcatgcttgaggtttctgcttgtaaaaaaaagggctttcatccacacaccaaggagcccaggctgttcagtatatgcaaacatgtgttggtaaaagacataaaaataattgtgttggatctgaggtgatatgttctgaatgtaagcaccgtcaacatcagacacctactcatggacatgtggttgccggattttcttaagatgtttccagaaatgactgatattttatatttatacattttagatgacaaagcttgatatttattgctgttgcacattttaaagttttctttttgggttgctctgtgtcaagagaggttacatggtgttaaatcggtacctgataatgtacccaaatactatggccagataataaattgtgctgcaaacaaaaaaaaaaaaaaa

SEQ ID NO: 4964 - protein, 421 aa, Homo sapien
MPDHTDVSLSPEERVRALSKLGCNITISEDITPRRYFRSGVEMERMASVYLEEGNLENAFVLYNKFITLFVEKLPNHRDYQQCAVPEKQDIMKKLKEIAFPRTDELKNDLLKKYNVEYQEYLQSKNKYKAEILKKLEHQRLIEAERKRIAQMRQQQLESEQFLFFEDQLKKQELARGQMRSQQTSGLSEQIDGSALSCFSTHQNNSLLNVFADQPNKSDATNYASHSPPVNRALTPAATLSAVQNLVVEGLRCVVLPEDLCHKFLQLAESNTVRGIETCGILCGKLTHNEFTITHVIVPKQSAGPDYCDMENVEELFNVQDQHDLLTLGWIHTHPTQTAFLSSVDLHTHCSYQLMLPEAIAIVCSPKHKDTGIFRLTNAGMLEVSACKKKGFHPHTKEPRLFSICKHVLVKDIKIIVLDLR

SEQ ID NO: 4965 - DNA, 1508 bp, Homo sapien
cgctaagcgtcccagccgcatccctcccgcagcgacggcggcccgggacccgcgggctgtgaaccatgaacacccgcaatagagtggtgaactccgggctcggcgcctcccctgcctcccgcccgacccgggatccccaggacccttctgggcggcaaggggagctgagccccgtggaagaccagagagagggtttggaggcagcccctaagggcccttcgcgggagagcgtcgtgcacgcgggccagaggcgcacaagtgcatacaccttgatagcaccaaatataaaccggagaaatgagatacaaagaattgcggagcaggagctggccaacctggagaagtggaaggagcagaacagagctaaaccggttcacctggtgcccagacggctaggtggaagccagtcagaaactgaagtcagacagaaacaacaactccagctgatgcaatctaaatacaagcaaaagctaaaaagagaagaatctgtaagaatcaagaaggaagctgaagaagctgaactccaaaaaatgaaggcaattcagagagagaagagcaataaactggaggagaaaaaaagacttcaagaaaaccttagaagagaagcatttagagagcatcagcaatacaaaaccgctgagttcttgagcaaactgaacacagaatcgccagacagaagtgcctgtcaaagtgctgtttgtggcccacaatcctcaacatgggccagaagctgggcttacagagattctctaaaggcagaagaaaacagaaaattgcaaaagatgaaggatgaacaacatcaaaagagtgaattactggaactgaaacggcagcagcaagagcaagaaagagccaaaatccaccagactgaacacaggagggtaaataatgcttttctggaccgactccaaggcaaaagtcaaccaggtggcctcgagcaatctggaggctgttggaatatgaatagcggtaacagctggggtatatgagaaaatattgactcctatctggccttcatcaactgacctcgaaaagcctcatgagatgctttttcttaatgtgattttgttcagcctcactgtttttaccttaatttcaactgcccacacacttgaccgtgcagtcaggagtgactggcttctccttgtcctcatttatgcatgtttggaggagctgattcctgaactcatatttaaactctactgccagggaaatgctacattatttttctaattggaagtataattagagtgatgttggtagggtagaaaaagagggagtcacttgatgctttcaggttaatcagagctatgggtgctacaggcttgtctttctaagtgacatattcttatctaattctcagatcaggttttgaaagctttgggggtctttttagattttaatccctactttctttatggtacaaatatgtacaaaagaaaaaggtcttatattcttttacacaaatttataaataaattttgaactccttctgtaaaaaaaaaaaa

SEQ ID NO: 4966 - protein, 307 aa, Homo sapien
MNTRNRVVNSGLGASPASRPTRDPQDPSGRQGELSPVEDQREGLEAAPKGPSRESVVHAGQRRTSAYTLIAPNINRRNEIQRIAEQELANLEKWKEQNRAKPVHLVPRRLGGSQSETEVRQKQQLQLMQSKYKQKLKREESVRIKKEAEEAELQKMKAIQREKSNKLEEKKRLQENLRREAFREHQQYKTAEFLSKLNTESPDRSACQSAVCGPQSSTWARSWAYRDSLKAEENRKLQKMKDEQHQKSELLELKRQQQEQERAKIHQTEHRRVNNAFLDRLQGKSQPGGLEQSGGCWNMNSGNSWGI

SEQ ID NO: 4967 - DNA, 2868 bp, Homo sapien
aggacatgagcaacattgacctggtggagggcgacgagggcaggatgtgcatcaacacagagtggggggccttcggggacgacggggccctggaggacattcgcactgagttcgacagggagctggacctcggctctctcaacccaggaaagcaactgttcgagaagatgatcagtggcctgtacctgggggagcttgtcaggcttatcttgctgaagatggccaaggctggcctcctgtttggtggtgagaaatcttctgctctccacactaagggcaagatcgaaacacggcacgtggctgccatggagaagtataaagaaggccttgctaatacaagagagatcctggtggacctgggtctggaaccgtctgaggctgactgcattgccgtccagcatgtctgtaccatcgtctccttccgctcggccaatctctgtgcagcagctctggcggccatcctgacacgcctccgggagaacaagaaggtggaacggctccggaccacagtgggcatggacggcaccctctacaagatacaccctcagtacccaaaacgcctgcacaaggtggtgaggaaactggtcccaagctgtgatgtccgcttcctcctgtcagagagtggcagcaccaagggggccgccatggtgaccgcggtggcctcccgcgtgcaggcccagcggaagcagatcgacagggtgctggctttgttccagctgacccgagagcagctcgtggacgtgcaggccaagatgcgggctgagctggagtatgggctgaagaagaagagccacgggctggccacggtcaggatgctgcccacctacgtctgcgggctgccggacggcacagagaaaggaaagtttctcgccctggatcttgggggaaccaacttccgggtcctcctggtgaagatcagaagtggacggaggtcagtgcgaatgtacaacaagatcttcgccatccccctggagatcatgcagggcactggtgaggagctctttgatcacattgtgcagtgcatcgccgacttcctggactacatgggcctcaagggagcctccctacctttgggcttcacattctcatttccctgcaggcagatgagcattgacaagggaacactcatagggtggaccaaaggtttcaaggccactgactgtgaaggggaggacgtggtggacatgctcagggaagccatcaagaggagaaacgagtttgacctggacattgttgcagtcgtgaatgatacagtggggaccatgatgacctgtggctatgaagatcctaattgtgagattggcctgattgcaggaacaggcagcaacatgtgctacatggaggacatgaggaacatcgagatggtggaggggggtgaagggaagatgtgcatcaatacagagtggggaggatttggagacaatggctgcatagatgacatccggacccgatacgacacggaggtggatgaggggtccttgaatcctggcaagcagagatacgagaaaatgaccagtgggatgtacttgggggagattgtgcggcagatcctgatcgacctgaccaagcagggtctcctcttccgagggcagatttcagagcgtctccggaccaggggcatcttcgaaaccaagttcctgtcccagatcgaaagcgatcggctggcccttctccaggtcaggaggattctgcagcagctgggcctggacagcacgtgtgaggacagcatcgtggtgaaggaggtgtgcggagccgtgtcccggcgggcggcccagctctgcggtgctggcctggccgctatagtggaaaaaaggagagaagaccaggggctagagcacctgaggatcactgtgggtgtggacggcaccctgtacaagctgcaccctcacttttctagaatattgcaggaaactgtgaaggaactagcccctcgatgtgatgtgacattcatgctgtcagaagatggcagtggaaaaggggcagcactgatcactgctgtggccaagaggttacagcaggcacagaaggagaactaggaacccctgggattggacctgatgcatcttggatactgaacagcttttcctctggcagatcagttggtcagagaccaatgggcaccctcctggctgacctcaccttctggatggccgaaagagaaccccaggttctcgggtactcttagtatcttgtactggatttgcagtgacattacatgacatctctatttggtatatttgggccaaaatgggccaacttatgaaatcaaagtgtctgtcctgagagatcccctttcaacacattgttcaggtgaggcttgagctgtcaattctctatggctttcagtcttgtggctgcgggacttggaaatatatagaatctgcccatgtggctggcaggctgtttccccattgggatgcttaagccatctcttataggggattggaccctgtacttgtggatgaacattggagagcaagaggaactcacgttatgaactagggggatctcatctaacttgtccttaacttgccatgttgacttcaaacctgttaagagaacaaagactttgaagtatccagccccagggtgcagagaggttgattgccagggagcactgcaggaatcattgcatgcttaaagcgagttatgtcagcaccctgtaggattttgttccttattaagtgtgtgccatgtggtggggtgctgtctggggcatctgtttttcattttgcctgtggtttgtgttgcaggtgttgatagttgttttaaggattgttaggtataggaaatccagtaaattaataaaaaaattttgattttccaataaactttgcaaaaaaaaaaaaaaaaaaaaaaaaaaaaaaa

SEQ ID NO: 4968 - DNA, 382 bp, Homo sapien
tttttttttttttttgaaaaaggggggaagggtttcttttatccttttttttttgggtgacttctatcaaaacacagaaatacagcacacgcacaaaccagcacaaaagcgcagcgctctatttacagctccggctggcacctgcccacctggccagccgcctgcagggaggggtgggagaggggtcagccacatcagcagggaaaggatacgaagcaggtaaagacagaaggaaaatgggcgggtgcggagaaaccaagagggaggtggagctccagcaatgcggacacgaggagacaggagcaaaaggggcgtgggggagacctgacctgtccttcctctctccccccagattcccatccaggactccaaaagcatagct

SEQ ID NO: 4969 - DNA, 3984 bp, Homo sapien; identical to SEQ ID NO: 3777

SEQ ID NO: 4970 - protein, 496 aa, Homo sapien; identical to SEQ ID NO: 3778

SEQ ID NO: 4971 - DNA, 5164 bp, Homo sapien
catttggattctcaggaagatttctgaaactggaaagccatagcataactgaatcaaaatcgttgattccagtagcttggacatccctgacacagatgcttttggaagcacctggtattttcttattgggtcaaagaaaaagattctcaaccatgccagaaacagaaacacatgagagagagactgaattgttttcaccaccttctgatgtccgaggcatgacaaaacttgatagaacagcttttaaaaagacagtcaacattccagtgcttaaagtgaggaaagaaatagtcagtaaattgatgcgatccctaaaaagggcagcattgcagcgcccaggcataagacgtgtgattgaagatccggaagataaagaaagtagactaatcatgttggatccctataaaatatttactcatgattcctttgagaaagcagaactcagtgttttagagcagcttaatgtcagtccacagatctctaaatacaatttggaactaacatatgaacactttaagtcagaagaaatcttgagagctgtgcttcctgaaggtcaagatgtaacttcagggtttagcaggattggacatattgcacacctaaaccttcgagatcatcagctgcctttcaaacatttaattggccaggttatgattgacaaaaatccaggaatcacctcagcagtaaataaaataaataatattgacaatatgtaccgaaatttccaaatggaagtgctatctggagagcagaacatgatgacaaaggttcgagaaaacaactacacctatgaatttgatttttcaaaagtctattggaatcctcgtctgtctacagaacacagccgtatcacagaacttctcaaacctggggatgtcctatttgatgtttttgctggggttgggccctttgccattccagtagcaaagaaaaactgcactgtatttgccaatgatctcaatcctgaatctcataaatggctgttgtacaactgtaaattaaataaagtggaccaaaaggtgaaagtcttcaacttggatgggaaagacttcctccaaggaccagtcaaagaagagttaatgcagctgctgggtctgtcaaaagaaagaaaaccctctgtgcacgttgtcatgaacttgccagcaaaagctataaagtttcttagtgctttcaagtggcttttagatgggcagccatgcagcagtgagttccttcccatagtgcattgttatagcttttccaaagatgctaaccctgctgaggatgttcggcaaagggctggagctgtgttaggcatttctctggaggcatgcagttcagttcacctggtaagaaatgtggccccaaacaaggaaatgctgtgcatcacgtttcagattcctgcctctgtcctctacaagaaccagaccagaaatccagagaatcatgaagatccacctcttaaaaggcagaggacggctgaagccttttcagacgaaaaaacacaaattgtttcaaacacttaattggaaatgttttctccatctccctaccagacttacatgtagtgaaatagaatttgtattatttaataaaattttagggtttggtttttactattgaacccttgtactttgccttattttacaaattgaggattaccaattaaactttaactgaactaaggctaccaaatacattccctgttatctaaattataacatacaattattttataacaaaatatatctaatttttattggataaatatgaataaatattttctctcagggaaaataatttttgaaagtagggtgattgagtactaactaggaaggtattaacaccactttgtagttgtcctttacgtaactactcctttactgccaattaactatcaccataaaagtaataaaaaatgaaattatttagaacggggcaggcaaactacatcctgcaggccaaatctgtcccaccacctgttttcatatggcctgtggcctaataatgttcttacgttttccattggttgaaaaataatcaaaagaacattttgtgacgtgaaaattttatgacatctattatgtatcagttttaaaaattagaattgtatgaaattaagagtttcagagttcataaagtttgattggaacataccatgctcgtttgtttacatatcatctgcagctgttttttgtttttaatatggaacgcttcacgaatttgcatgtcatccttgcgcagggaccattctgatcttctctgtaccattccagttttttagtatatgtgctgctgaagtgaggactgcagctgctttcttgaacaatagcagagttgagtggttgcaacacacactgaatgtgactgtcatcacttcacactgctgtttgacacatcacaaatcactgatgtggttgtaacgacagcattttgagtgccatgtatatcacatgaacccacattttattttttattaccagagcatatctattatagcaaaacaagaaaagtggactttgttgttatttttaaagtacagtagggtgtgaattattttgatgttgaattagacgacaaagcatctatatagctaagctaaaagaataaccattgacattaccagacaaaccactcatcacagtattcccaactcacaggcaagcaactgttagaaaaattagaaaatttaaaatggaaataacaaagcagaatttcttcgcaaaatgaaaatgaggctgcaacaacagtaagtctctaagtcaatcatttgttagccaagcaaagccatttattgatggtgtgaattaattatgtttggatgcagcagctgaatatatccagagaaaataaacttaagattactggcctttggcaagaacagttgcttaaagagttaaggacattgaaagcgacataaatagtcactttaaaaaggaaatgattctggatggttctttgactctatttttatttttacttagagacagggtcttgctctgttgcccaggctggagtgtagagacacagttacacctcaatgtaaccttgaactcctaggcttgagatcttcccatctcggcttcccaatgtgtgaaggttacaggtgtgagcccttatatgtggccctcgtgaatggtttagcactatccccttggtggtgtccttacgataatgagttatgagatcttgttgtttcaaagtatgtggcactcgccccccacactctcttgctcctgccttcgccatgtgaagtgccttctcctattttgccttctaccatgagtaaaagcttcctgaggcttccccagaagcagatgccagtgctatgcttcctatagcctggagaactgtgagccaattatacctcttttcttataaattacccagtatcaagtatttctttatagcaatgcaagaatggcctaaaacacaaggcaaaacaactttgatatggtacagtcattttgacaatcgatatttgaatcacaatatttgatgacaatatccttacacatttgtcatactatcaaagagaaagaaacaagatttccattcccacaaattttagtgagtatattttctgagttcagcatttttagggacctaggtgcaagtgcaaaggaaatttccctgtttcaaaatctatttaactgcaattgaggtgattcaacctaattttcagtaagaagtgattaaaataatgacatgctaaaaggcaaatttcaagggaagaaatgtaaaagaattttacaaatgctttccaagtgatgaatatgctcagttaatttcatatgctcctggattgatagcagtatttggcaatacctatctgtatgagaagacatttttaaagatgaaatgtgtaaaatcttattaccattagtattaatggttaatgatggttaatgataaccattaataggcaatcatttacaactgattttgatcacagggaacacttacttagaaccctgattagaggcaatgttattctcaccaaaaaaggcattacaaaaaattgggctatattttgaattttgtcaattaaaaaagcgtgggagcagtgtgaaggagaagaggcaagaacgacccctggaccgaccaaagcccgcgcgctgctgcgtcccacacccggtgcccacatcccgccgccgccgccgccgccgccatgcccaagagaaagactgaaggggatgctaaaggagataaagccaaggtgaaggatgaatcacagagaagatctgcgaggttgtctgctaaacctgctcctccaaagccagagcccaagcctaaaaaggcccctgcaaagaagggagagaaggtacccaaagggaaaaagagaaaagctgatgctggcaaggagcgggaaggtgctggagatcccaagtgaagtgtgtgcattttttataactgtacttctggtgactgtacagtttgaaatattctttatcaagttttataaaaatgcagaattttgttttactttttttaagctatgttgttagcacacagaacacttcattgttgtgtttgggggaaggggtatgtgtcactaatagaatatctctgaagctggattgatacggggaaaacatctttcccttctagttttgagagacttcctcttggctcccaggaggagggatttcctgactttgacacacatggccaccttggcacaaaagccttgtggtatggaaaaacaaattcgtttttatgtcttcttttccctttccatctttcagcatagacttaacccttaagcccagacatctgttgggacctgacccccggtcattggttaccagtgtgtctggcaatctggactttccagtgatgccactgagatggcacctgtcaaaagagcagtggttccatttctagattatggatcttcggataaattctgccattttcatttcacttcctgaaagtcagggttggcttgtgaaaagttgttaaacaacatgctaaatgtgaaatgttaaccctctaaactttccctgttcagagcatcagatgaggacttcattgggttttatagtggctgatttttggtagtccattgaagaagagagtttgaaagttgtatactgttaatgactgtctgcccatgtcctgcctgaaataccatgattgtttatggaaagtatctttaataaagctggatacagtttgaaag

SEQ ID NO: 4972 - protein, 500 aa, Homo sapien
FGFSGRFLKLESHSITESKSLIPVAWTSLTQMLLEAPGIFLLGQRKRFSTMPETETHERETELFSPPSDVRGMTKLDRTAFKKTVNIPVLKVRKEIVSKLMRSLKRAALQRPGIRRVIEDPEDKESRLIMLDPYKIFTHDSFEKAELSVLEQLNVSPQISKYNLELTYEHFKSEEILRAVLPEGQDVTSGFSRIGHIAHLNLRDHQLPFKHLIGQVMIDKNPGITSAVNKINNIDNMYRNFQMEVLSGEQNMMTKVRENNYTYEFDFSKVYWNPRLSTEHSRITELLKPGDVLFDVFAGVGPFAIPVAKKNCTVFANDLNPESHKWLLYNCKLNKVDQKVKVFNLDGKDFLQGPVKEELMQLLGLSKERKPSVHVVMNLPAKAIKFLSAFKWLLDGQPCSSEFLPIVHCYSFSKDANPAEDVRQRAGAVLGISLEACSSVHLVRNVAPNKEMLCITFQIPASVLYKNQTRNPENHEDPPLKRQRTAEAFSDEKTQIVSNT

SEQ ID NO: 4973 - DNA, 1050 bp, Homo sapien
atgaactaatttatttaggcttaatctctaaaatttcagcctgatcttaaccaatgaaatttcaaaaacaaaaactgtacttcagtctacaattgaatggaattcagtgtagaccagtacaatggaatgtactggctgagatgggagggtcccttgagcccaggagttggaggctgtagtgagctgtgatggtgtctgtgaatagtgacggcactcaagcctaggtgacatagcaagatgccatctcaaagaaatatagatatataacataaaataaataactttatacatttcctggaggaaaagtactctgtaaattcaagagatctgaatcaaattactcaaccttttggaatttgatcctctactgtaatactcatatgctagattactgaattttcagagtgaaaaaaaattgacagggtaatatataggccatattatagtgaagatcataagtataaatgtcctcgtttaatctttccatattgaggacagcctctgcatataaaaatgttcattgggagaaaaattatttttaaaactaaatttttatagtagtcctccattactggcaattaaggagcaacccacaaaatgtcattatgtggttctttgattaggcataaaaagtattgcaaacagcttttctattcctttggaatatgaatctttttaatgtctaaagttaacctgcaacattttctagtaggacaagtcaatgtaaattaggtaatttttgcctgttttataccttctgttgcattttgttcaaatgaaaacattttttaaaacatgattgaatttttacttctcagataattggtttgagtgtggaatttcttttttaacactttgatatgtaagttagtgtaaattaatacttttataacactactaggctttatatttttatggaatgttttaaaatttgaaatttttgaagtgttaatttagcagtactttatcattatgtgccaatactgacaagaaaaacaattttttatgtatttaatatactatggtattcaataaattctattttaaaat

SEQ ID NO: 4974 - protein, 9 aa, Homo sapien
MVFNKFYFK

SEQ ID NO: 4975 - DNA, 1428 bp, Homo sapien
aaacgtggccgggtctgcaagctaggtgccagcggggaaagtttccctgcttcttatcgtctgctttaacgccttaaatagcccgctgaaggctgcagcaggtgctaggtagcagcctcccggccctcgggaaaggcggggtggggaggcgagagcagcttagcctcctcgacctcccttcctggtgacggacgaacagttcccgtagaatttcgcttcaccgagtgaccttgagcccagggcgacggtcagcttgttaattcctggctgcaggaactttgtgagaattttaatgcatggaaaagctgtccatgttccaactgctgtacatccaaaagtctcagtgtaatagcaggaccaaaatattctgtcaatcagctgaccatatacttaatgactcctaaaatctcgtggacttctaagaaagcgccatggcctgtgctgctgttatgattcctgggttgttgcggtgctctgttggagccatccgtattgaggctgcgtcactgagattgacactcagcactttgcgccaccttactctaaccagcataatgaaatccaaaaggaaaactgatcacatggagagaactgcaagtgtccttcgacgggagattgtgtcagcagctaaggtgtgtggagctgccagtgagtcaccgtcagtgaagagcctccgcttgcttgttgctgatcaagacttttcctttaaagctggccagtgggttgatttctttattccaggagtctctgtggttggtgggttttcaatatgctccagtcccagactgctagaacaagagagagtgatagaattggcagtgaaatatacgaaccaccctcctgccctctgggttcacaatacgtgtacacttgactgtgaagtggctgtgagagtgggtggagagttcttctttgaccctcagcctgcggatgcctctagaaacctcgtgttgattgcaggaggagtcggaattaaccctctgctttccatcctgcggcacgcagcagatctcctcagagagcaggcaaacaaaagaaatggatatgagataggaacaataaaactattctacagtgcaaaaaataccagcgaactcctgtttaagaaaaatatccttgatttagtaaatgaatttcctgagaagattgcatgcagtttgcatgttacaaaacagactacacaaatcaatgcggaactcaagccatacatcacggaaggaagaataacggagaaggagataagagatcatatttcaaaagagactttgttctatatttgtggcccacctccaatgacagactttttctccaagcaactggaaaacaaccatgtacccaaagaacacatttgctttgagaagtggtggtaggaggcagacaaaggcagaaaaaataaagaggtgagatctaaaaaaaaaaaaaaaaaaa

SEQ ID NO: 4976 - protein, 312 aa, Homo sapien
MACAAVMIPGLLRCSVGAIRIEAASLRLTLSTLRHLTLTSIMKSKRKTDHMERTASVLRREIVSAAKVCGAASESPSVKSLRLLVADQDFSFKAGQWVDFFIPGVSVVGGFSICSSPRLLEQERVIELAVKYTNHPPALWVHNTCTLDCEVAVRVGGEFFFDPQPADASRNLVLIAGGVGINPLLSILRHAADLLREQANKRNGYEIGTIKLFYSAKNTSELLFKKNILDLVNEFPEKIACSLHVTKQTTQINAELKPYITEGRITEKEIRDHISKETLFYICGPPPMTDFFSKQLENNHVPKEHICFEKWW

SEQ ID NO: 4977 - DNA, 228 bp, Homo sapien
gtctgtaatgaagtgttatcgttttccctcatctgagtctgaattagataaaatgccttcccatcagccagtgctctgaggtgatcaagtactagattgaactagagatttttgtccttagtttctttgctatctaatgtttacacaagtaaatagtctaagatttgctggatgacagaaaaaacaggtaaggcctttaatagatggccaatagatgccctgataatg

SEQ ID NO: 4978 - DNA, 1780 bp, Homo sapien
  Unsure 1276-1411: Unknown base
ggatcttggaaacaattggttggttgcccactttccgtaggatcaagagcagaacctttcacatggcacagaagaacccaggttgcgcttcatacctgcatattccagccttagcctgccatttctctccttggcactttgtgctccagcaacactggtctcagttggtcatcctcaaacttgggttccatatccagcctcaggacctctgttcctgttactatggttccttgcatgtcgcctgctcttactaaagagctcgtgtgttttccagcacacttcggtttatctcttgatgatgatgctagtctctccctccgcaagggcggaaaggctgcctgttggtttgtaccagtgtttcctaacgtgtagctgcagtcagtatttggctaagctgttcccaggggctcaacagatgctttcggatgagccttaactgacccaatcctttgtgatgcgggagagattgctaggcctcgctcacctggccagaaccagggaaagaggccgcggttgcagcgcgattccaggccctgggcgtcaggcgcggggtgggcagctctccccgggcggtggggcccttgtgaccgcgaggcggggcgcaccaggaagggagtgggacagcgcgggcgcccagggatgtggcctggttacctgccttctctgatacgtcaagacaccttcaacaatggcttgcagctgtaccctgttggctgcacccaggacgcccttttcactgctaagcagtcctacctgaggcccaggggctgccagattgacccataaataatctccggcgcctcagatccagaagctgctgagcctgatcttagtgccttctcctttctctgtgtggccccccagcccctttccccactgccttgtgtccaaggccctttccttcatgtatccatggaggagagacaaaaatacacatcaataaaataagatagggaatccataaatagacattcagaagtatggccaacggatttatcttaaaaccaatggaggaagaagagtttcaataaatgttgtggacttccatttgtcaaagaccaaaacaaaggaaccccaaccttacatgtaatacaaacttaactcaaaatggatcatatatctaaatgtaaaatggaaagctataaaactgaaaacagactatctttacaacctaggcgtaggtatagtttttagacattacaccaaaagcacatgccgtaaaagaaaaaatagataaattggtggatttcattaaaattaaaaaactttttctctnnnnnnnnnnnnnnnnnnnnnnnnnnnnnnnnnnnnnnnnnnnnnnnnnnnnnnnnnnnnnnnnnnnnnnnnnnnnnnnnnnnnnnnnnnnnnnnnnnnnnnnnnnnnnnnnnnnnnnnnnnnnnnnnnnnnnnnntgaggtaagagagagaccttctcatattgttgttttatattgttttatactcagtacctgttttaagaaaaaaacaaggaagtgaaatcaaagacaggcagcccggcaccaggcctgaaaccagccctgggcctgcctggcctaaacctagtagttaaaaatcaacttacgacttagaacctgatgttatccgtagattccaagcattgtataaaaaaattgtgaaactccctgttgtgttctgtaccagtgcatgaaacccctgtcacatatcccctagattgctcaatcaatcacgaccctttcatgtgaaatctttagtgttgtgagcccttaaaagggacagaaattgtgcacttgaggagctca

SEQ ID NO: 4979 - protein, 83 aa, Homo sapien [sequence omitted]

SEQ ID NO: 4980 - DNA, 1895 bp, Homo sapien
ggcacagggctgtgactagcgggccggcccgggccaggacagcgggcggcgggcggcgcgggcctggccccgggatggctatgttccgcagcctggtggcctcggctcagcagcggcagccgccggccgggccggcgggcggcgacagcggcctggaggcgcagtacacctgccccatctgcctggaggtctatcaccggcccgtggccatcggcagctgcggccacacgttctgcggggagtgtctccagccctgcctgcaggtgccatccccgctgtgcccactgtgccgcctgcccttcgaccccaagaaggtggacaaggccacccacgtggagaagcagctctcatcctacaaagcgccctgtcgaggctgcaacaaaaaggtgaccctggcaaagatgagagtgcacatttcgtcctgcctgaaggtccaggagcagatggccaactgccccaagttcgtccccgtggtgcccacatcacagcctatccccagcaacatccccaacaggtccaccttcgcctgcccgtactgtggtgcccgcaacctggaccagcaggagctggtgaagcactgtgtggaaagccaccgcagcgaccccaaccgcgtggtgtgccccatctgctcggcaatgccctggggggaccccagctacaagagcgccaacttcctgcagcacctgcttcaccgacacaagttctcctacgacacctttgtggactacagtattgacgaggaggccgccttccaggctgctctggccctgtctctctctgagaactgaagggaagcgcagccacccgcctgcgtctggggtcagggatgtccccgctcctgtgtcgcacctggcacctgctcgggagcgcacctcaccggactgagctcacaggaggagcctgcacccgcgcagaaggggagccggggccgagcctccgggcctgaatacgggccagccgccgaggccgccagagcagggccgcctggtcccaccggcgtcgctgggttcttcggtgcttctggccgagcaggcggcctacttgggcagggctggacgctgggacctggagctgccgccgtctcttcaaagccatgataccccctcgtgggaagaagggaccgacgcgcgagtcgcgctccgcagtcgagccgggaggaacccaggctgctgccctgcccagcccgaccctgccccggccccgcttccaccttgcgcatttggtactggcttttgtgatacttaggaaccctggcatcttttctatattatccagtgtgataatcttttcacgttttatagagcaaagacagagcagttactcttcatattgcaatatctgtgtttgactaggaataatagtatttttatggaacatttacaaaattatattttttaagaaaacaatcaaaacaagcattgggggattggggcaaggatggaaggagcagtggggcagctgccagagctcaggcgagccatggggtctgctgtggggtctgccctggccacccactgtgtgtctgggtccttgaggtttgtacgtttctctttgatgaccaggaagaaatcccagcaccccagccacaggctgtggctgctcccagcagaggtggggccggcagagaaggggcctcctccacccagagtcctggccttggcccgctgtcaccttcaaagctgactgtgccccgctgcgggaggggacggcaccccagtggtggcagagcttgggggcctgggcaggggcccgcttggcgggccgggcaacacgtcaacattcttttctgttcttggcattaattattgctgtctttttttaaaaaaaaaaagtttaaataaaatgtctcagagcaaaaaaaaaaaaaaaaaaaaaaaaaaaaaaaaaaaaaaaaa

SEQ ID NO: 4981 - protein, 237 aa, Homo sapien
MAMFRSLVASAQQRQPPAGPAGGDSGLEAQYTCPICLEVYHRPVAIGSCGHTFCGECLQPCLQVPSPLCPLCRLPFDPKKVDKATHVEKQLSSYKAPCRGCNKKVTLAKMRVHISSCLKVQEQMANCPKFVPVVPTSQPIPSNIPNRSTFACPYCGARNLDQQELVKHCVESHRSDPNRVVCPICSAMPWGDPSYKSANFLQHLLHRHKFSYDTFVDYSIDEEAAFQAALALSLSEN

SEQ ID NO: 4982 - DNA, 5410 bp, Homo sapien
acttgaacccaggaggtggaggttgcagtgagcggagattgtgccactgcacttggacctggctgacacagcaagactatgtttaaaaaaaaagagagagaaaaaaaaacaagaaggaagagcaatggcgacactggatcgcaaagtgcccagtccggaggcgtttctgggcaaaccctggtcctcctggatcgacgccgccaaattacactgctccgacaatgtagatttagaagaggctggaaaagagggtggaaaaagcagggaggttatgaggcttaataaagaagatatgcacttatttggccattacccagcacatgacgacttctatctcgtagtgtgcagtgcctgtaaccaggtcgtcaagccacaggttttccagtcgcactgcgagagaagacacggttcaatgtgtagaccttctccctctccagtgtctccagcctccaatcccaggacatcactagtacaggtgaaaacaaaagcctgtctcagcggccatcactctgccagcagcacctcaaagccattcaaaacgcccaaagacaatctacttacctccagcagcaaacagcacacagtctttcctgcgaaaggatcaagggataaaccatgtgttccagttcctgtagtcagtttagagaaaattcctaacctagtgaaggcagatggtgccaatgtcaaaatgaactccacaaccactactgcagtttctgcctcctccacctcgtcctctgccgtctccacccctcctttaattaagcctgtcctgatgtccaagtcagtgccaccttcaccagagaagatcttaaatggcaaaggaattctgccaaccaccatagacaagaaacaccaaaatggcaccaaaaacagcaacaagccttacaggagactttcagagagagaatttgacccaaataaacactgtggagtattggatcccgagacaaagaaaccttgcacaagatccctcacctgcaagacacattcgctaagccatcggagggcagtcccaggccggaaaaagcaatttgacctcctcctggcagaacacaaagcaaagtcccgggaaaaagaagttaaagataaagagcatctcctgacttccacgagggaaatacttccaagccaatccgggccggcacaggattctctgctagggtcttcagggagctctgggccagaaccaaaagttgcatcccctgcaaaatccagaccacccaactctgtacttcctagaccatcatctgcaaatagcataagcagcagcacatcttcaaatcatagcggccacactccagagcccccactcccaccggttggaggtgacctcgccagccgactgtccagtgatgaaggggagatggacggagccgacgaatccgagaagctagactgtcagttctccacgcaccaccccagacctctggcgttttgctcatttgggagtcgcctcatgggacgagggtactatgtgtttgatagaagatgggatcgttttcgattcgcactaaactccatggtagaaaaacacctgaattcacagatgtggaagaagatccctcctgcggcagatagccccctgccctcgccagcagcccacatcaccacccccgttccagcatccgttttgcagcctttcagcaaccccagtgctgtgtatcttccttcagctcccatcagctcgaggctcacctcttcttacataatgacatcagccatgctctcaaacgcagctttcgtgacatcgccggacccgagcgccctcatgtcccacaccacagctttccctcatgtggccgcaaccctcagcatcatggactcaaccttcaaggccccatccgccgtgtccccgataccagccgtcatcccttccccatcccacaagccatccaaaaccaaaaccagcaaatcctcaaaagtcaaagacctgtccacccgtagcgacgagtctccaagtaacaaaaaaaggaagccacagtcttcgacttcctcctcctcctcctcctcctcctcttccttgcagacatccctctcgtctccactgtcagggcctcacaaaaagaactgtgttttgaatgccagttctgctttgaactcctatcaggcggcccctccctataacagcctgtctgtgcacaactcaaacaatggggtgagcccactcagtgccaaactggagccctcaggacggacctcgctgcccggcggccccgcggacatagtgagacaggtgggcgcggtgggaggcagcagtgactcctgtcccctctctgtgccctcccttgcgctccacgcaggggacctctctctggcctcacacaatgctgtgtcttctctgcccctctcttttgacaaatcagaaggaaaaaagcgtaagaactcgagttctagtagcaaagcctgtaaaatcactaaaatgcctggtatgaatagcgttcacaaaaagaacccgcccagccttctcgcaccggtgcccgatcccgttaacagcacctcctctcggcaggttgggaaaaatagcagcctagctttgtcacaatccagtccttcaagtatatccagcccaggacacagccgacagaacacaaacagaacgggcaggataaggactcttccataacaagactatgaagccacttccacatcaattccaggccacctaatcccatccgaggaggccatggggaggaggagggaggggagtgggctggggggagagtctgttttctgtgcactccctgtgactctggcctttcttcttctttttttaattgaccaatttttagttaaaaaggcaaaagaaggtgaatttgagatttacagaaaacagttccagtgtttggtttccgctgtctttcctttcatttgccatgtttttacattcttccaaatttggggtcactcccctagctcctgatgctgctactgtaccatccttttgctccagccatgagagcagacattgcagaatgttggttccaggttggcatgctctgaagctcttgaactgtagcacaggcagagccctttttcttcctgtcatctccacccgattccttccatccctacgtctaccactctctgggtcctcactggtcttcaaaggacctggctctcataggatcccctcaggattgtgtgcagggagagggggctttgctggggaggagctgggagtggagagttggagggtgggtggggttccctcatccagtttccacagcccaccatggctggagccaaatgctagaagcgagattgagaacagtggccgtttagtgatgtggtttacctaataccactgtccagctgtgcagctcagaaaggataaaccagtcagggacaggggccagaacaggtttgggaaggtggcagcaagcagagcatggtgggtaggagatgatccctaaaaaaactggagactgtggtggtctgagctggtcaggaatctgcagaatcccttccaggaatcagtgtgccagtgcccacagcagggtgagctaggagggagaaatcccaggaaaaaggtcgtgagaacccagaaagccactccatgaggaggcacggtgaccacagctgctaaaggttcttaggctgccttcctgggctaggaagagccccccagggagagcttccacaaaagggtatgtgtcaaaccttttgtcagaataaataatagcatttcccacccacccccatgccctgggccacagggacttggtgggatcagcacacccatggatcagcttttgctgtcttagagacagccatccccatgaaggaatggtaaggacagccactgctcagtgaagaacagccatttggaagagccacgctggagccctgcagccatagaactattcacactggagttttaaaagaaacagcaataccataagctctagtagggaatcataatcaggaaaggaattcacaacataaaataggtgttctgtgctattaatcatgtaactttgtatatgatgtatagcaaagatactgggaggttttgtttcatccttaaatcagaaatgaatgctagtttcatagctgggcagaaccctcatccccaccccaaagttttccttttctttcccattcccccaacccaaagatcagactactgttaagtttcaccacacaattggaattgcaaagacgggaggcaaatggagtgattttcatcaatggaattgcactgacagtgagtgtttcttataggattactaaattttttaatataaaatgatttgtttaaaaatcaggagttgatattaagtaccaggacattagttcggatgatttcatttttatttctacagtgttaaaagtgcacttatatgctggtttatttacgtcttgggaaaagagactgcaaattgaagggatgattgttactttttctttttttaaaaaaaaaaggttaaggagattttaagacttataaatgtttaagaaattataaacaaggttagaccctttgaaaaaaagtttagaagatattcttaaagtaaatttttatagtgttaattttgtaataatttatgttttactatattacagagctaactgaccagaatagtttcagaaacaatatgaaacttaggaaagtttaagcaatgtttatatttttaaaatgttctttgaattatgtttttattgtacatttcttcagactgaaaagtatgtacatatctttgttatttttgcacaattttgtcttgttcggtttcagaggtctgttgttttttataatttattttgagttgtaaaacttgcaggagtaaaaacaaaaaacaaaatctccacaacaaaataaccctctgatttataaactcttatagtcaaagagggaaaacaaaggttgagagattaagtggctgcttctgagaaataatgtctcaaggactaaaggagcaattcaataggtttagacattgtagctctctacatcttgaattggaagctggaataaagagcccccaccccccccccaccctcatcgaatgctgcttactttgtcaaaagactggctatgaccaaggtgaggatatttctggaaaactgggcaaaaagggaaagcccacagtattcttccttggcagtcaaccacaggtttactttacaatgatgtattaaaaacttgcagcttgaaaaatggaatgcaaataaaaggttctctttgggtttgtcttaatggagttaaactggagcagcctataaaacatttttagggtgatgtcctctgggtccttctgttctgcacacccactcagtcttctctcccagccccttgactgcacacacccctctttgcctgaagatctcctgacttgtcgccagccatagaggctcgaaagctctggttgtgaagcataacgcaatgcatagacctgtcagccat

SEQ ID NO: 4983 - protein, 864 aa, Homo sapien
AEIVPLHLDLADTARLCLKKKREKKKQEGRAMATLDRKVPSPEAFLGKPWSSWIDAAKLHCSDNVDLEEAGKEGGKSREVMRLNKEDMHLFGHYPAHDDFYLVVCSACNQVVKPQVFQSHCERRHGSMCRPSPSPVSPASNPRTSLVQVKTKACLSGHHSASSTSKPFKTPKDNLLTSSSKQHTVFPAKGSRDKPCVPVPVVSLEKIPNLVKADGANVKMNSTTTTAVSASSTSSSAVSTPPLIKPVLMSKSVPPSPEKILNGKGILPTTIDKKHQNGTKNSNKPYRRLSEREFDPNKHCGVLDPETKKPCTRSLTCKTHSLSHRRAVPGRKKQFDLLLAEHKAKSREKEVKDKEHLLTSTREILPSQSGPAQDSLLGSSGSSGPEPKVASPAKSRPPNSVLPRPSSANSISSSTSSNHSGHTPEPPLPPVGGDLASRLSSDEGEMDGADESEKLDCQFSTHHPRPLAFCSFGSRLMGRGYYVFDRRWDRFRFALNSMVEKHLNSQMWKKIPPAADSPLPSPAAHITTPVPASVLQPFSNPSAVYLPSAPISSRLTSSYIMTSAMLSNAAFVTSPDPSALMSHTTAFPHVAATLSIMDSTFKAPSAVSPIPAVIPSPSHKPSKTKTSKSSKVKDLSTRSDESPSNKKRKPQSSTSSSSSSSSSSLQTSLSSPLSGPHKKNCVLNASSALNSYQAAPPYNSLSVHNSNNGVSPLSAKLEPSGRTSLPGGPADIVRQVGAVGGSSDSCPLSVPSLALHAGDLSLASHNAVSSLPLSFDKSEGKKRKNSSSSSKACKITKMPGMNSVHKKNPPSLLAPVPDPVNSTSSRQVGKNSSLALSQSSPSSISSPGHSRQNTNRTGRIRTLP

SEQ ID NO: 4984 - DNA, 4246 bp, Homo sapien
gggggggtgtctgggacgtaggcggggggctgaggtgagcgtaggtgggggggtctgggaggcgtcaggcgggtgtctggtctatgtggggcagcaagcagtggtgttttgtggccagcggcaggtgatgggagttgccgagtccacagcgctgtagactgcgccgcattagaatgcctggcctcctgatgctgtgctcttcatctagacccaagccccaggtcgtggtgacgatttctcccgtttttgactccctggaactgtattgcctgctttacctgcgtacatgttgattctttctcatggcaaccccgcaggaaaccatcaagatctcattttacagctgggattctctggttcacagaggtaacggagcttgcccgaggccagttaaacgagaagattcatcaccgctttgatggctgcctcacaaacttcacaaactgttgcatctcacgttccttttgcagatttgtgttcaactttagaacgaatacagaaaagtaaaggacgtgcagaaaaaatcagacacttcagggaatttttagattcttggagaaaatttcatgatgctcttcataagaaccacaaagatgtcacagactctttttatccagcaatgagactaattcttcctcagctagaaagagagagaatggcctatggaattaaagaaactatgcttgctaagctttatattgagttgcttaatttacctagagatggaaaagatgccctcaaacttttaaactacagaacacccactggaactcatggagatgctggagactttgcaatgattgcatattttgtgttgaagccaagatgtttacagaaaggaagtttaaccatacagcaagtaaacgaccttttagactcaattgccagcaataattctgctaaaagaaaagacctaataaaaaagagccttcttcaacttataactcagagttcagcacttgagcaaaagtggcttatacggatgatcataaaggatttaaagcttggtgttagtcagcaaactatcttttctgtttttcataatgatgctgctgagttgcataatgtcactacagatctggaaaaagtctgtaggcaactgcatgatccttctgtaggactcagtgatatttctatcactttattttctgcatttaaaccaatgctagctgctattgcagatattgagcacattgagaaggatatgaaacatcagagtttctacatagaaaccaagctagatggtgaacgtatgcaaatgcacaaagatggagatgtatataaatacttctctcgaaatggatataactacactgatcagtttggtgcttctcctactgaaggttctcttaccccattcattcataatgcattcaaagcagatatacaaatctgtattcttgatggtgagatgatggcctataatcctaatacacaaactttcatgcaaaagggaactaagtttgatattaaaagaatggtagaggattctgatctgcaaacttgttattgtgtttttgatgtattgatggttaataataaaaagctagggcatgagactctgagaaagaggtatgagattcttagtagtatttttacaccaattccaggtagaatagaaatagtgcagaaaacacaagctcatactaagaatgaagtaattgatgcattgaatgaagcaatagataaaagagaagagggaattatggtaaaacaacctctatccatctacaagccagacaaaagaggtgaagggtggttaaaaattaaaccagagtatgtcagtggactaatggatgaattggacattttaattgttggaggatattggggtaaaggatcacggggtggaatgatgtctcattttctgtgtgcagtagcagagaagccccctcctggtgagaagccatctgtgtttcatactctctctcgtgttgggtctggctgcaccatgaaagaactgtatgatctgggtttgaaattggccaagtattggaagccttttcatagaaaagctccaccaagcagcattttatgtggaacagagaagccagaagtatacattgaaccttgtaattctgtcattgttcagattaaagcagcagagatcgtacccagtgatatgtataaaactggctgcaccttgcgttttccacgaattgaaaagataagagatgacaaggagtggcatgagtgcatgaccctggacgacctagaacaacttagggggaaggcatctggtaagctcgcatctaaacacctttatataggtggtgatgatgaaccacaagaaaaaaagcggaaagctgccccaaagatgaagaaagttattggaattattgagcacttaaaagcacctaaccttactaacgttaacaaaatttctaatatatttgaagatgtagagttttgtgttatgagtggaacagatagccagccaaagcctgacctggagaacagaattgcagaatttggtggttatatagtacaaaatccaggcccagacacgtactgtgtaattgcagggtctgagaacatcagagtgaaaaacataattttgtcaaataaacatgatgttgtcaagcctgcatggcttttagaatgttttaagaccaaaagctttgtaccatggcagcctcgctttatgattcatatgtgcccatcaaccaaagaacattttgcccgtgaatatgattgctatggtgatagttatttcattgatacagacttgaaccaactgaaggaagtattctcaggaattaaaaattctaacgagcagactcctgaagaaatggcttctctgattgctgatttagaatatcggtattcctgggattgctctcctctcagtatgtttcgacgccacaccgtttatttggactcgtatgctgttattaatgacctgagtaccaaaaatgaggggacaaggttagctattaaagccttggagcttcggtttcatggagcaaaagtagtttcttgtttagctgagggagtgtctcatgtaataattggggaagatcatagtcgtgttgcagattttaaagcttttagaagaacttttaagagaaagtttaaaatcctaaaagaaagttgggtaactgattcaatagacaagtgtgaattacaagaagaaaaccagtatttgatttaaagctaggtttcctagtgaggaaagcctctgatctggcagactcattgcagcaggtggtaatgataaaatactaaactacattttatttttgtatcttaaaaatctatgcctaaaaagtatcattacatataggaaaacaataattttaacttttaaggttgaaaagacaatagcccaaagccaagaaagaaaaattatcttgaatgtagtattcaatgattttttatgatcaaggtgaaataaacagtctaaagaagaggtgtttttataatatccatatagaaatctagaatttttacttagatactaataaaatacatttagaaacttttaaagtcatgaaaaagcattaaccttctaaacagtatattctaaaaagtcaaaacgttaacaatagtttttatctaataaaagcactgcaagaaaatagggtagaattgttacagctggacttgtaaaaatatgtctttttactcagggtttaaaatgtcccatttaaatatgaaatgtaaacaaatttgttttttaaggttaaggccaaatgtaacaataaaaccctgtcgatggttttagctaaattagaggaagttgtatgagacttaatgatctaaaaacttaaaattgaattggtttgattaaaaataaagcttgcaattttaaaagtagctcacatttaatttcttgtgtgaaatagaacatgctttaaaggaagtatttttatgtgaatttgcattccagtataaatagtattcacaaaaaagattttcctagattttatctattgaataggtgtcaatatggcatgcatattgtaactttcattagaaataagttgctttgacttttaaaaatgacatagttagattatttaaagtcaatgtatatagtatatattatgtatggatttatataccaaattttggaatacagcctatctcatgaccatattgaaatgtacggaatttgatccatgcgatactatgtgtgcattatttgaaagttattggaaattttattcaaaccgtggaacaaatgtatgtgattttgttatacttcttaatttaaataaaatatttaatgcactattaaaat

SEQ ID NO: 4985 - protein, 911 aa, Homo sapien
MAASQTSQTVASHVPFADLCSTLERIQKSKGRAEKIRHFREFLDSWRKFHDALHKNHKDVTDSFYPAMRLILPQLERERMAYGIKETMLAKLYIELLNLPRDGKDALKLLNYRTPTGTHGDAGDFAMIAYFVLKPRCLQKGSLTIQQVNDLLDSIASNNSAKRKDLIKKSLLQLITQSSALEQKWLIRMIIKDLKLGVSQQTIFSVFHNDAAELHNVTTDLEKVCRQLHDPSVGLSDISITLFSAFKPMLAAIADIEHIEKDMKHQSFYIETKLDGERMQMHKDGDVYKYFSRNGYNYTDQFGASPTEGSLTPFIHNAFKADIQICILDGEMMAYNPNTQTFMQKGTKFDIKRMVEDSDLQTCYCVFDVLMVNNKKLGHETLRKRYEILSSIFTPIPGRIEIVQKTQAHTKNEVIDALNEAIDKREEGIMVKQPLSIYKPDKRGEGWLKIKPEYVSGLMDELDILIVGGYWGKGSRGGMMSHFLCAVAEKPPPGEKPSVFHTLSRVGSGCTMKELYDLGLKLAKYWKPFHRKAPPSSILCGTEKPEVYIEPCNSVIVQIKAAEIVPSDMYKTGCTLRFPRIEKIRDDKEWHECMTLDDLEQLRGKASGKLASKHLYIGGDDEPQEKKRKAAPKMKKVIGIIEHLKAPNLTNVNKISNIFEDVEFCVMSGTDSQPKPDLENRIAEFGGYIVQNPGPDTYCVIAGSENIRVKNIILSNKHDVVKPAWLLECFKTKSFVPWQPRFMIHMCPSTKEHFAREYDCYGDSYFIDTDLNQLKEVFSGIKNSNEQTPEEMASLIADLEYRYSWDCSPLSMFRRHTVYLDSYAVINDLSTKNEGTRLAIKALELRFHGAKVVSCLAEGVSHVIIGEDHSRVADFKAFRRTFKRKFKILKESWVTDSIDKCELQEENQYLI

SEQ ID NO: 4986 - DNA, 914 bp, Homo sapien
tcccaaagtgcagggattacaggtgtgagtgagccaccgcggccggcctctatcattttctgactcagcagctccaccaaaattgacatcctagcaaacactgtgaaggaattaacctaagtgcttccagagcatctcatgtaacctctatggagtaagtcactttttctgtaacatgtggcttttgaccttgatgaagactttgacttctcatccctgtctacatggaggaagatgattcagtggtggggaaaatgaacctcggtaacatttccaatgtccttcaagagggaaacaagttcagtgttatcatcgtggcattcgttagtttttttttttttaaatcacttttttagatacaactttatttttttatacctacatagcacatgactggggggataaagcatgtataagttgggagagggtaaagaatgtgtgactatgtatacagaaaatagactaaaatgtgcagcaaaatgatatatactgtaatctggtttttgaagtatctactattctggaatattgttaaacaactttttgcttttgaaaaaaaaaggtgccttgattcagttgcgtgacttagaacattcatcctattttattgtgatttttaatgtcttctgaccccaaactgtgtttttggttgcagtctggcggctgcaggcatagcgtcggttttgttccaataacagagaccaaagagttaatcagatatggttcagctgctacaattgtatgattcaaaggcaatttaatcaccccaaatttccatggcccccacagtcaagacctgccattcgttttctcttgcaggttggagtaaatttgcactttgaatcatgtgggtcatttggggaccttgttcttttctattttgctttattaataaaggaacttgtagaaacctc

SEQ ID NO: 4987 - protein, 56 aa, Homo sapien
MIQRQFNHPKFPWPPQSRPAIRFLLQVGVNLHFESCGSFGDLVLFYFALLIKELVE

SEQ ID NO: 4988 - DNA, 1276 bp, Homo sapien
tcgacccacgcgtccgcccacgcgtccgcttaatatctgtattcccagttgcctacgggataaaagcccaaactccttagcagagaatataaggccctagctcccacattatttcagcagtcatcacccactatgttcctcaagactgcagccattaactttttagagttccctaaacatgctgtttactttcatgcctctatcccgttgtctgtggaatgacttccctccttgcccttttcagtgctacaaacccctattctttaagacatagtacaaatggcatctcctggttggcatctttcctgcaggcctacaggcctagtaagtatcttcctcctctgtgctcctgcatacctccattcctttgttatgacatctataactttaataagtactaaaatctgtagtcctacaaaactcaggcatagaactcatttcctttatggytctataatggaactttacccaactctcacgttccccatgaccacagatgtggaaaatttgaatcttgacagttcaaggtgaactcagtcattttcagagttttcatagtcccttcaagattgaaactcagttcctgcaatgtttgccccttttctcctcttttgtctatgctgggagaggcattgtggggagggttgtctggcttatggctcccattgtcctctgcttgataaaccacctgagctttggtcattagcagtctcctgtgcctttcacactcaggtagtgtctgcacaggccactctatgtcttttccatgctgaagaaattcctttccaggccatgtctgtgttcctcctgccacacaggaaatttttgagcatgttcatcctccaagctgaatgcagggtcttgggtagtggtcctcacctgctccagagacttctccagccattgccactctccactcaggtgatgaagctggatgagggactgcacccaccagagtcaggccagggtcctgtctgctctgtgagtccctccaattgttcttattccgagatttccattgttctgccccctcttgactcccagggctctcaagggagtgggggtagtgaagggagccctttcccaagctcccccaagagctctagtcacatcacttctgatacttcttttcccaccagctggaagaaagaactttcatttgtcttgaaatgagaaaaatgttcttagaatattttgtattactctctgctctgtcatttatggtaaacaaaataaaataataaaaaaaaaaaaaaaaaaaaaaaaaagggcggcc

SEQ ID NO: 4989 - protein, 83 aa, Homo sapien
MASPGWHLSCRPTGLVSIFLLCAPAYLHSFVMTSITLISTKICSPTKLRHRTHFLYGSIMELYPTLTFPMTTDVENLNLDSSR

SEQ ID NO: 4990 - DNA, 4670 bp, Homo sapien
ggctctactttgaacctgctgggcaaggaagagattttcaaggaaaccatctaccgtgtgcaagctcctgccggccaaccccagaccccagcacggagccaggcgcctgtgcccgccgaccctcagcatcctcctcagaaaggctggtggcatcaggaagcccctggccagcctccacctgagcccagtgagctcagctttaaggatggagtcaggcagggggtcctcaacccctccaggacccattgctgccctagggatgccagacactgggcctggcagttcctccctagggaagcttcaggcgctccctgttgggcccagagcccactgtggggaccctgtcagcctggctgcagcaggggacggctctccagacataggccccacgggagagctgagtggtagcttaaagatccccaaccgggacagcgggatcgacagtccctcctccagtgtggctggagagaactttccctgcgaggagggcttggaggctggcccaagccccactgtactgggggcgcacgcagagatggccctggacagccaggtcccgaaggtcaccccccaggaggaggcggacagcgacgtgggtgaggaacctgactctgagaacaccccccagaaggctgacaaggatgccggcctggcccagcactctggcccccagaagcttctccacattgcccaggagctcctgcacaccgaggagacctatgtgaagcggctgcacctgctggaccaggttttctgcaccaggctgacggatgcggggatccctccagaagtcatcatgggcatattctctaacatctcctccatccaccgcttccacgggcagttcctgctgccggagctgaagacgcggatcacggaggagtgggacacaaacccacggctcggggacatcctgcagaagctggccccattcctgaagatgtacggcgagtatgtcaagaactttgaccgagccgtagggctggtgagcacgtggacccagcgctccccactgtttaaagacgtcatccacagcatccagaagcaggaggtatgcgggaacctgacgctgcagcaccacatgctggagcccgtgcagagggtcccccggtacgagctgctgctcaaggactatctgaagaggctcccgcaggacgccccagaccggaaggatgcggagaggtccttggagctcatctccacagccgccaaccactccaatgctgccattcggaaagtggagaaaatgcacaagctcttggaggtgtacgagcagctgggtggggaagaagacattgtcaacccggccaatgaactgatcaaggagggccaaatccagaaactgtcagccaagaacggcaccccccaggaccgccacctcttcctgttcaacagcatgatcctttactgtgtgcccaagctgcggctcatgggccagaagttcagcgtccgggagaagatggacatctcaggcctccaggtgcaggatatcgtcaagccaaacacagcacatacattcatcataacgggaagaaaaaggtccctggagctgcagacgcggacagaggaagagaagaaagaatggattcagatcatccaggccaccatcgagaagcacaaacagaacagcgaaaccttcaaggcttttggtggcgcctttagccaggatgaggaccccagcctctctccagacatgcctatcacgagcaccagccctgtggagcctgtggtgaccaccgaaggcagttcgggtgcagcagggctcgagcccagaaaactatcctctaagaccagacgtgacaaggagaagcagagctgtaagagctgtggtgagaccttcaactccatcaccaagaggaggcatcactgcaagctgtgtggggcggtcatctgtgggaagtgctccgagttcaaggccgagaacagccggcagagccgtgtctgcagagattgtttcctgacacagccagtggcccctgagagcacagaggtgggtgctcccagctcctgctcccctcctggtggcgcggcagagcctccagacacctgctcctgtgccccagcagctctagctgcctctgctttcggagtgtccctgggaccaggatagatgtgggtgtgtctcagtggggcccccaggctgggaacacactcggaagatcccgtgtgtgcacgctggcttctcgggaccagccagggccaaggcttgggaaccatttgcatccaggagttagatgggaacaagtgtcactcctggtcacctggttggagggcatggattgaagctgccctcaagtccaggccttgaggcccacctgaggggagatactgcccttctctctgcctgcctcacctccagctgtcagagggtgagcagggccctggaggcaggcaccccctcctcctcctccccgtccccttctcctcctcctccccgtccccttctcctcttcctctccctccttcctctccctccgcctcgctgtctttctccttctcctctccctcctcctcctgctccttctcctccccgtaccctttttctactcttccctctccttctcctcctcctttctctccctcctcctccccctccccttctcctcctctctttctcttcctcttttcctcctccactcctctttctgagagtagctgctgctttccctgccttccttcctcaagaatacagtctattctggggggttgcaggacagctgaaaaagaaaacgtgagtttccagaaaagcacatcgccctttctctccactcgacacagcctgcggtttgcagtgccagctgcacgttggagtctcctgggaagcttctagtgttgatctccctcctagaggctcagtgaggtgatcggggggtcagtgtgttttcagagtcccagctgctctgacttacagctgtggttggagccctgacctaggtccttggtctaagaagtcaaggatgtaagtctattaggactgagtgttgaatggtcttgatggtgaagaaggaccttgcactgcctaccgagctccctcatgcctgcaatttaaataccgaggtgtgttctgagagccccaggtccttggggcacgggcctccagggccctgtaaggtggactctggcctcgaaggggggcccaggtctgaggggtccagctctggcagggggtgtctaagccacgtccaaatggtggacagtagctccaacagtgacatgacagagggagggcctgtgtgtgtggtgtgtgtgtgtgtgctgtgtgtgcacgcacgtgcatgtatatggtgtgtgtagaactgacacgcttgaagtccctgtcccgtgacccaccctcaggtacttgctgttgggttttcctatgattttgatgtgtcctgacccagcatatggatgccctccccttggagggcccagcctgcaaaccccatctgataccacacatgcctatgtcctgcaggcttctagtgacccttgcaagccgggtgaggctggtcccagtctctgtgcagatcttggccatgtctccacagccagctccccccaagcagtggccctggccctaccccagcctcctcagaacaggggtgaccactgcaggggagactgcccctaacctgtgtctttgtgtccccagaagacacccactgcagacccccagcccagcctgctctgcggccccctgcggctgtcagagagcggtgagacctggagcgaggtgtgggccgccatccccatgtcagatccccaggtgctgcacctgcagggaggcagccaggacggccggctgccccgcaccatccctctccccagctgcaaactgagtgtgccggaccctgaggagaggctggactcggggcatgtgtggaagctgcagtgggccaagcagtcctggtacctgagcgcctcctccgcagagctgcagcagcagtggctggaaaccctaagcactgctgcccatggggacacggcccaggacagcccgggggccctgcagcttcaggtccctatgggcgcagctgctccgtgagctgagtctcccactgccctgcacaccaccacattggacctgtgctgtcctgggaggtggtgttggaggccccatgaagagcgccctggactgctgagggtgggccaacagcccagagctcaggacatttggctttggggggaaggaaactgaggcccagagaggggcaaccactggccaagggtcacccagcaagttttggctaagagcctggcctccagccccagcagtgtggcccagagcaggggccgactgccaaagtaaccatcatccatatgggccgtgtggtgatgctggcccggaaggcagaaagaggcagcatgggcactgccagggacagccacatcctgctggtctgcagcgtggtccaccccgcctctgcccagcctgtctacaccgtgtgagctgaatcgtgacttgcttcccacctcctttctctgtcctctcctgaggttctgcctgcagcccccaggaggtgggcctgccccatcctagctggactcatggttcctaaataaccacgctcagaagctctgctaggacttaccccagccactgagtggcaggcgcatgagatttgtggctgttcctgatgctagtggcacacagtgcttatctgcataaataaacactggccaccagc

SEQ ID NO: 4991 - DNA, 2565 bp, Homo sapien
gagctagtgacaggaggggccgggctggtacttcaggcgcccaggccggcggggcgcgctccggcggctcctgtcagcggcgggtgcggcggatcccagggcagccttcgggcggcggcgctgcctggtgcgtcgcggcgtggtcctccggcggctgtccggggcggtaggagttggctgcgggatgtgctcagccggggagctgctgcggggcggcgacggcggggaacgcgacgaggacggggacgcgctggcggagcgggaggcggcagggaccgagtgggatcccggggcgagccagcggcggcgcggacagcggcagaaggagagcgagcaggatgttgaagactcacagaaccacactggtgagccggttggagatgactacaagaaaatgggaacactttttggtgaactgaacaaaaaccttatcaacatgggcttcacaaggatgtattttggagaacgaatagtggaaccagtaatagtcattttcttttgggttatgctgtggttccttggcctgcaagcccttggactagttgctgttctttgccttgttattatttatgtgcaacagtaaaacatggccgaattgaattgtttgacatttggtagccatatatgtaattgaagaagttatatatttcactttttgacaaccgaaaaagtttgccttgtttcaaatcatgtgctggctgttttgtaagtaaatttatacatggatgtcacttaaaactaaactcttgatcataacagggttgaatatatattttgaatatacattagcttattcaaaactcttgtttcactactgtgatctctgtctcctttatacacctctatccccatgccaaatcttaagtaacaccaccagaaagtgaacagggaaaataacaggacatggaattcaaatcaagcaatatagttcttataaagagttccaataaaacatttcagaagaaaaagtatgaaacaagctaaaagtaagtttcacttagaaaacttctccccactcacactccccaccaaataatctcatattatttgggaaatatttggatttcaattgtccctacccagcctaaactaaggtaaatgataattagcatacactaccttaatattgtgatgaaaatcagtaaagatagaacgttttctaaaggtcaaaaataatatatttattattactggggaaagctcccaggttaaatataacttttttaaaatgtaacatttggacctagacctactttaatatatcatttgaagtttcagacaattttggtgctaattactttttgtgagtttttaaagtctcatagcctagttgactgcaccctatggtaatgccatattttcttgtatctaacaagttgcatattttttcctagagagacattttcagtgtatttttttttagaaatttataattttatagttctttcataacacttattctgagttttgaaacaatgtatttcctatcttgacatggattttttcacaaaaaatttgtattttactgttgttttcaggaaaaaaatcagatcatttttctttgatatctatatcagaaaggtacaatattaacagtataaaaccaaatgcttaaatttggaacttagccaattttgataatctttttctaaggctaaagtcacatcagtaattggctagccatgttattaaggtgtcttaattcagcattttcaggttttatattgaaatacgcatttctttaaatattctttgaaaatggagaatggctttagtgatattttgggttttgttagagaacctaaaatctttacactttcatctcaaagattataaaggaaaggggggtagttaagatttagaattcaagttaaatttcagaaattggggcagtcaggcatttgtatctttggtagggcaacaagtaaaacatgtagagtgcttgctatcccacttcataaagcttttacccaatcttatttctaaacctctgtgcattcttagtgtcttctcattctgaaacagaaaataaggaaaaacatttaacttagttttctaaaatcagataatcctaaacaaaaatgttagtcagggtcactaaaaagtattgcacatttatataaatacagtccttttaaaatttgacttttaaaaaacaaaagactttgtacgatattgtgtttttattgcttttgcaatatttttatagtagcctttatgaactcagtataagtgcaagttgtttgaaaaggtgtttttattagtgcacaatagaattgtgaggttttcaatagatgtcatgagattttgtatatctacataaaatatcagtacatttttttctaatgctactggaaattttacttttcctttgcaacacataaatgatatgatgtacaaaataacagctctggttccaccagtacctaatgttgaaaacatttttaaagtaatttttaatactaactatttagtatactgtcagtactgtacatctgcacactggtgttaatagggtatatattaaattatataaagaaataaaaaaaagaaaaaaaaaaaaaa

SEQ ID NO: 4992 - protein, 132 aa, Homo sapien
MCSAGELLRGGDGGERDEDGDALAEREAAGTEWDPGASQRRRGQRQKESEQDVEDSQNHTGEPVGDDYKKMGTLFGELNKNLINMGFTRMYFGERIVEPVIVIFFWVMLWFLGLQALGLVAVLCLVIIYVQQ

SEQ ID NO: 4993 - DNA, 1119 bp, Homo sapien
acctttcaggatcctgctcacatatcacctcttctgggaggtcttaccaggttgcagtttgatgtccaggctatccccttagctttgtgacttcaggtaacttgctgcattgttctgatcttcagtgtcattgtctctgaaatgctactgatgctgccctgcctgccttgcaggactgttggcaggcctgattccagaagctctctagaactgtactgtgctggacagataggcagggggcttggcagggtaatttcttggttctagggtgtgtgtttggggagtatgtttggtggtcctgagagctgcagcatttcaggttgtttttctcactgcaggtcatttcatgggcaacaacacagtgctggatgttttgcggcgtgaaggctatgaggtagaacacgcccctgctggacgacccatccacaaagggaagagtaaaaagacctccacacggcccactctgtccaccatctttgctccaaaagtccctaccctggaagtaccggcaccagaagccgtatcctcagggcactcaacgctgcctccccttgtgtcccggcctggaagtgccgacacgcccagtgaggccgaacagaggttccggaagaagcggaggcggtcacagcggaggccgcgactccggcaattcagcgatctgtgggtccgcctggaggagagtgacatagtcccgcaactccaggtccctgtcctggacaggcacatctccactgaactgcggctccctcgccgtgggcattcccaccacagccagatggtggccagcagtgcctgcctgtctctctggactcctgtgttctgggtgctggtgctggctttccaaacagagacacccctcctgtaacgactggaagcaccaggctaagaacctgacccctcggacttgaagaatggccattcctgtactccacattctggtctagccttgttgggcccaatccagaagagactgctcttgaaaaagcggcccagtgttgattcttctctttccaaggaatgtgactttgggttatccaactttgggggcaggtgtacagttttgtaacatagtgagttgtgtgaaaataaattataaatgagttgtatgaaaataaatac

SEQ ID NO: 4994 - protein, 172 aa, Homo sapien
MGNNTVLDVLRREGYEVEHAPAGRPIHKGKSKKTSTRPTLSTIFAPKVPTLEVPAPEAVSSGHSTLPPLVSRPGSADTPSEAEQRFRKKRRRSQRRPRLRQFSDLWVRLEESDIVPQLQVPVLDRHISTELRLPRRGHSHHSQMVASSACLSLWTPVFWVLVLAFQTETPLL

SEQ ID NO: 4995 - DNA, 2747 bp, Homo sapien; identical to SEQ ID NO: 3817

SEQ ID NO: 4996 - protein, 360 aa, Homo sapien; identical to SEQ ID NO: 3818

SEQ ID NO: 4997 - DNA, 1020 bp, Homo sapien
  Unsure 248: Unknown base
  Unsure 1004: Unknown base
  Unsure 1014: Unknown base
ttcggcagagcccttgcgcgctcttgaatacctgckttctgtagcgctagttctcttcaagatttgcttagtgtcatttcatttcggtttcttttctcgccatgtttttctgtcggaattacggttcgttttggttctatgtactctctaaaatgttatcgtttttcatttgtctactaattttcgtgcatttgttactactgagtttcttaatatctgactggcctccgcccacgggctctgcagancataaaatactcaggctgatggtagtgcagagactctccctccttgatcagcgcaaacgttggtctgaggcttgagggatggagcaacattttcttggctgtgtgaagcgggcttgggattccgcagaggtggcgccagagccccagcctccacctattgtgagttcagaagatcgtgggccgtggcctcttcctttgtatccagtactaggagagtactcactggacagctgtgatttgggactgctttccagcccttgctggcggctgcccggagtctactggcaaaacggactctctcctggagtccagagcaccttggaaccaagtacagcgaagcccactgagttcagttggccggggacacagaagcagcaagargcacccgtagaakargtggggcaggcagargaacccgacagactcaggctccrgcagcttccctggagcagtcctctccatccytgggacagacagcaggacaccgaggtctgtgacagcgggtgccttttggaacgccgccatcctcctgccctccagccgtggcgccacctcccgggtttctcagactgcctggagtggattcttcgcgttggttttgccgcgttctctgtactctgggcgtgctgttcacggatctgtggagctaagcagccttagatagcagcagaaggctttttggattctcctccttgaaaagattctcagttaccaaacgtctccacctagaaaataaaaatacattaagatgttganaaaaaaaaanaaaaaa

SEQ ID NO: 4998 - protein, 56 aa, Homo sapien
  unsure 32: unknown amino acid
MLSFFICLLIFVHLLLLSFLISDWPPPTGSAXHKILRLMVVQRLSLLDQRKRWSEA

SEQ ID NO: 4999 - DNA, 2742 bp, Homo sapien
aggttactatagtgtctgctcctacccctgggacaagatcccctaatgagctggcaggtgggcgtggggggcacaggtacagcttggcttctcagctttgctcccctatcctctgctttgccatgaatctctcatccagccccgcagggatctgcctggccagcagtgagcctgagcccctttcatcctgggacctgccgaccacggctcacatcctcctgggtgaagaatgtcaccttgcttcctatctgcctctttcgtggttggctggggagggggaccggggggtggggtgaggttaacctcattgttgtcttatatggtcatttaaatctcccagggcttcctccaagggccaaaaataatccggagacacagcagctgtgtccagcacacagaggacccggccatctgctttggttcagagccctgtgtctgtcagtcagtctctccctggctctccctccatcctcattcctgcctgaagccatgacccgcttctcctatgcagagtacttttccctctttcactcctgctctgcaccctccaggtccactgcacctcctgagagttcgccggcccgggccccaatgggcttgttccaaggggtcatgcagaaatacagcagcagcttgttcaagacctcccagctggcgcctgcggaccccttgataaaggccatcaaggatggcgatgaagaggccttgaagaccatgatcaaggaagggaagaatctcgcagagcccaacaaggagggctggctgccgctgcacgaggccgcatactatggccaggtgggctgcctgaaagtcctgcagcgagcgtacccagggaccatcgaccagcgcaccctgcaggaggaaacagccgtttacttggcaacgtgcaggggccacctggactgtctcctgtcactgctccaagcaggggcagagccggacatctccaacaaatcccgagagacaccgctctacaaagcctgcgagcgcaagaacgcggaggccgtgaagattctggtgcagcacaacgcagacaccaaccaccgctgcaaccgcggctggaccgctctgcacgagtctgtgtctcgcaatgacctggaggtcatgcagatcctggtgagcggaggagccaaggtggaatccaagaacgcctacggcatcacccccttgttcgtggccgcccagagtggacagttggaggccttgaggttcttagccaagtacggtgctgacatcaacacgcaggccagcgacaacgcgtctgccctctacgaggcctgcaagaatgagcatgaggaggtggtggagtttctgctgtcacagggtgccgacgccaacaagaccaacaaggacggcttgctcccgctgcacatcgcctccaagaagggcaactacaggatcgtgcagatgctgctgccggtgaccagccgcacgcgcatacgccgtagcggcgtcagtccgctgcacctggcggccgagcgcaaccacgacgaggtgctggaggcgctgctgagcgcgcgcttcgacgtgaacacgccgctggcgcccgagcgcgcgcgcctctacgaagaccggcgcagctccgcgctgtacttcgcggtggtcaacaacaacgtgtacgccaccgagctgctgctgcaacacggcgccgaccccaaccgcgacgtcatcagccccttgctcgtggccatccgccacggctgcctgcgcacaatgcagctgctgctggaccacggcgcgaacatcgacgcctatatcgccacgcaccccaccgccttccccgccaccatcatgttcgccatgaagtgcctgtcgctgctcaagttcctcatggacctgggctgcgacggcgagccctgcttctcatgcctctacggcaacggcccgcacccgccggccccgcagccctccagcaggttcaacgacgcgcccgcggccgacaaggagcccagcgtggtgcagttctgtgagttcgtatctgccccagaggtgagccgctgggcggggcccatcatcgatgtcctcctggactacgtgggcaacgtgcagctctgctcgcggctgaaggaacacatcgacagctttgaggactgggccgtcatcaaggagaaggcagaacctccaagacctctggctcacctttgccgactgcgggttcgaaaggccattgggaaataccgtataaaactcctagacaccttgccgctcccaggcaggctgattagatacctgaaatacgagaacacccagtaactggggccacggggagagaggagtagcccctcagactcttcttactaagtctcaggacgtcggtgttcccaactccaaggggacctggtgacagacgaggctgcaggctgcctccctctcagcctggacagctaccaggatctcactgggtctcagggcccagagctttggccagagcagagaacagaatgtgtcaaggagaagaatcatttgtttacaaactgatgagcagatcccagaccttctctaccttcaggaatggcagaaacctctattcctggggccagggcagagcttgaggtgttctggggaaggtggtgctcagagccttccctgtgcccctccacttgttctggaaaactcaccacttgacttcagagctttctctccaaagactaagatgaagacgtggcccaaggtagggggtagggggagcctgggtcttggagggctttgttaagtattaatataataaatgttacacatgtg

SEQ ID NO: 5000 - protein, 587 aa, Homo sapien
MTRFSYAEYFSLFHSCSAPSRSTAPPESSPARAPMGLFQGVMQKYSSSLFKTSQLAPADPLIKAIKDGDEEALKTMIKEGKNLAEPNKEGWLPLHEAAYYGQVGCLKVLQRAYPGTIDQRTLQEETAVYLATCRGHLDCLLSLLQAGAEPDISNKSRETPLYKACERKNAEAVKILVQHNADTNHRCNRGWTALHESVSRNDLEVMQILVSGGAKVESKNAYGITPLFVAAQSGQLEALRFLAKYGADINTQASDNASALYEACKNEHEEVVEFLLSQGADANKTNKDGLLPLHIASKKGNYRIVQMLLPVTSRTRIRRSGVSPLHLAAERNHDEVLEALLSARFDVNTPLAPERARLYEDRRSSALYFAVVNNNVYATELLLQHGADPNRDVISPLLVAIRHGCLRTMQLLLDHGANIDAYIATHPTAFPATIMFAMKCLSLLKFLMDLGCDGEPCFSCLYGNGPHPPAPQPSSRFNDAPAADKEPSVVQFCEFVSAPEVSRWAGPIIDVLLDYVGNVQLCSRLKEHIDSFEDWAVIKEKAEPPRPLAHLCRLRVRKAIGKYRIKLLDTLPLPGRLIRYLKYENTQ

SEQ ID NO: 5001 - DNA, 1027 bp, Homo sapien; identical to SEQ ID NO: 4293

SEQ ID NO: 5002 - protein, 220 aa, Homo sapien; identical to SEQ ID NO: 4294

SEQ ID NO: 5003 - DNA, 6306 bp, Homo sapien
  Unsure 40: Unknown base
  Unsure 85: Unknown base
  Unsure 112: Unknown base
  Unsure 163: Unknown base
  Unsure 188: Unknown base
  Unsure 193: Unknown base
  Unsure 209: Unknown base
  Unsure 284: Unknown base
  Unsure 287: Unknown base
  Unsure 379: Unknown base
  Unsure 384: Unknown base
  Unsure 386-387: Unknown base
  Unsure 448: Unknown base
  Unsure 6015: Unknown base
  Unsure 6039: Unknown base
  Unsure 6112: Unknown base
  Unsure 6125: Unknown base
  Unsure 6180: Unknown base
  Unsure 6205: Unknown base
  Unsure 6222: Unknown base
  Unsure 6225: Unknown base
  Unsure 6250: Unknown base
  Unsure 6291: Unknown base
  Unsure 6301-6302: Unknown base
gaatgatctaatctccaccctcctttgtcttcaagtcagnaataagtaatcagaacaactttgcactcatgtttaaaatatttcnctcgccttggcctcccaaagtgtttgnattacaggcgtgagccgccacgtccgggtggatcccaaggtcaggagttcnagaccagcctggccgagatggtgtnccccngtctccgctaagaatncaagaattagccaggcatggtggcaggtgcctgtaatcccagattctcggcaggctgaggcagaaaattacttgnacntgaaaggcacaggttgcaatgagccaagatcatatgactgcactccagcctgggtgacagagcaaggtttccaaaaaatttaataattaatnattgnanntagaattttttccactcataaaattaattgattcaataaatgtttcattcaagtacgtacncattagtacatggtttcaatgatccttgatttaaacaccttgaaatagctttaattctatattgcatttacatcgacatccactcaggtatgaatattctgtagaaaagttttggtttttccctttccattcttttgtgaaaatgtttgtcttccttgtctgctaacactttttaatatgacaattatcattaattattcacaaagtagagttaatatttgctacatatttaatgtctaatttgtttcactattttaaacgtactgtacctggcttctgaaaagaatgcaaagccctcagaatcaagtgcataatataatatccttatggttttgcagcctactattcgttcggtactcaataactagcaatgaacagcaaatgtaattatatatatgtatatatatagagagaacatttatgtatatatagaacatatatatgtatatatatagaacacacacacacacacatatatatatatatatatgaaacataagaatttatgtatagctaagctgaacatttggctatcagataaaactgtagctttacaaatacttaagaacagaaaaactgagattgctcctagatctggggtggccaaaagaaatggaatcagatgtttttgttaataggtaatgccccaaatcttatcagtcataagcactgggccagacagacctgtgcttagatattctaatatggtatacctttactagtaccttggttagaaaaaaagatatcccctctaggtggacaaatcagaaaaacagaccagctgttaacaggtcaagcttaagagcacatggcttggtgatggtggcagagaaggaattttagactctccggctccctccacaaggcactattgtgcagcacacacattgcacaacctcacggagtagtcttggccttagctgaggggatgaaaagaactgtttagttaagaagtgagatttagcagcttacataaatccttaaggtgttttacgcactttttgtacatcagtgccttacattaattaatccatttaattctacctgccatgagtctaccacacccattttactcatgtggaaaccaaggcacagggaggttaaatggcttgtccaaggtcacacagcctttgagtggtagattccggattcaaatacatgcagcctgatactgaaactttgttcgtgaacactttactgcctttaaactgatgaaattagaataaatggaaattcctgggactaactattaaaaaagtgtaataagctgtaagaaggaggcattattaagtaaaggaactcactttgggaaataccagcttagaacttaataggcttatgatagtatttataaacaatcaaaggatcaagttgataagccattctgtgacttgttgataaatatcttatcagtttttgtacccggctgaaatccttcctcaagagattaaatcaccaaaggggttaactctttgttttgtgtgcaatttttccactgccaataattttgttctctgagcagtgaaacaagtaattcccaaattaagagcatgttaggactataggtcctcattttcctaactgcaaagaaaattattttaaaagtaattttcccctcagaagcaattccaagactgaagattaaatatacagagaagcaatgattcaggcttttaaaaaaatcgctttttaaaggagtataagtgaaaacagttaagtaaatatatttaattaccaagattttattggatcttttactcacataaaaagactaaaataaaacgtttctggttttcacagtaactgatctgataatgtcaacttttgaaaacagatagttatgactcaaggctttgagaatgtaaagagacgcccttcacatgttgagaaatggtacgatttcacgttatcagtgcagttcggttctcagggggaaaggtaagcccatagctaactccagctccaagctgctatttcatgataacagctcacggagctgtgggcctgctaagcctttcccacctcgttctggaattcctctatagcccatccgtactaccaggagactggatccgcaaagtagacacttggtctcatgaagccactgctgggctccagagagaaggaaaaactaagcggttttaaaacccccaccctccttggtttacctccatcattaaaaaacaacaatgacaacgacaacaaaaaacaaaactaaaacgacttattgtttattaattatgttgtggcagacaatatgctgaacattaggcataattaaattctttttaaaaattgataatttatctctgttttatagaagtgtgaaactgtcaggaagacagatgaaatgatttgcctgaggccgtatcatcaaacaagaaattcatattcacctttctggaattcttaggataatgattacatgtgttcaattgttaaaaattggcagataaaattttatgtatttaccacgtacaacatgaaattttgaaacatgtatacattctggaatgactaaatccagctaattaacataggtattgtctcacatatttacttttgtggtgagaacagttaatatccactctcaacattttccaagaatacaatatattactaactatagtcaccatgttgtaaaacggatctcttcaagtattcctcctatataattgaaattttgtatccttggaccaacgtctcctcaccctactcactcctcaaatatccctacccttggaaaccactgttctcctctctctacttctaggatatcagctttcaagagtgagatcttgtggcatttgtctctctgttcctagcttatttcacttaacataacgtcctctaggttcatccatgtgcaaccccctaggttcatgtccttttttaaggtttaatagttttctgttgtgtacatatgccacaatttatttacccatccacttcttgatggatgcttcaattgtttctgtacttgagctattgaggacgatgctccagtgaacattggagcaccgatatttttacagggtggtgatttatttttctctggatatatatacccagaagagaaagtgctgggtcatacgatagttcttttcttttcgattttttcctttcttttctttttttttttttcagaaacctccatactgttttccgcagtggctgcaccaatctatattcccaaattaaacttcaatgtgcagatgaattacctaaaattctttataaattgcaaatgctggtttagaaggtgtgctgattttgatgcatttttaagacccccctcccatcccgtgtgatgttcctactccactcactgatttcccatgtattatctagggtcttaaccacattgcttgtttttctattagagtttggaactgggtcacccatgctctgaggctctatgaaaccctgaagggagaggtaaacatataagctctgcaatccaactgcttggttttgtattttggatttgaaacttagtagccattttcacccagaggaaattccttaagctctgtaagcctcagtttctttatctgtaaagtgggagttacagtagtattatctctcactgtatttttaaagaccaaatgagaaacttgatgtaaataggaacctaatgcctggtacatagtgaaagttcaatatatacattcatgagtatttttaagtaaaacatgttcattggaacattattcacaggggccaagatatgaaatcaacctaaatgtctgccaacagatgactggataaagaaaagattatatatatacatatatatgtgtgtgtatatatatatatatatatacacacacacacacccacacacaaacatatatatgtatatatctgtgtatatgtgtatatatacacacatacatgcacagatatatatgtatatatgtatatatgtatgacaggcgtgagccatctcgtctggccaattatcattattattttagaaatttatcagtgatgcttttctgcccagctttaatgaggtgtaatgacaaaaaaattgaatatatttatgtatgctgtacactgtgatgttttgatatatgtatatattatgaaatgattaccacaatcaagctagttaacatatacatcacctctcgtaattatctctttgtgtagtgagaacatttaagaccccctctctaagctgatttcaattatacaatatagtattactaactatagtcaccatgctctacgttaggtccccagaaattactttttctgcataattgaaaatttctatcccttgaccaacatctctccatttccccaaccccagtttacacacacacacacacatacatatacatatatagtgtatatatacacatatacatatatacatatgtgtatatatatatgtgtacatatatatgtgtatatatacactatatatgtatatgtgtaaaattagatgggtgtggtggtgcctgcctgcaatcccagctactcaggaggctgaggcaggagaatcacttgaacccgggaggcagaggttgcagtgtgccgagatcatgccactgcgctccagcctgggcgacagagcaagactccatctcaaaaataataataataatatcaaaaataaaataaaaattgcttagaaatttcaaaatacaataccttccactgaacttccttaatccacatagcactgtatttttctgtctattgcattgccacaaatttagccacttaacacagatttattattgcacaatttctgttggtcgggagcctgccacattttggccaagtcctcttctcagggtctcataaggctgtcagggtgctggccaactgcatcgtcatctggaggcctgactacaaaaagatcggctcaaaggcccctcagagtgttggcagcatttgtttccttgtggttgtaagattgaggtccctcttgcctcactatctgtcagctgggagtgacctcacctcctccaggctgctatcaggttatgccacaggccccttccgtttctgtaataaagaactgccctcatattgaatccatatcacacctcagatttatctgatttcccttctgctttcaactagacaaactctctgcttatagaaaggctcatgtgattaaattgtgctctattttaaggtcaagtgtgctatgtaacatgaccaaataatgagagtaaaatctattatagtgacatgccctggaattatgtagaagcgaaactattgctggaggggtaatctttggggccaacttagactattgattattccatgttcaaggagagctggcatataattggagagctaagaaccgtcaatatctcaacatctaaaaaaataaaaattgtaattgtatttaaaatgttaggaaacatagttagaaatttagggttttaagcagatataaagatcttttaatcatgctaccacctaattacaatattagataaagaagaacaattaagcctagtctatatgttagagaaatatagtaattttttctggaatgatttattatgtgcagactttgggttattggaatagancattgaccatatatgttttaaagnacttaaaaaatattttataaataaaagttatttttattacagaaacagaaaataggttggatattggaatcangaaaaatactgtnttaagcataaaggcattatgttttaaaggaaataatatttcccttaaccaattangggaagaaaaccccagggccaaccncttgattgtaaaaaaangantttaccaggacattgaagctgcatngccccttgggtttatgggactaagaaatttttatgcccttnttaaaaacannaaaa

SEQ ID NO: 5004 - DNA, 1066 bp, Homo sapien
gaattcggcacgagcaaatgttgaaccaattatgttttggtggtggtgttcttagctgttgaatcctgaatggtttataaagtgaactagctggcttaatgcagccagcgttctgggcagcagaacatattcattcttactgtaaattctatttgctgcttccaaaggtgatgattttcaagcagacatgttctatatggtctgtgttttaggatctggtgcccagcctctatcagagcttgcctacctggcaaagctgcctacccttcaagtgggaaaatataatccactgtttaacaaggctcaccctctccaccctgtcctaacgaccttttgtgaatgtgctgtgatattttcttgctcaatagcaaggtggtagctctgctttcattttaagaaagtggaggctgagggcattgtatcaatactgttgcaactccaagaagttttccttgtaaaattaaaggaaagatcttgttattgattaaccattttcttatgccttgctattgacatattcatgctctttctacgtctagtggctgaaaatgtttgcatttgttcatttgactaatggtgtgatttttgkyycwatattattagacctgtaatgttttaaaatgtattttattaaatttggactggatgtatgkcctctagcaatacgaggtactttctaaactattaagggaggggttgtaycctcatgttgagataagatgatggtcgtttaaattttgcaattttttttggcctgcagggatattttgtgtttatgtgtccaaaaaaggaataaattggcattcttgtgccaaaagttgtttttcctgtcaattgtctaataagtatgcagtacactgtaatggcaacatacatggttgctttataaaaacagtttcctcagtatgagaaattttacaaagaacagtggaaaaactttgtgtttttaactcttgggtctccctatttttaaaaattgctatttggtatacaattattatgtgtcaattaaaactaaaataaaacttttaaaaaaraaaaaaaaaaaaaaaaaaaaaaactcgta

SEQ ID NO: 5005 - protein, 63 aa, Homo sapien [sequence omitted]

SEQ ID NO: 5006 - DNA, 1786 bp, Homo sapien
  Unsure 511-664: Unknown base
  Unsure 955-992: Unknown base
  Unsure 1005: Unknown base
acgtcaggattgcgtcttatgttaatgcgaaatatgcatagctgtcatccgaagtataccaccattcccttcagcactctacgtcagaggaggcacgtcaggggagacaaaattcctcttcggacagtccctcaaaagacaggaatgtggacatatattccacatttctctttgtctcctgaggaagaagcatagagttgggagtttctcctggattgcaccatgctgtattgggaggaggtcaggctgcgctgggcatatctaataagctttttcttctcttctacatgtttttggcattgtgctcaactgaagtagtacaaattcttaactatgttcaggaattctcacaaaggcaatgtgatcagcgtggtgttaagttcatatatctatgaagaaacgaggaccagtggtgtttgtttttacgcttttcattttaaatttatattttatttattattttaattttgtgagtacgtagtacctatatgtatctatggattatatcagnnnnnnnnnnnnnnnnnnnnnnnnnnnnnnnnnnnnnnnnnnnnnnnnnnnnnnnnnnnnnnnnnnnnnnnnnnnnnnnnnnnnnnnnnnnnnnnnnnnnnnnnnnnnnnnnnnnnnnnnnnnnnnnnnnnnnnnnnnnnnnnnnnnnnnnnnnccgaccagagaaaaaccctgtagacattagtcactcctcattctgtctcaaaccctctccctgaccctcagccctaggtagcaactacctagtgcgatcaatcccatatgcatagattaccatattgtggacatttcctataagcggaattgcacaataggggagctgttatgactgacataacacgtagcacaatattttcaagatttcgtccacattgtaggcttacccacagggggaaaccattttattgggggcttttagtaacaccggtgttttctccttccttannnnnnnnnnnnnnnnnnnnnnnnnnnnnnnnnnnnnnccttcctgagacnttctttccttccctccttcctcctatttctctcttactccttctgccctctctctttcctatgccttaggtgcatcccacattctgcatttttttggggaaatcctcgacaggtgcaggaaaattgtgttattgtaactatttaccgttatctctctttcacggctctccatcagttgtgaacatctattggtttatcccaagtcactaagcatattttcattaggtaaacctgtttttccttatacagctgtttctggagtatagggtcgcatactcataaacccagtgtaactcagaaacgcatctaatattccagtaaacccatcataacgttgaaaaatcgtaaatcaaaccatcataagtcacggtttgtccgtggatatgggcgtcatcaattccattgtattcagtaatgctgtacaccattaacaatggcagactgattgggagtggatattgatagcattataaaagtcagttattagagggatacttctttaacctgactgaagaactgatctaatggctttagtacagtgcatgattatgtgcgatgttttgagacagagtagtacatttgtgaatgaaattttatggctttttttttcacttagtaggaaccattgtgtgtggaaaagtgagaaaatggctttctgctgtagggtctggcattcattgtagatgtaagctgatttttctgtgagcaaatcttattcaataaaatactactctttatactaaaaaaaatctatgtcggtgcggagaaagaggtaatgaaa

SEQ ID NO: 5007 - protein, 64 aa, Homo sapien
TSGLRLMLMRNMHSCHPKYTTIPFSTLRQRRHVRGDKIPLRTVPQKTGMWTYIPHFSLSPEEEA

SEQ ID NO: 5008 - DNA, 5385 bp, Homo sapien
  Unsure 365-388: Unknown base
  Unsure 2373-2394: Unknown base
  Unsure 5010-5049: Unknown base
atttggtaatgctgcacagaaattttcaattggagattccacagtaagcgttttttttctttgaagatttatgatgcacttattcaatagctgtcagccgttccacccttttgaccgtacacattctattacaatgaattttgcagttttgcacattttttaaatgtcattaactgttagggaattttacttgaatactgaatacatataatgtttatattaaaaaggacatttgtgttaaaaaggaaattagagttgcagtaaactttcaatgctgcacacaaaaaaaagacatttgatttttcagtagaaattgtcctacatgtgctttattgatttgctattgaaagaatagggttttttgnnnnnnnnnnnnnnnnnnnnnnnntaaatgtgcagtgttgaatcatttcttcatagtgctcccccgagttgggactagggcttcaatttcacttcttaaaaaaaatcatcatatatttgatatgcccagactgcatacgattttaagcggagtacaactactattgtaaagctaatgtgaagatattattaaaaaggtttttttttccagaaatttggtgtcttcaaattataccttcaccttgacatttgaatatccagccattttgtttcttaatggtataaaattccattttcaataacttattggtgctgaaattgttcactagctgtggtctgacctagttaatttacaaatacagattgaataggacctactagagcagcatttatagagtttgatggcaaatagattaggcagaacttcatctaaaatattcttagtaaataatgttgacacgttttccataccttgtcagtttcattcaacaatttttaaatttttaacaaagctcttaggatttacacatttatatttaaacattgatatatagagtattgattgattgctcataagttaaattggtaaagttagagacaactattctaacacctcaccattgaaatttatatgccaccttgtctttcataaaagctgaaaattgttacctaaaatgaaaatcaacttcatgttttgaagatagttataaatattgttctttgttacaatttcgggcaccgcatattaaaacgtaactttattgttccaatatgtaacatggagggccaggtcataaataatgacattataatgggcttttgcactgttattatttttcctttggaatgtgaaggtctgaatgagggttttgattttgaatgtttcaatgtttttgagaagccttgcttacattttatggtgtagtcattggaaatggaaaaatggcattatatatattatatatataaatatatattatacatactctccttactttatttcagttaccatccccatagaatttgacaagaattgctatgactgaaaggttttcgagtcctaattaaaactttatttatggcagtattcataattagcctgaaatgcattctgtaggtaatctctgagtttctggaatattttcttagactttttggatgtgcagcagcttacatgtctgaagttacttgaaggcatcacttttaagaaagcttacagttgggccctgtaccatcccaagtcctttgtagctcctcttgaacatgtttgccatacttttaaaagggtagttgaataaatagcatcaccattctttgctgtggcacaggttataaacttaagtggagtttaccggcagcatcaaatgtttcagctttaaaaaataaaagtagggtacaagtttaatgtttagttctagaaattttgtgcaatatgttcataacgatggctgtggttgccacaaagtgcctcgtttacctttaaatactgttaatgtgtcatgcatgcagatggaaggggtggaactgtgcactaaagtgggggctttaactgtagtatttggcagagttgccttctacctgccagttcaaaagttcaacctgttttcatatagaatatatatactaaaaaatttcagtctgttaaacagccttactctgattcagcctcttcagatactcttgtgctgtgcagcagtggctctgtgtgtaaatgctatgcactgaggatacacaaaaataccaatatgatgtgtacaggataatgcctcatcccaatcagatgtccatttgttattgtgtttgttaacaaccctttatctcttagtgttataaactccacttaaaactgattaaagtctcattcttgtcattgtgtgggtgttttattaaatgagagtttataattcaaattgcttaagtccattgaagttttaattaatgggcagccaaatgtgaatacaaagttttcagtttttttttttcctgctgtccttcaaagcctactgtttnnnnnnnnnnnnnnnnnnnnnntggcctgagagtagagtatctgtctactcatgtttaattaaggaaaaacacttatttttagggctttagtcatcacttcataaattgtataagcacattaaatagcgttctagtcctgaaaaagtccaagattcttagaaaattgtgcatatttttattatgacagatgtttgaagataattccccagaatggatttgatactttagatttcaattttgtggcttttgtctattattctgtactctgccatcagcatatggaaagcttcatttactcatcatgacttgtgccatataaaaattgatatttcggaatagtctaaaggactttttgtacttgaatttaatcatgttgtttctaatattcttaaaagcttgaagactaaagcatatcctttcaacaaagcatagtaaggtaataagaaagtgtagtttgtacaagtgttaaaaaaataaagtagacaatgttacagtgggacttattatttcaagtttacattttctccatgtaattttttaaaaagtaaatgaaaaaatgtgcaataatgtaaaatatgaagtgtatgtgtacacacattttatttttcggtatcttgggtatacgtatggttgaaaactatactggagtctaaaagtattctaatttataagaagacattttggtgatgtttgaaaaatagaaatgtgctagttttgtttttatatcatgtcctttgtacgttgtaatatgagctggcttggttcagtaaatgccatcaccatttccattgagaatttaaaactcaccagtgtttaatatgcaggcttccaaaggcttatgaaaaaaatcaagacccttaaatctagttaatttgctgctaacatgaaactctttggttcttttatttttgccagataattagacacacatctaaagcttagtcttaaatggcttaagtgtagctattgattagtgctgttgctagttcagaaagaaatgtttgtgaatggaaacaagaatattcagtccaaactgttgtaaggacagtacctgaaaaccaggaaacaggataatggaaaaagtcttttaaagatgaaatgttggagccaactttcttatagaattaattgtatgtggctatagaaagcctaatgattgttgcttatttttgagagcatattattcttttatgaccataatcttgctgtttttccatcttccaaaagatcttccttctaatatgtatatcagaatgtgggtagccagtcagacaaattcatattggttggtagctttaaaaagtttgtaatgtgaagacaggaaaggacaaaatagtttgctttggtggtagtactctggttgttaagctaggtattttgagactacttccccatcacaacaacaataaaataatcactcataatcctatcacctggagacatagccatcgttaatatgttagtgactatacaatcatgttttcttctgtatatccatgtatattctttaaaaatgaaatttatactgtacctgatctcaaagctttttagcttagtatatctgtcatgaatttgtaggatgttccattgcatcagaaaacggacagtgatttgattactttctaatgccacagatgcagattacatgtagttattgagaatcctttcgaattcagtggcttaatcatgaatgtctaaatattgttgacattaggatgatacatgtaaattaaagttacatttgtttagcatagacaagcttaacattgtagatgtttctcttcaaaaatcatcttaaacatttgcatttggaattgtgttaaatagaatgtgtgaaacactgtattagtaaacttcatcacctttctacttccttatagtttgaacttttcagtttttgtagttcccaaacagttgctcaatttagagcaaattaatttaacacctgccaaaaaaaggctgctgttggcttatcagttgtctttaaattcaaatgctcatgtgacttttatcacatcaaaaaatatttcattaatgattcacctttagctctgaaaattaccgcgtttagtaattatagtgggcttataaaaacatgcaactctttttgatagttatttgagaattttggtgaaaaatatttagctgagggcagtatagaacttataaaccaatatattgatatttttaaaacatttttacatataagtaaactgccatctttgagcataactacatttaaaaataaagctgcatatttttaaatcaagtgtttaacaagaatttatattttttattttttaaaattaaaaataatttatatttcctctgttgcatgaggattctcatctgtgcttataatggttagagattttatttgtgtggaatgaagtgaggcttgtagtcatggttctagtgtttcagtttgccaagtctgtttactgcagtgaaattcatcaaatgtttcagtgtggttttctgtagcctatcatttactggctatttttttatgtacacctttaggattttctgcctactctatccagttgtccaaatgatatcctacattttacaaatgccctttcagtttctattttctttttccattaaattgccctcatgtcctaatgtgcagtnnnnnnnnnnnnnnnnnnnnnnnnnnnnnnnnnnnnnnnnattttcaagagtgctagacttccaatttgagagattaaataatttaattcaggcaaacatttttcattggaatttcacagttcattgtaatgaaaatgttaatcctggatgacctttgacatacagtaatgaatcttggatattaatgaatttgttagtagcatcttgatgtgtgttttaatgagttattttcaaagttgtgcattaaaccaaagttggcatactggaagtgtttatatcaagttccatttggctactgatggacaaaaaatagaaatgccttcctatggagagtatttttcctttaaaaaattaaaaaggttaattattttgact

SEQ ID NO: 5009 - protein, 51 aa, Homo sapien
MSYFQSCALNQSWHTGSVYIKFHLATDGQKIEMPSYGEYFSFKKLKRLIIL

SEQ ID NO: 5010 - DNA, 762 bp, Homo sapien; identical to SEQ ID NO: 4311

SEQ ID NO: 5011 - protein, 126 aa, Homo sapien; identical to SEQ ID NO: 4312

SEQ ID NO: 5012 - DNA, 1014 bp, Homo sapien
agcggaaggggcctttcggaacgatttggaacgaaaggaagtggaagaaacgcggaaccatggccgctgtggttgctgtttgcggtggtctagggaggaagaagttgacacacttggtaacggctgctgtcagccttacacatcccgggactcacacggtgctttggagaagaggttgttcacaacaggtatccagcaatgaggacctgcccatttcaatggaaaatccttataaagaacctcttaagaaatgtatcttgtgtggaaagcatgtagattataagaatgtacagcttttgtcccagtttgtttctccatttactggatgcatttatggaaggcacattacaggtctttgtgggaagaaacagaaagaaatcacaaaagcaattaagagagctcaaataatggggtttatgccagttacatacaaggatcctgcatatctcaaggaccctaaagtttgtaacatcagatatcgggaataaattctatcacgttaccactaataaacttattttacagtaagtggttgtatgatgccaatactgactcaaaccaacctttggatagaaaagtgtttgaggagtgaggtaaagaatgacacttccccttcataccaatgtccattaagcagattgcttatttaaaatgttaacactcatcacattttatctatgttgaataaaagtggttctgtgtgattgtcatttatatctgatccccaaatagctcatacaataatccattcaatagaatggaattaaaactgttcagaatgattttccaactagcaaatataagtatgcctggttaagatatcttccctttgtagaaatgttacattgggatggatagtggtgctgtcacagaaggacaaaatattcctagacgagtctatcctcaaaccagtagtgtcttttacatgaagagatgatttacacctaatagacattgaatatgatagacatacatgtatatatgtatcagttctgagttccactggcctatccc

SEQ ID NO: 5013 - protein, 142 aa, Homo sapien
MAAVVAVCGGLGRKKLTHLVTAAVSLTHPGTHTVLWRRGCSQQVSSNEDLPISMENPYKEPLKKCILCGKHVDYKNVQLLSQFVSPFTGCIYGRHITGLCGKKQKEITKAIKRAQIMGFMPVTYKDPAYLKDPKVCNIRYRE

SEQ ID NO: 5014 - DNA, 3639 bp, Homo sapien
gcggcgctgggtcggtggcggaggctgaggagaaggaggagcgggccgtggaggcttcgccgcctaggtactgctataaccagaatttggtagaaaaaggatttacttgttggggccctcttgataaaaagagatgtggggggattctcgacctgctaacagaactggaccttttcgtgggagccaagaagaaaggtttgctcccgggtggaacagggattatcctcctcctccccttaagagtcatgctcaagagagacactctggcaactttcctggcagagattcacttccctttgatttccaggggcattcggggcctccttttgcaaatgtagaggagcattctttcagctatggagctagagacggaccgcatggtgactatcgaggaggggagggacctggacatgatttcagggggggagatttttcgtcttctgatttccagagcagagattcatcacagttggacttcaggggtagggacatacattctggggattttcgggatagagaaggaccacctatggactataggggtggagatggtacttctatggattatagaggtagggaggcacctcatatgaactacagagacagggatgctcacgctgttgacttcagaggtagggatgctcctccatctgacttcaggggccggggcacttatgatttagattttagaggccgggatggatcccatgcagattttaggggaagggatttatcagatttggattttagggccagagaacagtcccgttctgattttaggaatagagatgtatctgatttggactttagagacaaagacggaacacaagtagactttagaggccgaggttcaggtactactgatctagactttagggacagggatacgccacattcagatttcagaggtagacaccgatctaggactgatcaggattttaggggcagagagatgggatcttgtatggaatttaaagatagggagatgccccctgtggatccaaatattttggattacattcagccctctacacaagatagagaacattctggtatgaatgtgaacaggagagaagaatccacacatgaccatacgatagaaaggcctgcttttggcattcagaagggagaatttgagcattcagaaacaagagaaggagaaacacaaggtgtagcctttgaacatgagtctccagcagactttcagaacagccaaagtccagttcaagaccaagataagtcacagctttctggacgtgaagagcagagttcagatgctggtctgtttaaagaagaaggcggtctggactttcttgggcggcaagacaccgattacagaagcatggagtaccgtgatgtggatcataggctgccaggaagccagatgtttggctatggccagagcaagtcttttccagagggcaaaactgcccgagatgcccaacgggaccttcaggatcaagattataggaccggcccaagtgaggagaaacccagcaggcttattcgattaagtggggtacctgaagatgccacaaaagaagagattcttaatgcttttcggactcctgatggcatgcctgtaaagaacttgcagttgaaggagtataacacaggttacgactatggctatgtctgcgtggagttttcactcttggaagatgccatcggatgcatggaggccaaccagggaactctaatgatccaggacaaagaagttaccctggagtatgtatcaagcctggatttttggtactgcaaacgatgtaaggcaaacattggtgggcaccgatcttcctgttcattctgcaagaacccaagagaagtgacagaggccaagcaagaattaataacctaccctcagcctcagaaaacatccataccagcaccattggaaaaacagcccaaccagcccctaagaccagctgataaggaacctgaacccaggaagagggaagaaggccaagagtcacgcttaggacatcaaaagagagaagcagaaaggtatctgcctccttctcgaagggaagggccaactttccgaagagaccgagagagggagtcatggtctggagagacacgccaggatggagagagcaaaactatcatgctaaagcgtatctatcgttccacaccacctgaggtgatagtggaagtgctggagccctatgtccgccttactactgccaacgtccgtatcatcaagaacagaacaggccctatggggcatacctatggctttattgacctcgactcccatgcggaagctcttcgtgtggtgaagatcttacagaaccttgatccgccatttagcattgatgggaagatggtagctgtaaacctggccactggaaaacgaagaaatgattctggggaccattctgaccacatgcattactatcagggtaaaaaatatttccgagataggaggggaggtggcagaaattcagactggtcttcagatacaaatcgacaaggacaacagtcatcatctgactgctacatatatgattctgctactggctactattatgaccccttggcaggaacttattatgaccccaatacccagcaagaagtctatgtgccccaggatcctggattacctgaggaagaagagatcaaggaaaaaaaacccaccagtcaaggaaagtcaagtagcaagaaggaaatgtctaaaagagatggcaaggagaaaaaagacagaggagtgacgaggtttcaggaaaatgccagtgaagggaaggcccctgcagaagacgtctttaagaagcccctgcctcctactgtgaagaaggaagagagtccccctccacctaaagtggtaaacccactgatcggcctcttgggtgaatatggaggagacagtgactatgaggaggaagaagaggaggaacagacccctcccccacagccccgcacagcacagccccagaagcgagaggagcaaaccaagaaggagaatgaagaagacaaactcactgactggaataaactggcttgtctgctttgcagaaggcagtttcccaataaagaagttctgatcaaacaccagcagctgtcagacctgcacaagcaaaacctggaaatccaccggaagataaaacagtctgagcaggagctagcctatctggaaaggagagaacgagagggaaagtttaaaggaagaggaaatgatcgcagggaaaagctccagtcttttgactctccagaaaggaaacggattaagtactccagggaaactgacagtgatcgtaaacttgttgataaagaagatatcgacactagcagcaaaggaggctgtgtccaacaggctactggctggaggaaagggacaggcctgggatatggccatcctggattggcttcatcagaggaggctgaaggccggatgaggggccccagtgttggagcctcaggaagaaccagcaaaagacagtccaacgagacttatcgagatgctgttcgaagagtcatgtttgctcgatataaagaactcgattaagaaaggagacaagttccatgggatacaacctccctcttgttttgtttgtctctccttttcttttgttactgttcttgctgctagaacttttttaaataaactttttttcaatgtgaaaaaaaaaaaaaaaaaaa

SEQ ID NO: 5015 - protein, 1123 aa, Homo sapien
MWGDSRPANRTGPFRGSQEERFAPGWNRDYPPPPLKSHAQERHSGNFPGRDSLPFDFQGHSGPPFANVEEHSFSYGARDGPHGDYRGGEGPGHDFRGGDFSSSDFQSRDSSQLDFRGRDIHSGDFRDREGPPMDYRGGDGTSMDYRGREAPHMNYRDRDAHAVDFRGRDAPPSDFRGRGTYDLDFRGRDGSHADFRGRDLSDLDFRAREQSRSDFRNRDVSDLDFRDKDGTQVDFRGRGSGTTDLDFRDRDTPHSDFRGRHRSRTDQDFRGREMGSCMEFKDREMPPVDPNILDYIQPSTQDREHSGMNVNRREESTHDHTIERPAFGIQKGEFEHSETREGETQGVAFEHESPADFQNSQSPVQDQDKSQLSGREEQSSDAGLFKEEGGLDFLGRQDTDYRSMEYRDVDHRLPGSQMFGYGQSKSFPEGKTARDAQRDLQDQDYRTGPSEEKPSRLIRLSGVPEDATKEEILNAFRTPDGMPVKNLQLKEYNTGYDYGYVCVEFSLLEDAIGCMEANQGTLMIQDKEVTLEYVSSLDFWYCKRCKANIGGHRSSCSFCKNPREVTEAKQELITYPQPQKTSIPAPLEKQPNQPLRPADKEPEPRKREEGQESRLGHQKREAERYLPPSRREGPTFRRDRERESWSGETRQDGESKTIMLKRIYRSTPPEVIVEVLEPYVRLTTANVRIIKNRTGPMGHTYGFIDLDSHAEALRVVKILQNLDPPFSIDGKMVAVNLATGKRRNDSGDHSDHMHYYQGKKYFRDRRGGGRNSDWSSDTNRQGQQSSSDCYIYDSATGYYYDPLAGTYYDPNTQQEVYVPQDPGLPEEEEIKEKKPTSQGKSSSKKEMSKRDGKEKKDRGVTRFQENASEGKAPAEDVFKKPLPPTVKKEESPPPPKVVNPLIGLLGEYGGDSDYEEEEEEEQTPPPQPRTAQPQKREEQTKKENEEDKLTDWNKLACLLCRRQFPNKEVLIKHQQLSDLHKQNLEIHRKIKQSEQELAYLERREREGKFKGRGNDRREKLQSFDSPERKRIKYSRETDSDRKLVDKEDIDTSSKGGCVQQATGWRKGTGLGYGHPGLASSEEAEGRMRGPSVGASGRTSKRQSNETYRDAVRRVMFARYKELD

SEQ ID NO: 5016 - DNA, 1374 bp, Homo sapien
cggctcgagccgagttccgggcgcgaggcggccaccgtggagagcagagcgcggcggctggaagctgctaagtcagagccgcgatgttccggattgagggcctcgcgccgaagctggacccggaggagatgaaacggaagatgcgcgaggatgtgatctcctccatacggaactttctcatctacgtggccctcctgcgagtcactccatttatcttaaagaaattggacagcatatgaagacaggacatcacatatgaatgcacgatatgaagagcctggttacagtttcgactcctctctgcaagtgaataggcccagaaaggtgtaagagactctttgaatggacataaaattctgcttgttaagaacaagtttggctctggtaactgaccttcaaagctaaaatataaaactatttgggaagtatgaaacgatgtctcgtgatctggtgtacccttatccctgtgacgtttggcctctgacaatactggtataattgtaaataatgtcaaactccgttttctagcaagtattaagggagctgtgtctgaaatggcactgtcttgtcagtcatttctgtttacctttttcttctgcccagagtgtatttgtgaagagtctcttatattatgttttgtggaaatcagcacacaaccacaatgacatttaagcacaggatcattattagtctatgtttttaataaacatatcaattaagatcctgtgcttaaatgtcattgtggttgtgtgctgatttccacaaaacataatataagagactcttcacaaatacactctgggcagaagaaaaaggtaaacagaaatgactgacaagacagtgccatttcagacacagctcccttaatacttgctagaaaacggagtttgacattatttacaattataccagtattgtcagaggccaaacgtcacagggataagggtacaccagatcacgagacatcgtttcatacttcccaaatagttttatattttagctttgaaggtcagttaccagagccaaacttgttcttaacaagcagaattttatgtccattcaaagagtctcttacacctttctgggcctattcacttgcagagaggagtcgaaactgtaaccaggctcttcatatcgtgcattcatatgtgatgtcctgtcttcatatgctgtccaatttctttaagataaatggagtgactcgcaagagggccacgtagatgagaaagttccgtatggaggagatcacatcctcgcgcatcttccgtttcatctcctccgggtccagcttcggcgcgaggccctcaatccggaacatcgcggctctgacttagcagcttccagccgccgcgctctgctctccacggtggccgc

SEQ ID NO: 5017 - protein, 74 aa, Homo sapien
MSCLHMLSNFFKDKWSDSQEGHVDEKVPYGGDHILAHLPFHLLRVQLRREALNPEHRGSDLAASSRRALLSTVA

SEQ ID NO: 5018 - DNA, 1912 bp, Homo sapien
aagatctctctggaccagctcgggtgcagggcctctgcgggagccctcctagacctctgcggcttctcctctaacatggccgactcggaaaaccaggggcctgcggagcctagccaggcggcggcagcggcggaggcagcggcggaggaggtaatggcggaaggcggtgcgcagggtggagactgtgacagcgcggctggtgaccctgacagcgcggctggtcagatggctgaggagccccagacccctgcagagaatgccccaaagccgaaaaatgactttatcgagagcctgcctaattcggtgaaatgccgagtcctggccctcaaaaagctgcagaagcgatgcgataagatagaagccaaatttgataaggaatttcaggctctggaaaaaaagtataatgacatctataagcccctactcgccaagatccaagagctcaccggcgagatggaggggtgtgcatggaccttggagggggaggaggaggaggaagaggagtacgaggatgacgaggaggagggggaagacgaggaggaggaggaggctgcggcagaggctgccgcgggggccaaacatgacgatgcccacgccgagatgcctgatgacgccaagaagtaaggggggcagagatggatgaagagaaagcccacgaagaaaaaagcctggttttgtttttcccagaatatcgatggacttaaaaaggctcaggtttttgaccaaaatacaatgtgaatttattctgacattcctaaaatagattaaattaaagcaattagatcctggccagctcgattcaaatttgactttcattttgaacataataaatatatcaaaaggtgttaaagaaaactgaattaaacccaaaattatgttttcatggtctcttctctgaggattgaggtttacaaagggtgttagcagatgcgaagtaaagaacgtcactttgaaacccattcatcacacagcatacgctacacatggaacacccaagccatgactgaacacgttctcagtgcttaattcttaaatttctttactcatgacatttcgcagtgcagagaaggcagaacccaagaaaaacgtcatctttgagactttgcttttgtaacgcagacatcagctttacacttcacaggagattgatggcattgaggaagattgcaatggagatcatgacactactgttaataaggccaggaaaactgccatttcaagttctgaaaaatgttttgagtatttgaatttagagaaacaacatggttccaagaaggagggtgtaaaacctgtaaaatactgtcaacatgtattcattagttacaatctcatgtttgtgttttcttagtactgtctatttacaaacacgtaaaaaataccccaaatatgtttaagtattaaatcactttacctagcgttttagaaatattaatttacttgaagagatgtagaatgtagcaaattatgtaaagcatgtgtatccagcgttatgtactttgcgccttgtgacgtctttctgtcatgtagcttttagggtgtagctgtgaaaatcatcagaactcttcactgaagctaatgtttggaaaaaatatatacttgaagaaccaatccaagtgtgtgcccctacccccagctcagaagtagaaagggtttaagtttgcttgtattagctgtgccttcattattttgctatgtaaatgtgacatattaattataaaatggtgcataatcaaattttactgcttgaggacagatgcatacagtaaggatttttaggaagaatatatttaatgtaaagactcttagcttctgtgtgggttttgaattatgtgtgagccagtgatctataaagaaacataagcttaaagttgtttatcactgtagtgttaataaaacagtattttcaaaaaat

SEQ ID NO: 5019 - protein, 182 aa, Homo sapien
MADSENQGPAEPSQAAAAAEAAAEEVMAEGGAQGGDCDSAAGDPDSAAGQMAEEPQTPAENAPKPKNDFIESLPNSVKCRVLALKKLQKRCDKIEAKFDKEFQALEKKYNDIYKPLLAKIQELTGEMEGCAWTLEGEEEEEEEYEDDEEEGEDEEEEEAAAEAAAGAKHDDAHAEMPDDAKK

SEQ ID NO: 5020 - DNA, 2016 bp, Homo sapien
ccccttatctctgtggggagcagtcaagtgccgcgaaacaggaggcggggccgcggccaacgtcattcccgcggccgcacgtcaccgccacttgccgcatccgcaagatctctctggaccagctcgggtgcagggcctctgcgggagccctcctagacctctgcggcttctcctctaacatggccgactcggaaaaccaggggcctgcggagcctagccaggcggcggcagcggcggaggcagcggcggaggaggtaatggcggaaggcggtgcgcagggtggagactgtgacagcgcggctggtgaccctgacagcgcggctggtcagatggctgaggagccccagacccctgcagagaatgccccaaagccgaaaaatgactttatcgagagcctgcctaattcggtgaaatgccgagtcctggccctcaaaaagctgcagaagcgatgcgataagatagaagccaaatttgataaggaatttcaggctctggaaaaaaagtataatgacatctataagcccctactcgccaagatccaagagctcaccggcgagatggaggggtgtgcatggaccttggagggggaggagagtagaagagagtacgaggatgacgaggaggagggggaagacgaggccgaggaggaagctgcggcagaggctgccgcgggggccaaacatgacgatgcccacgccgagatgcctgatgacgccaagaagtaaggggggcagagatggatgaagagaaagcccacgaagaaaaaagcctggttttgtttttcccagaatatcgatggacttaaaaaggctcaggtttttgaccaaaatacaatgtgaatttattctgacattcctaaaatagattaaattaaagcaattagatcctggccagctcgattcaaatttgactttcattttgaacataataaatatatcaaaaggtgttaaagaaaactgaattaaacccaaaattatgttttcatggtctcttctctgaggattgaggtttacaaagggtgttagcagatgcgaagtaaagaacgtcactttgaaacccattcatcacacagcatacgctacacatggaacacccaagccatgactgaacacgttctcagtgcttaattcttaaatttctttactcatgacatttcgcagtgcagagaaggcagaacccaagaaaaacgtcatctttgagactttgcttttgtaacgcagacatcagctttacacttcacaggagattgatggcattgaggaagattgcaatggagatcatgacactactgttaataaggccaggaaaactgccatttcaagttctgaaaaatgttttgagtatttgaatttagagaaacaacatggttccaagaaggagggtgtaaaacctgtaaaatactgtcaacatatgtattcattagttacaatctcatgtttgtgttttcttagtactgtctatttacaaacacgtaaaaaataccccaaatatgtttaagtattaaatcactttacctagcgttttagaaatattaatttacttgaagagatgtagaatgtagcaaattatgtaaagcatgtgtatccagcgttatgtactttgcgccttgtgacgtctttctgtcatgtagcttttagggtgtagctgtgaaaatcatcagaactcttcactgaagctaatgtttggaaaaaatatatacttgaagaaccaatccaagtgtgtgcccctacccccagctcagaagtagaaagggtttaagtttgcttgtattagctgtgccttcattattttgctatgtaaatgtgacatattaattataaaatggtgcataatcaaattttactgcttgaggacagatgcatacagtaaggatttttaggaagaatatatttaatgtaaagactcttagcttctgtgtgggttttgaattatgtgtgagccagtgatctataaagaaacataagcttaaagttgtttatcactgtggtgttaataaaacagtattttcaaaaaata

SEQ ID NO: 5021 - protein, 240 aa, Homo sapien
PYLCGEQSSAAKQEAGPRPTSFPRPHVTATCRIRKISLDQLGCRASAGALLDLCGFSSNMADSENQGPAEPSQAAAAAEAAAEEVMAEGGAQGGDCDSAAGDPDSAAGQMAEEPQTPAENAPKPKNDFIESLPNSVKCRVLALKKLQKRCDKIEAKFDKEFQALEKKYNDIYKPLLAKIQELTGEMEGCAWTLEGEESRREYEDDEEEGEDEAEEEAAAEAAAGAKHDDAHAEMPDDAKK

SEQ ID NO: 5022 - DNA, 2824 bp, Homo sapien
gctgccacctctctagaggcacctggcggggagcctctcaacataagacagtgaccagtctggtgactcacagccggcacagccatgaactacccgctaacgctggaaatggacctcgagaacctggaggacctgttctgggaactggacagattggacaactataacgacacctccctggtggaaaatcatctctgccctgccacagaggggcccctcatggcctccttcaaggccgtgttcgtgcccgtggcctacagcctcatcttcctcctgggcgtgatcggcaacgtcctggtgctggtgatcctggagcggcaccggcagacacgcagttccacggagaccttcctgttccacctggccgtggccgacctcctgctggtcttcatcttgccctttgccgtggccgagggctctgtgggctgggtcctggggaccttcctctgcaaaactgtgattgccctgcacaaagtcaacttctactgcagcagcctgctcctggcctgcatcgccgtggaccgctacctggccattgtccacgccgtccatgcctaccgccaccgccgcctcctctccatccacatcacctgtgggaccatctggctggtgggcttcctccttgccttgccagagattctcttcgccaaagtcagccaaggccatcacaacaactccctgccacgttgcaccttctcccaagagaaccaagcagaaacgcatgcctggttcacctcccgattcctctaccatgtggcgggattcctgctgcccatgctggtgatgggctggtgctacgtgggggtagtgcacaggttgcgccaggcccagcggcgccctcagcggcagaaggcagtcagggtggccatcctggtgacaagcatcttcttcctctgctggtcaccctaccacatcgtcatcttcctggacaccctggcgaggctgaaggccgtggacaatacctgcaagctgaatggctctctccccgtggccatcaccatgtgtgagttcctgggcctggcccactgctgcctcaaccccatgctctacactttcgccggcgtgaagttccgcagtgacctgtcgcggctcctgacgaagctgggctgtaccggccctgcctccctgtgccagctcttccctagctggcgcaggagcagtctctctgagtcagagaatgccacctctctcaccacgttctaggtcccagtgtccccttttattgctgcttttccttggggcaggcagtgatgctggatgctccttccaacaggagctgggatcctaagggctcaccgtggctaagagtgtcctaggagtatcctcatttggggtagctagaggaaccaacccccatttctagaacatccctgccagctcttctgccggccctggggctaggctggagcccagggagcggaaagcagctcaaaggcacagtgaaggctgtccttacccatctgcacccccctgggctgagagaacctcacgcacctcccatcctaatcatccaatgctcaagaaacaacttctacttctgcccttgccaacggagagcgcctgcccctcccagaacacactccatcagcttaggggctgctgacctccacagcttcccctctctcctcctgcccacctgtcaaacaaagccagaagctgagcaccaggggatgagtggaggttaaggctgaggaaaggccagctggcagcagagtgtggccttcggacaactcagtccctaaaaacacagacattctgccaggcccccaagcctgcagtcatcttgaccaagcaggaagctcagactggttgagttcaggtagctgcccctggctctgaccgaaacagcgctgggtccaccccatgtcaccggatcctgggtggtctgcaggcagggctgactctaggtgcccttggaggccagccagtgacctgaggaagcgtgaaggccgagaagcaagaaagaaacccgacagagggaagaaaagagctttcttcccgaaccccaaggagggagatggatcaatcaaacccggcggtcccctccgccaggcgagatggggtggggtggagaactcctagggtggctgggtccaggggatgggaggttgtgggcattgatggggaaggaggctggcttgtcccctcctcactcccttcccataagctatagacccgaggaaactcagagtcggaacggagaaaggtggactggaaggggcccgtgggagtcatctcaaccatcccctccgtggcatcaccttaggcagggaagtgtaagaaacacactgaggcagggaagtccccaggccccaggaagccgtgccctgcccccgtgaggatgtcactcagatggaaccgcaggaagctgctccgtgcttgtttgctcacctggggtgtgggaggcccgtccggcagttctgggtgctccctaccacctccccagcctttgatcaggtggggagtcagggacccctgcccttgtcccactcaagccaagcagccaagctccttgggaggccccactggggaaataacagctgtggctcacgtgagagtgtcttcacggcaggacaacgaggaagccctaagacgtcccttttttctctgagtatctcctcgcaagctgggtaatcgatgggggagtctgaagcagatgcaaagaggcaagaggctggattttgaattttctttttaataaaaaggcacctataaaacaggtcaatacagtacaggcagcacagagacccccggaacaagcctaaaaattgtttcaaaataaaaaccaagaagatgtcttcaaaaaaaaaaaaaaaaaaaaaaa

SEQ ID NO: 5023 - protein, 372 aa, Homo sapien
MNYPLTLEMDLENLEDLFWELDRLDNYNDTSLVENHLCPATEGPLMASFKAVFVPVAYSLIFLLGVIGNVLVLVILERHRQTRSSTETFLFHLAVADLLLVFILPFAVAEGSVGWVLGTFLCKTVIALHKVNFYCSSLLLACIAVDRYLAIVHAVHAYRHRRLLSIHITCGTIWLVGFLLALPEILFAKVSQGHHNNSLPRCTFSQENQAETHAWFTSRFLYHVAGFLLPMLVMGWCYVGVVHRLRQAQRRPQRQKAVRVAILVTSIFFLCWSPYHIVIFLDTLARLKAVDNTCKLNGSLPVAITMCEFLGLAHCCLNPMLYTFAGVKFRSDLSRLLTKLGCTGPASLCQLFPSWRRSSLSESENATSLTTF

SEQ ID NO: 5024 - DNA, 3151 bp, Homo sapien
cgggcccggggtccttcccgcctccgcggccgccggccgctttgtttcccctgcctctgcgcttcgggcgactcgagagggtctcccgccggggttgcgaaggggacgcggcggcagaagggcggccgaccccgccgggactcacagggacccaggagtccggccgccgggagggccgcgtgaggagagcgaagagggagcccgagctctgcggccccgggtggcgggccgggggcgcccgtgagcagagacctccccgtcgacggggggcgatgttcccctcacccgtgggctcttcgggcagccagggcatcccgccgctgggacctggacccgctcagtgggcacccctcaggctgctccatggagaccctgtgccctgcgccccgcctggcagtgccggcgtccccgcgagggtcgccctgctcccccacgccccggaagccgtgtcgggggacccaggaattctctccgctgtgcctgcgtgccctcgccttctgcgcccttgccaagccccgggcgtcctctctgggcccggggcctggggagctggcggcgcggtccccagtgctgcggggccctcaggcccccctgcgccctggcggctgggccccggatggcctgaagcacctctgggcaccgaccgggcggcccggcgttcctaacaccgccgccggcgaggatgcggacgtcgcagcgtgcccccgccgcggagaggaggaagagggcggaggcggtttcccgcacttcggcgttcgctcctgtgcacctccgggccgctgccctgcgcccccgcaccctcgggaatctacgaccagcttcgcctcggccccgcctcgcccggccccgggtctcgagcctcagcgtggcccagccgccagcccgcctcaggaacccagttcccggcctccgtcgccacctgcgggcctctccaccgagcccgcgggtcccgggacggcgccgcggccgttcctgcccggccagcctgccgaagtcgatggaaaccccccgccggccgcccccgaggctccagcggccagcccctcgacggccagcccggctccggccgcacccggagatctccgccaggaacatttcgatcgtctgatccgccggtcgaaactttggtgttacgcgaagggcttcgccttggacactccgagtttgcgccgggggccagagcggccgcctgcgaaagggccggctcggggagccgccaagaaacgccggctgccggcgccccctccgcgcaccgcgcagccccgccgccctgcaccgacgctccccaccacgagcaccttcagcctcctcaactgcttcccctgccccccggccctggtggtgggggaagacggagacctaaagccggcatcctcgcttcgcctccagggagactctaagcccccgcccgcccacccgctgtggaggtggcagatggggggtcccgctgtccctgagccccctggcctcaaattctgggggatcaacatggatgaaagctgaccgtgggacttctgccaaaggggaaaagttgggaccatggccaaaccgcgggcttgaggagggagccccgtttctcacatttgtccccttcctttacattttaggagctgtgggcagagggacctaaataacagtgatcttcattcaagcacctaagttttcggggtgacagtccctccccctcatcctttgcagaggaacccagggctggagtcgggagaaggctgatgacatagattccaatccctgcctccttccatctcggaccgttggaggcagggcctgcaccccagtgggagcaaaggaggccaccgctcaaagacagcccctcacccaaaaaaaaggggagaagagagagacctcggtgatggacaaaccggttgttactgtgtctgtgggcgagcctggggtgcggggctgtggtgggggtggggagatgattggcagctccctgggggcatcccccacccccactgtccaggcctttaaccctttgctcccctcaggccttccctaacgctccaagcaccgctggagcctttaatgggtgagggaacttgggtaagaggaagatcacccccttcctgtcccctttctaggccccctcaagtgcaggtgacccttaattggtgagatcttcagcctcagccgccgacctttcccttttgtccagttttggagttcccgttttttccttgtttgctttccgagtgtaaggtctggccggtgagaaagatttcccccaaccttgattaatcagccccctcccccaacttacttcccttaggacgggtagggctgagggacctcctctcctggaaagtgcttactttgcctggggaaggggctagacactgtcccagggaaagtaatagaaggtggaagaaatcaataaaatcagaccaaacaagtcgcctttcgagggcctccaccgatttatggatgagagggggtggaggtggaaggcaggcccaagtccattctttggacacccaaactcagcccccttaaagagtggaaacaaaacaagctgcactttgcagaggtggtaaatgaaaggactcttggcctaacttcaagagtcccctggggtttgaaggggcaaagtttgagtctggatggaacctgggctgaggtaccttaagcttccccccgcaacaccccagcctcagggattgcgggagttgtcagagatctgatggatccgaaaggggcagggccaggggattaggtttggggtcagaggttctgttttccaggggaggggtgagataggcctggatcatgccctctgccatgccctccagctaggaggatcttgagtcagagaggattggaagtgctttctcctccacccaggtgaggtcaggggagcttaggtcttagggagatggcaagttgaggtatgaagggaagctggggcttttggagctgccgaacaactgagggacccagtgcgccttccatcccgcactagtgaatagcgccccctcttcccccgaaaacgaggtgcgagaggaacaattcccacgctggggaaggacttgtctccttttctgtgaaaatgctttgtaaaaagttgttattgtttgcatagagcagattcttgagaaaaactgttttggaccataaaagttttgtttgtttt

SEQ ID NO: 5025 - protein, 379 aa, Homo sapien
METLCPAPRLAVPASPRGSPCSPTPRKPCRGTQEFSPLCLRALAFCALAKPRASSLGPGPGELAARSPVLRGPQAPLRPGGWAPDGLKHLWAPTGRPGVPNTAAGEDADVAACPRRGEEEEGGGGFPHFGVRSCAPPGRCPAPPHPRESTTSFASAPPRPAPGLEPQRGPAASPPQEPSSRPPSPPAGLSTEPAGPGTAPRPFLPGQPAEVDGNPPPAAPEAPAASPSTASPAPAAPGDLRQEHFDRLIRRSKLWCYAKGFALDTPSLRRGPERPPAKGPARGAAKKRRLPAPPPRTAQPRRPAPTLPTTSTFSLLNCFPCPPALVVGEDGDLKPASSLRLQGDSKPPPAHPLWRWQMGGPAVPEPPGLKFWGINMDES

SEQ ID NO: 5026 - DNA, 1179 bp, Homo sapien
ggcacgaggtgatgaagaagccagttatctcagatttcgaaatagtatatggaaaaatgaagaagagaaagtggaaatttttcatcctttgcgactagttcgggatccactgtcacctgctgtaagacagaaagaaactgtgaaaaatgacctgcctgtaaatgaagctgcaattagaaaaatagctgcccttgaaaatgagctgacttttcttcgctctcagattgcagcaattgtggaaatgcaggaactgaaaaatagtacaaattctagttcctttggcttgagtgacgagcgcattagtttgggtcagctgtcatcatcgcgggctgcccatctgagtgtggacccagatcagcttccaggttcagtgctttctcctcctcctcctccaccacttcctcctcagttttcatctctccagccaccgtgttttcctcccgtacaaccaggatctaataatatttgtgactcagataatccagcaactgaaatgagcaaacagaacccggctgctaataagaccaattatagtcatcattcaaaaagccagagaaataaagatattccaaacatgttggacgttctaaaggatatgaataaggttaagcttcgtgcaattgagcggtcacctggcggtagacccattcataagaggaaaagacagaattcacattgggatccagtttctttaatatctcatgcacttaaacagaaatttgcatttcaagaagatgattcttttgagaaagagaatagatcttgggaatcttccccattttctagtccagaaacttcaaggtttggacatcacatttcacagtcagaaggacagcgaactaaagaagaaatggtcaacacaaaagctgttgaccaaggtatcagcaacacaagccttctaaactcaaggatttaaactcaacttaaggttgagctttaaacttccaaaacttcttcctggatgataaattattcttagaaactgatttggactgttaaaggctaaaagtagatgtatttaaagactcttcttgacacattttgcctacacttgctatgtaaatatgtatgcctgtcatttttgtttcctttgttcctttttacgtttatactctgttcttctgtacatagagcttaaaataaacattctttttgaacttgaaaaaaaaaaaaaaaaaa

SEQ ID NO: 5027 - protein, 224 aa, Homo sapien
MQELKNSTNSSSFGLSDERISLGQLSSSRAAHLSVDPDQLPGSVLSPPPPPPLPPQFSSLQPPCFPPVQPGSNNICDSDNPATEMSKQNPAANKTNYSHHSKSQRNKDIPNMLDVLKDMNKVKLRAIERSPGGRPIHKRKRQNSHWDPVSLISHALKQKFAFQEDDSFEKENRSWESSPFSSPETSRFGHHISQSEGQRTKEEMVNTKAVDQGISNTSLLNSRI

SEQ ID NO: 5028 - DNA, 759 bp, Homo sapien
  Unsure 585: Unknown base
  Unsure 656: Unknown base
  Unsure 708: Unknown base
catcatattttaatttttgtaatttaatttctttctccttttcttcctctgatttatgcttatcctcttctactagtttaatttcttcatttaattggtcagtgtagattttcctcaaaacctcttcccgttgtttcagcctttcctctgtgtccttgtatatgtcatcagaaaagtaagccccttcgttgcactgcaccattttctctatcagctccaccaactcctgcacttgactttccttctctgccttactggttttcttgctgttgctaaaggcacagcaacggttcccgcaattcctttaccaatgctttttaggcccacatccgcatctgctatgaagtcatggaagctctggccctccaactcttctttgcgagtgaacaagatgaccatgtgcttcatggctgacttcccaaagacagccttgatcaatgcaacggttttctgctcctcctctgtgtagcggcccagcagcagaactaggacaatagcatggggccctgggcaggaggagatgatgcagcagctgatttccttgcaggtggtgtccaggctctccttggtgtcaaagagccctgnagtgtccacaacaagaaggtctctcccctgccattcccgggatgctttttgacagttcttggtaacagctngggcagcaattctagaatcaaagatttcctctccaaagatggtgttcgctgntgcactttttcccactccgattttgctaaccagacgatcctcatggagcgg

SEQ ID NO: 5029 - DNA, 1201 bp, Homo sapien
cgcggttcggtcggctgcagcgctacttttggtccggggtcggcagggaggccgcggctaccgcatcacagctgacgtgaggactacgtggggccgctgccggctccgggttgctgggcggcggcgccgctgctgagcggcggtcgggctcgccgtctccacctcctcgcgtccgtaatcagtgacgaggtccgctacgtaaatccctttgcggcggacaaatgaccatggaaacagttgaatcccagcatgatggaagtataacagcttctttgacagagagcaagtctgctcatgtgcagactcagactggccaaaattcaatccctgctttagctcaggtagcagcaattgcagagacagatgaatctgcagaatcagaaggtgtaattgattctcataaacgtagagaaatcctttcacgaagaccctcttataggaaaatactgaatgaactgtcctctgatgtgcctggtgttcccaagattgaagaagagagatcagaggaagaaggaacaccacctagtattgctaccatggcagtaccaactagcatatatcagactagcacggggcaatacagtatgtatgctgcaattcgatatgatacagtgctagctttaagtcttctctagttatattgaagcaactcaggttttggcattaaattgttccattttaaaatgcatcattaatacctaaactgtatcatagaatgaaagtatatgttaaaaagtgagatctttgtattgacagctgtcatataattttgaaaagtaaaaattttgactgccgaatatagaagaaaattttggggtaaaaaggagaatttttcctatttacatgtttatattaatctctagtaaaacattgtttttgttgtctttatgatgcatgcgaacataaatgtctgtatttcattcttgttggcttttgttacccacaattacatactattcttactaatctgagagttttctaaagtatgttttcaatgtttcactactctctactctgttaatttgtgctacagtttttcctaaaagagaatggaaaaatgatttaattttttaaactgtagcaattggatagataattttatttgaaattttacacactgaaagctctaaataaacagatacattcacaaaaaaaaaaaaaaaaaaaaaaaaaaaaaaaaaaaaaaaaaaaaaaaaaaaaa

SEQ ID NO: 5030 - protein, 137 aa, Homo sapien
MTMETVESQHDGSITASLTESKSAHVQTQTGQNSIPALAQVAAIAETDESAESEGVIDSHKRREILSRRPSYRKILNELSSDVPGVPKIEEERSEEEGTPPSIATMAVPTSIYQTSTGQYSMYAAIRYDTVLALSLL

SEQ ID NO: 5031 - DNA, 1968 bp, Homo sapien
cacagtgaccagcgccgtgatgatgcagtatagccgtgacttgaagggccacttggcatctctgtttctgaatgaaaacattaaccttggcaagaaatatgtctttgatattaaaagaacatcaaaggaggtgtatgaccatgccaggagggctctgtacaatgctggcgttgtggacctcgtttcaagaagcaaccagagcccttcacactcgcctctgaagtcctcagaaagcagcatgaactgcagcagctgcgagggcctcagctgccagcagacccgggtgctgcaggagaagctacgcaagctgaaggaagccatgctgtgcatggtgtgctgcgaggaggagatcaactccaccttctgtccctgtggccacactgtgtgctgtgagagctgcgccgcccagctacaggtaggggagtcagctgcccacttttgcctgcagcctcacctatccctcctcttaacggggagtaggagccaggtactggctcgctaatgcacagacggggaatgcccatcttcacccggaaagggtctttgtatttggtgacctaaaaggcattgccctttagaaacattttagattagcatactattttcaacaacataattactccaaattatgcagtgttttcaagttctgaaaatgaggctgagattcctgggtaacatatctagttagcggcttacctgaggacaagaatccaggcctcctgaggcctggcccagggctgcttcctctatttcaagttgcctccctttttctgacacttaggaggatggtctttattacttaagatatttgggaaagaatacttctcaattatccatggatgggttgttgactctgtgatattggtgattaatttccttttatgattgcaaatgcctcaagggcatatgggttggctgttatttattagcaagtcaaactaattttaatattaacacgaaaaagagaactcacatatagttttcttcctttcttgcatgaagaagaattttaaatttcctcttacaagttttttcaatttgtttttatttctcagatgtgtttgccaaatgtcactgtggttttatgtaaaactggttctagataatacttagtccttcagaagctgctaatttcagagctaataagaccaaatgacccctgtgtcctttccccagaagcagtcataggcttgtctttttctgcccacctattctgactctcatccctaagtctctcctgagggctgatgatgggcacgggctttctgagaagtcagccaggaatgtggagctgccacctacggctagaagcagagccaccctccctggccatgtgggcatcagcccagaaatgttggcctgagtcagtcagctgagctaaggacacacaatttcaagaagggtctcctgcattgctgcctgaagtgttatagtctactcatgtagagaccacattctgcacagaaagacgtcttcagtaattgctttattcaatgtaccttctttagcgtttcactaaaaatgtaattaatttccttcagtttatactatgtcatagtatttatttttaagcccttgtaaagtataaactttcaacctgtgagacggcaaagatctctaccaattgaaagctagaaatcactgtgatcacaattgatttagaaaattaaatgcactagagaccaggggtgtgcacagagacacaggccccccaccgaggcttgcatgctaacagagactgttggcttttctttcccagtcatgtcccgtctgcaggtcgcgtgtggagcatgtccagcacgtctatctgccaacgcacaccagtcttctcaatctgactgtaatctaatctgttgtgcttttgttggacttggcatgtttccatgaactgcactattataaactattaaaatgatagattgtggagaaagtaattattccaacacccatctgccatgcgatgttaaa

SEQ ID NO: 5032 - protein, 166 aa, Homo sapien
TVTSAVMMQYSRDLKGHLASLFLNENINLGKKYVFDIKRTSKEVYDHARRALYNAGVVDLVSRSNQSPSHSPLKSSESSMNCSSCEGLSCQQTRVLQEKLRKLKEAMLCMVCCEEEINSTFCPCGHTVCCESCAAQLQVGESAAHFCLQPHLSLLLTGSRSQVLAR

SEQ ID NO: 5033 - DNA, 1635 bp, Homo sapien; identical to SEQ ID NO: 3807

SEQ ID NO: 5034 - protein, 445 aa, Homo sapien; identical to SEQ ID NO: 3808

SEQ ID NO: 5035 - DNA, 8107 bp, Homo sapien
  Unsure 6034-6155: Unknown base
atgcagaagagcgtgcgctacaacgaggggcacgccctgtacctggcctttctggcgcgcaaggagggcaccaagcgcggcttcctgagtaagaagacggccgaggcgagccgctggcacgagaagtggttcgccctctaccagaatgtgctcttctacttcgagggcgagcagagctgccgcccggcgggcatgtacctcctggagggctgcagctgcgaacgaacgcccgcgccacccagggccggcgccgggcagggaggcgtccgagacgcgctggacaagcagtattactttactgttctttttggccatgaaggtcagaagccactggagctgcgctgtgaggaggagcaggatggtaaagagtggatggaggccattcaccaagccagttatgcagacattttgattgagagggaagtattaatgcagaagtacattcatctagttcagatcgtagagacagaaaaaattgcagctaaccaactccgacatcaacttgaagatcaagacacagaaatcgaaaggcttaaatcagagattattgctcttaataaaaccaaagaacgaatgcgaccttaccaaagcaaccaagaagacgaagatccagacatcaagaagattaaaaaggttcagagcttcatgcgaggatggttgtgcagaaggaaatggaagaccatcgtgcaggattacatttgttctcctcatgctgaaagtatgaggaagagaaaccagattgtgttcaccatggtggaggcagagtcagagtacgttcaccagctctacatcctggtcaatggctttctccggcccctgcgtatggccgccagctccaagaagccccccatcagccacgacgacgtcagcagtatttttcttaacagtgaaacaatcatgtttcttcatgaaatatttcatcaaggactaaaggcaaggatagcaaactggcccactttaattttagctgatctgtttgatattttgctccccatgctgaacatttatcaagaatttgtgcgtaatcaccagtacagcctgcaagttctcgccaattgtaagcaaaacagagattttgacaaactcttaaaacagtatgaagccaatccagcctgtgaggggaggatgctggagacattcttgacctatcccatgtttcagatccccagatatatcatcacactccatgagctccttgctcacacaccccatgagcatgtggaaaggaaaagcctggagtttgccaaatcaaagctagaggaactatccagagtaatgcacgatgaagtcagcgacactgaaaacataaggaaaaaccttgccatcgaaagaatgatcgtggagggctgtgacatcttgctggacaccagccaaacgttcatccgccaaggttctcttattcaagtaccttccgttgagagggggaaacttagtaaagttcgcctgggttcgttgtctttgaaaaaggaaggagagagacaatgcttcttatttacaaaacactttttaatatgtacaagaagttcaggagggaagcttcatctgctcaagacaggtggggttctgtctctaatagactgcacattgattgaggagccagatgcaagcgatgatgactctaaaggttctgggcaagtgtttgggcacctggattttaaaatagtggtggagcctcctgacgctgccgccttcactgttgtcttgttagcaccctcacgccaggagaaagctgcctggatgagtgacatcagtcagtgtgtggacaatatacgatgtaatggtttaatgactatagtgtttgaagagaattccaaagtcactgtgccacatatgattaagtctgatgcccgtcttcataaagacgacactgacatttgcttcagtaaaacactcaactcctgcaaagtgccccagatccgttatgccagcgtggagcgcctcttggaacgactgacagacttgcggtttctgtagtattgatttcctcaacacctttctgcacacctatcgtattttcactactgccgctgtggtgctggggaaactctccgacatatacaagaggcctttcacctccatccctgtcaggtcattggaattgttttttgctaccagccagaacaacagaggtgaacatttggtggatggcaaatccccacgtctgtgtcgcaaattctcttccccgccaccactggctgtgtccagaacatcttccccagtgagggccagaaagctgtctttgacttctcccttgaactcaaagataggagcattggacctgacaacttccagcagtcccaccaccaccacccagagtcccgctgcgtctccaccaccacacactggtcagataccactggatctcagcagaggcctctcttctccagagcaaagcccgggaacggtagaagagaatgtcgataacccacgcgtggatctgtgtaacaagctaaaacgaagtattcaaaaagcagtcctagagtctgcaccagcggaccgagcaggagtggaaagctcccctgcagcggacaccacagaactttcaccttgcagatccccctcaactcctcggcacctccgctatcgacagcctggaggacagacggcggacaatgcccactgctctgtttcaccggcttctgcttttgcaatagccacagctgcagcaggacatgggagtccaccaggctttaacaacaccgagagaacatgtgataaagagtttattatacggagaacggctaccaatcgagttctgaacgtcctccgtcactgggtctcaaagcacgcacaggatttcgaactcaacaatgaactaaagatgaatgtcctaaatttgctagaagaagttttgcgagacccagaccttcttccccaagaaaggaaagccgccgcgaatatcctcagggccctttcacaagatgaccaagatgacatccacctaaaattagaggatataattcaaatgactgactgcatgaaggccgaatgctttgagtccttgtcggccatggagctggcagaacagatcaccctcctggaccatgtcattttcagaagcattccctatcgaggagtttcttgggcaggggtggatgaagctggataaaaacgaaagaactccttacattatgaaaaccagccaacacttcaatgacatgagtaacctggtggcctcccagataatgaactatgctgatgtcagctcccgtgccaacgccatcgagaaatgggtggcagtggcggacatctgccgatgcctgcacaactacaacggcgtgctggagatcacctcggccttaaacagaagtgccatctacaggctgaagaaaacctgggccaaggtctctaagcagacaaaagctctaatggacaaacttcaaaagactgtttcctctgaaggaagatttaaaaatcttagagaaacccttaaaaattgtaaccctcctgcagttccttatcttgggatgtacttgacagacctggcatttattgaagaaggaacaccaaactttactgaggaaggccttgtcaatttctccaaaatgagaatgatatcacacatcatcagagagatacgccagttccagcagacttcctacagaatagatcatcagccaaaggtcgcacagtacttgcttgacaaagaccttatcatagatgaagatacgctatatgagctgtcactaaaaattgaacctcgactccctgcttgaagatctggccttgcccctgagtccacgggatgttcatggaaagcaggacagacagaattgtgtatgccttgcctatcacggtacagcacgaagccaggctcctttctccaccaaagaagatggaaccagactggaattctgtctccagagagaaacccagctgtttgggtcaaagacagatgcttcagacttgggtgggaaggtgaaagatggctatttagaaagctggtggcacgttttacataagggaatgtcagatgggagatgctagttgccattttaacaaagcaggtaaatcggtaaattttaaactctgtccatgttctgatagaactcagggacaaggatccatgaaaaagacctgtgatgtttctctggcgctttactggcctgggcacacctaccaatcttctaggatttgactggttccattacatttccttttggtataagcttcacagaaaagctgacacttcctctacagagatggaccaaaacataagcaatttcagtctacagcatgtgcatggttgtcagtgcattctaaatatttctatgtgaggaatggtaccttctgaaactgcctttccagtctttaggcaatgggataggaaagaaagaatgaaacacaaatggatttgtatgtaacatttccttaattaaatgcagtaggctgtgccccagaggattccagacagtggctggctgaggtgggtggggagcttttccttgagactgttggtcctaagaagccagcccttttggagaggcagctgcaaaaaggtgcacgcccatctcaccgacaaaactgtggaacagaaggccaccaagtgctgtggggaatcatgggtttcagtgctgagtgaaaatctatacctaaaaatcatctctgcaccttgctttgtttgttttctttccccactcatagtactgcaggaatctattctcatttacacagacctttttttaggcttactatgaacattggctgtattttttttaaacagtttagtgaaattttcttttcaaaacccacacttccatatgctgttcgtagatctctttctttaaaaactgatgttgagagatctctgagaatattataagtgcatgggaaatgggcccaaccaccgaacagctcttacattacaaaaccaaatgcaagggttagtcctgctacctgaggctggggaagtgaccttccttttcccaagattgtcagttgttgaagaaatagggctatctcattgtttacctccctcttctcttctcagggagactgctgctttaaaagaaggaagagaaaaaatatagttctatttccctgaacctgttgcacctgacattttctcttagcagcatgaaacttattgatgctgacaatgaaaaatggatctgtctggctgctttccctctttccttgcactttaattatgttgctagagctaacagactaataaattccacctgctggctcttaagactcagtgaaagagctagcattggtaatgcaccatagaggtagagaatgtacactttctgcacggtaagtgccatctctgtatgtaactatatagtgaaatatcaactaagtaaaagaaaatataatatttgaagaccattcccaaaatattttcaatagttcatattagccaacagtgtagcactcaacccaaggagggttccttatggatgctttctttttcttttttaaagttgcttgatggttctctttagtttcaaataagaggttgacgcatcttgatgcatgatgagaagcatgggctgtttggatcctaacaacgcataacttgtgatttatttctcagtgctccagaaactgagggtttgaaataatatgtatcagttgcaccaaacacctcaaggtcttgcagaagaaaagtaaaggttagctttcatggctcaaaagcatagtcctgaagggtgaactaaaaccgggacaaatctgtgagaggaccacacacatactagtttcgggccaaacaacacgtggaaaggtgcatgcattctactctgccttggagttgccagagtccttcagagggaaagggatggttctgtgtgcactttttctggaagttcggactcatttctttgacccaaatgttccagagacactgcagccattcttattaacaaaaaataagacaggagtttccaaatgctccttcccttttggatcgcagcttttcttcaactagtgacaaagcttttgcgcctatttcctgcaggatgttggaactgccccgcactggtcatattaggcactgtcaattgctatgctgacttttaggggnnnnnnnnnnnnnnnnnnnnnnnnnnnnnnnnnnnnnnnnnnnnnnnnnnnnnnnnnnnnnnnnnnnnnnnnnnnnnnnnnnnnnnnnnnnnnnnnnnnnnnnnnnnnnnnnnnnnnnnnnncactagcctttcgcatttttgtttgagaattacaccactttctggagtctgcagccttcctggagctgcaagagggcaagagagagagctccacctctgagggagtgtctgttgatgacctgcactattcgtgtgccagctgggagaggaatgcacattttaaaatcccttcaatttggtcaaattaaaaatccccaagagcaatttgcagtgttttttctggtcgttaaagtacccatcctcttctgcctacacacaaagcatgcattcccagctgcatctgcctctagtccattatggagacccatttctaagaggagatgggaggtcaacctctaacagccaagtagcgaacatgtatactgtaaaattaacctagaaaatcagaagaaaaatccaatttcatgctttcgaatgaatgcccacattttgtactgtcaacgaaattatcttggagcttttaggggatgccttttcgttattaactgagacatctagttttgctacagggacaaatctcttacctaatccaatatattatttgacagattcaggcatgaagtaaaacgtcgtcacttttccttagtgcttttctgaaggaatttaaagacggaattttaaacggccattgcaatattttcaagtggctctcataccaagtcccattactgtttgttaaatttcagtacgtcttaaagtactacttataaacaaatgaaactcagagaaactgaatcacctggaagagaaaaatccattatggtcccatgtggagtgaataatgatggatcagcaccctttctctcatgttattgtataagacgagacttttgggccagcagcgattgggcagcttttaaattcttaactgaaaagagtaatgcaatacagggattattcccaataaaattaacttttatttaaaagcaagagattttacttagcttttttttttcaaagtttgattttatccccttgaaaaaaaatctcttcactttaaagtataaaggtttttaaaaatccaattgcaaaatgtattatttttacaactatcgaaaaggcataaaagagaacatactatttatggctgaagggtatagccaggctaatgtgcacagagggaatcaataaataaaactctttttcatttcagtaagaaatcagattgtaagtttaatggctccattatagataccaccgtgtaatagaagacttaagtcaatgaaatctaatcagtgtgtcatttctcagcggccattggtgacttaaaattaagatgaggcagagccaaaatggaaaacagtcattttgttgtaggtataaacacatgaacgattcagaaaattattcatctcagctgccatgcagcatgacattaacattaggattgatagcactagtctgatctgctcaaggaaaataatagttctattatacttaatgatgttggtttttacacagctcatttcatttttcactagaaagccagttatgaaagagagctggcctaggcatcccggccctgagtcctaggcccagtctccaactggaaaaccttaggctggtgtttacacatccctgagcctcagtttcctcatctgcaaaacggtgtgaatagtaatccctgtgctgcttatctcacagggctattgtgaggaccaaatggattagactgtaaactgcaaagtgctgtccgcacatgaggtcatctgattactgtcctcagatctcttttgtagaggatttcaatgtatttctttatcatttgagtgtgtgtgtgatggacgaatatgtgtgtgagtttgagaagcatatcgttcgtgtccagttactttgcaaatttgtggacatttgtgattggacagaggggtttgtgctgtggcctaacacttgccaagtgaggtgtaggttatgcctatatgcaaattaaacttcacctttcttgaatattc

SEQ ID NO: 5036 - protein, 1035 aa, Homo sapien
MQKSVRYNEGHALYLAFLARKEGTKRGFLSKKTAEASRWHEKWFALYQNVLFYFEGEQSCRPAGMYLLEGCSCERTPAPPRAGAGQGGVRDALDKQYYFTVLFGHEGQKPLELRCEEEQDGKEWMEAIHQASYADILIEREVLMQKYIHLVQIVETEKIAANQLRHQLEDQDTEIERLKSEIIALNKTKERMRPYQSNQEDEDPDIKKIKKVQSFMRGWLCRRKWKTIVQDYICSPHAESMRKRNQIVFTMVEAESEYVHQLYILVNGFLRPLRMAASSKKPPISHDDVSSIFLNSETIMFLHEIFHQGLKARIANWPTLILADLFDILLPMLNIYQEFVRNHQYSLQVLANCKQNRDFDKLLKQYEANPACEGRMLETFLTYPMFQIPRYIITLHELLAHTPHEHVERKSLEFAKSKLEELSRVMHDEVSDTENIRKNLAIERMIVEGCDILLDTSQTFIRQGSLIQVPSVERGKLSKVRLGSLSLKKEGERQCFLFTKHFLICTRSSGGKLHLLKTGGVLSLIDCTLIEEPDASDDDSKGSGQVFGHLDFKIVVEPPDAAAFTVVLLAPSRQEKAAWMSDISQCVDNIRCNGLMTIVFEENSKVTVPHMIKSDARLHKDDTDICFSKTLNSCKVPQIRYASVERLLERLTDLRFLSIDFLNTFLHTYRIFTTAAVVLGKLSDIYKRPFTSIPVRSLELFFATSQNNRGEHLVDGKSPRLCRKFSSPPPLAVSRTSSPVRARKLSLTSPLNSKIGALDLTTSSSPTTTTQSPAASPPPHTGQIPLDLSRGLSSPEQSPGTVEENVDNPRVDLCNKLKRSIQKAVLESAPADRAGVESSPAADTTELSPCRSPSTPRHLRYRQPGGQTADNAHCSVSPASAFAIATAAAGHGSPPGFNNTERTCDKEFIIRRTATNRVLNVLRHWVSKHAQDFELNNELKMNVLNLLEEVLRDPDLLPQERKAAANILRALSQDDQDDIHLKLEDIIQMTDCMKAECFESLSAMELAEQITLLDHVIFRSIPYRGVSWAGVDEAG

SEQ ID NO: 5037 - DNA, 1700 bp, Homo sapien
acatgacgggcacgccaggcgccgttgccacccgggatggcgaggcccccgagcgctccccgccctgcagtccgagctacgacctcacgggcaaggtgatgcttctgggagacacaggcgtcggcaaaacatgtttcctgatccaattcaaagacggggccttcctgtccggaaccttcatagccaccgtcggcatagacttcaggaacaaggtggtgactgtggatggcgtgagagtgaagctgcagatctgggacaccgctgggcaggaacggttccgaagcgtcacccatgcttattacagagatgctcaggccttgcttctgctgtatgacatcaccaacaaatcttctttcgacaacatcagggcctggctcactgagattcatgagtatgcccagagggacgtggtgatcatgctgctaggcaacaaggcggatatgagcagcgaaagagtgatccgttccgaagacggagagaccttggccagggagtacggtgttcccttcctggagaccagcgccaagactggcatgaatgtggagttagcctttctggccatcgccaaggaactgaaataccgggccgggcatcaggcggatgagcccagcttccagatccgagactatgtagagtcccagaagaagcgctccagctgctgctccttcatgtgaatcccagggggcagagaggaggctctggaggcacacaggatgcagccttccccctcccaggcctggcttattccaagaggctggtcttgaattcctgagctcaagcaacctgccggcctcggcctcccaaagtactgggattacacgcagaaggcaccatgcccaggctagatgtgtcttatcccaatcctttggcaggcatgcagctccacaggcgatttcttcaagcagctgaagtgtttagccctcctgggttaagagccagataaggagaaatccctttcctaggtttggaatgtgttgtgaaaaaaaagagaaatccctggctcctggagctggtgggagacaagattaagcaaacctcccctgacatgtatccctttgaccccaagctctgcctcctccctgaccacccatgccctttcctttaacttctcaaacagataccagggcctaaactgctttacctcccctcctactgagtcaggttaggtggtgggaggtcacccatttccgagttaaaccaatgcaatatgagtaaaacaaagtcatgtgggtatgtctggggtagagagaggggtagcaagttcatgtgtcctccttggtcacatatctcccaaagctccgatccctgccatgggaagtggacaggaaacatgaggtcatgacctgcaggcatctttactgcagctctgccggcctggagggggagagggggaggaagaagtatgcgctgcacatttctgaggctactgcatttgctttcaaggcagaaatcttgctctgagcagtcagcggctccagtttgggcccgataaggaagttctccgtggcctccctcaggcagagcagggaggaggctgacattgccagtctcttctggggcccaaggcaggttgcaggagatccaatcccatagacagctctgggcctcttgcatttgagtttttcagaattaaactgcagtattttggaaagcaaaaaaaaaaaaaaaaaaaaaaaaaaaaaaaaaaaaaaaaaaaaaaa

SEQ ID NO: 5038 - protein, 223 aa, Homo sapien
MTGTPGAVATRDGEAPERSPPCSPSYDLTGKVMLLGDTGVGKTCFLIQFKDGAFLSGTFIATVGIDFRNKVVTVDGVRVKLQIWDTAGQERFRSVTHAYYRDAQALLLLYDITNKSSFDNIRAWLTEIHEYAQRDVVIMLLGNKADMSSERVIRSEDGETLAREYGVPFLETSAKTGMNVELAFLAIAKELKYRAGHQADEPSFQIRDYVESQKKRSSCCSFM

SEQ ID NO: 5039 - DNA, 3005 bp, Homo sapien
ataaacaaaagtataatttatttttgcctgatattaatcacttcttaaggcccaaatttctgtttttaagcaaaaggatagctctaagtgtgggttgcagttactgggacattaaattttcataaaatgagattcctttggttatggctgttcatagaattttaattctatgtcagtgttcttgttcactaagatatttcgaagtgagagaaagcattttaccaatacattcttattttttctcctttaaaataatattgaatttttcctggtacgaagacagatatttattaacttgattggaaaacacagaaattaagatcatgttgaacactgagttatctagatgatccctgagatttgaatgttcatgtcaaccgtgttgagcgctcaccagccaccaggctttaggcactggcagtgcaaggtgtctgaggcccattctcaggctgggcagaggtcacacagtgagtaaatgggtcttttcagtgcaatgtggttatgatagaggcatgccaggtgccactaacccagcaggtgtggcaggaggggcttcacagaggaaagggactttgagctcagtgttaaaggatgaggagtgagtcataagggggaaaaatggaaatgactttccaggcttcagaaacagcataaacaaacaaaggcctgagagctggagtcagtgtggtgtgtccagggatcacaagtgggctggagctgccggagaacagccaagtggctcagctgccatcccagaattgagctcgtcactatcagatgctgctgctccctggcctcagaggaaagcagcacacagctcaccacgaggggtttccccagaggctcctcctgcagccaatgctactattagtttatattataatagtatcagtttctttttctttggaaatccctagaactgttaactgaaggtgactcagggtaactaattctggatctttgggtgcacagcctctcactggagtctgagaggaggaggtggagactatcagtgcacggcccgcaaccaggaaggactcccagactaacgccaaaggtgtgttgggctcagctgctccactgtggaaaaggaaagccctggccctgtggcaggagaggattgttctagtcaagtgtggcgttgcacggacaggcggtgccgagtgtttgggtgcagacacaggcagctgctgccctccacttcctgctcttgcaagtcacagatgattccagtacaatgtgggaggtcctccttacaggggcacttgcaacaggaaggcagagagtttcgtcaattcaggtacaggtctgtctgggagacctggcccctgtggaggcaggaacaccgtgcaggggcatggcagcgcctgtctttgctatcacatcatttgccttttccttgtaggacccaaagatctatgtccaaaacttagtccagaaacatctgcattcctgtttaaacttcagctcagtttcttaaccaagaaccacgtcaaccctccagggttgtggtttgtatttttgcctttaagcattatctcctttccaccaagaagcctacttaggtttaacacatgaaagcagtgtctaaaaattagatcggtcctaaattggaatgggatgtcttccttgcatgtcccataccagggaatttttttaacacacagtgtagagcctttgccagagatgttgaaagggagattaaaggcttgagggatgaatttgatcatcattcttaaagtcccttccaatcctgtgattctctgattccctgagtctcgtttattattggacatgcctagcccatcaccagtgacctgcccgcatattgctggcttcccttggataacggagagcctatcaccacatgcctttgttgtcttccatcatatcaagtgagttgctttctggactttttccatctagagcctgctaggtttggttttgagaaaagatggtgaagtttcttttcatgagtttgtagggcaaaaaaaattctttttaaagatggtaagggtggaaattaatcatggtaccatctcattaaaaatagatacctcaaaatgtttacctttacaagtcaagaagagtatctgactttcttggaagtgtcaagaattgcaggttggctgaaaagttagattgagaatctgaccttgttacttatgattcttttttcccttggttctcggggatgcatgagaaggtgagctgtcactcacaaaaaaaagggaaaatgatttgaaaaatgtttcacatatacactttttatcattttagtggatggcagccttacgtcagtagtatatgccactatgaagtatggccaaaaccctagcgtcacttgtaaccattgtactcttatggatttgtgtcttacaccatttgccttgctttttaaatgactttgtttttcaaggtgctgtcattttgcaaaaggaaatctttatatgaaatgtacaaaaaccgttactaactggacaacagggaaggtgctggccccacattagtgcctgcccaccgctctacttctaaccagggacacggatcttccattctctacatccaccggactgcagcccaagtctggacctggctgcagtgggcatattaccgtatggatatctttttctttctttttttaaagtgaggagattcttcagggggtcaggctgagaatgtaataagcctgacattggaacagatttctcccgtgtggtctagctggacccctccggcatttgccacactccctgccagtcctgacattgacttcctgaatgtgattaggtggtaatgagcaagaatttcctaggatgttgaaacatctgtatccaggcccccaatcaaatgctgctgaatattgtgaatgtttttactccgctcactttcccactgtgctttcctctaaccaaaatatacgtgtagccattaccaatgtacaactctcaatgcggagttgccgccacggtttaaaataaatctctgtgaaaacctttctgcaa

SEQ ID NO: 5040 - protein, 40 aa, Homo sapien [sequence omitted]

SEQ ID NO: 5041 - DNA, 1689 bp, Homo sapien
tttttattactatttcctgaagaatggtttttgttaacttgttactgtatcattaaaaagaccttctaatggttcagtacaataatctagaacttgatttatgtggctttttatagttatctgaatgcattccttttgccacatagaccatatggctagttctccaacttttttgcttatttttaataaaccttgctgttcaacaatcagagaaacctttagattttggatgattcttccagttgaggtagaaacatcttagataataggaaaggcaaatacaaagtcctaacattttcatagtagagtttacaagtaaaataacttatccatataggttatcttcgttgtgtagcaccagtataaatagtgatttcattaatcattgaatcagatgaagcagttataaatcactttttactttgtgctaagaattattgtaatttcaggacactttattatttcctctgagcagtttccattggaaggttgagtttcccttttttaagttctaatcatcactaaaggttaagataatcaaataggagttaaaataagttatgtttgatctttttcccttgaaaataatgctgaacttattgtctacattctgattattaggcagaaatgcacttgtttaaatcatagaagtaattcatttggaggatataattactcgattttctagtggtgtgaaatactttttaacaattgtgcttgtctgtaactgaaatgttatagaattttaacactatagggattatagagttatattagctctcctcaagagactgaagcacaatatttttcatgtaacaattcttatccaagtgctgctaatctgtcgtgcaaataatgaagctatttggttgcctatttagctattcacaaatcactgtaatctttgaaacaatcttgtcgttcatttgtattaatatttggatattgtgagttaatactttagaaaaaaatccatcaactcagccccgttagcaaaactgtttggattcatagtttttatatgtgttaacagtagaataaattttgaaggggctatttactaccaatgactaaggggaaaattatactgtcactatcatttgacttgaacatttgtggtattgtaaaagtcttgtcagttgtgttctaaattgcttaagccatacgttctcttaaacaggatgtttttttcttcctttccagcagcctttttcttctttgtctgttatggttaatactccatagattttagaaattgagaagttcttgaaacattttattttcttgagttcatcacttttgactcttgtatgagatgtgatttgtcataaaagatagccttccactacttcactaaatgaatttcagagtaaacactgtgattctgcagagcggattcagtaggctttccaatgttttctcctgctatacagtgcctaccaccttgagggcacttcagtactagaggatgaaaactgaaacgttgttttgatgtttattgaataacgagattagagaatatttgatttttgttgtcagtgtattaaagaaattttcacattgataaatgttctctaggaatgtgtctacattcatcaggtgtgaactcttgtacatgaattttgtaccttgaatccacatatatattaagtgtatcatcaatataaaaataaacattatttgcttaaa

SEQ ID NO: 5042 - protein, 22 aa, Homo sapien
FLLLFPEEWFLLTCYCIIKKTF

SEQ ID NO: 5043 - DNA, 1761 bp, Homo sapien
  Unsure 725-871: Unknown base
cccatctttgtcctttgaggagttttcagtggtgataatgggaatgattgtgctgtagtaaacctctttcctggctattttagctgtaattgaggtgagtctgagacaacaacagtattctgtgggtaattcccattggccttgggaccccaatctcaaaccttttcaatccaaacaaactttatcatgtgtaggaaaagaggaagggtgaagagtcctaaacttaagccatcccccattcacagatacacatggtggttaaatctgttttgccataggtatggtccacctgctaacagtcaaattcacgaaagtctcagtggcctaataaatagatctcttttttgttgcacagcctcactgcactcctggtccccagatttagggccttcctagtagcatttatagaggaataggagaggtgttgagtaaaactaagccttctcctagatagttatttaataagtaatttgctgaaagtaatggatcttcagtacctttaaagatttagttatttgaagagaggttctcatttcctagaaaagatatgagaaacccaaatagaaaattattagagatctttgagacactctatttacattccggacctaatctttttgaattgtcttatatgagtgagtactttgtggcagaagatctagacattttaataaaacattttaatacaaatatctagatattttagatacatatttaagtatctnnnnnnnnnnnnnnnnnnnnnnnnnnnnnnnnnnnnnnnnnnnnnnnnnnnnnnnnnnnnnnnnnnnnnnnnnnnnnnnnnnnnnnnnnnnnnnnnnnnnnnnnnnnnnnnnnnnnnnnnnnnnnnnnnnnnnnnnnnnnnnnnnnncagaccaccgtctgaaattgctgttcatgattggaaatcgaactggaaacccgaaggcaggagatgtatgctcccttgggatgtatggggaaatcacacagagctgttagtacttcagtcatgggatttgctctcatgctatgcatatgggcctcacaacttgtaaatgccactggaagatggcttatctaaggttccttattttgtggtctttcccccttagttctgcagtgagtggggcaaagcgtgtcactgaccttttgaatggaaaacactggaagccttagcgttcttaattcctgaaatgttcattttttcttctaagcaactgggcttcagaggagattagggcaggcaataacagtgttgacaccagggcaactgttttctcctgtttatgggtatttattcaacatctgctttctgctaagctccatggaaggcacagaggaaacacagcagagtccatgccttagagactttgtacctgatgaattgagtggtatcaggacaatgctatttaatgtttgatccatcccttctctaagcacatctcagatttctgtgctacctgatttaaccctttcagttcatagaacccagaaggataaggtgaaaagatagaccgggaaaagtaatgcaagtggccaagagtagcttccacttcaaagttcctcatgtgtgtgtgctaacattgtgacttctgttcagtcattgtcagtataaactgtacattggaatcatttgtagctttttaaaaaatgcctatgcctcaccctagacctaccacatcaaaatctcatggatagagtctcaagctaaaaagcctctatttgagccaggcttattggcacctgcctgtagtcccgtactcagaaggctgaagtgag

SEQ ID NO: 5044 - protein, 18 aa, Homo sapien
PSLSFEEFSVVIMGMIVL

SEQ ID NO: 5045 - DNA, 510 bp, Homo sapien
  Unsure 510: Unknown base
ctatcttaattcattttattctacaaaatgctactcaactgaaagtggaaatgctaacccccctcccccaaaaaaatcgcaagggaaagaagttttaatatgttctttcttccatagcagcaagctttttctaacaagctttctttagtgcaaatactgtaggcttgtattacatatagtaaaacaacaaaacaacaacaacaacaaaaaccaccaccagaaaggcttccaaacaaagctactcctcaattttcaaaactatacaaagattttgagcttgcggttctgcctggaaggtctatttaggagactctccaatgggaccatttcaccattacttaaaaaaaaaaaaaaaaaaaagtgcccagaaaggtaattaaattccccatagggccatatgaaccatatacaacttgtttgcctccagagtcttacagctgactttactccacgtcattaacatatctcaaatacagatgcacaaagcttattttctactatacaccaaan

SEQ ID NO: 5046 - DNA, 1915 bp, Homo sapien
  Unsure 987-1122: Unknown base
  Unsure 1289-1371: Unknown base
  Unsure 1406: Unknown base
  Unsure 1410: Unknown base
  Unsure 1437: Unknown base
tgtagttatgttttcactattgctgcttctatagagggcattgtgatagagagttacagatgaaacattaaatgccacagtgagtagaaataattactacaaaaagtaataaatatgattacttggtaatatcattctccatctaaaatactagtttcacctgtgagcagatttcagctcagtttatagttaaaaacaatgagggtaaaatgggattcatgctcagggaatgaatcagccatagttagagtgggaaattattattttcttcatttaaaggtagattttatgtttatttccctaaattgcataagataaaattgtctgtttaataaaaagacatttattaccattattaacagtcattttagagccaaatttaagaaaaggatattgaaagggtctttattggccttgtttgggtaactctatgctgttagatagaagagacttaggtaaataactttttatgtctgaggtgagtacacaatattggttcttggaaaaatagctgtttcttcataagatacccaagtgataattttttttcccctagactgtcaggcctatgagtaaatactaaatctattagctgtccccactcataaaccaaaccaaaccaatacaaacagatgaggagaggaaatgtagtaaaaatactggctgggtcttatgattgggatgagtgattttataagataatatggtgataattttattctaggattttatttttggcctaatataggaatgtttaaaaaaggcttttctatgaaaattagaaatttatacttgaaattaaaagtctagaagggggaggaccttaaagctaagctaccagtaagacaatgaataattcagaagagaacactattcttttactgactgagtgcccaagatgccaatttccatgaagtcttgatttatatatatgtacacatgttatgcacatacatgtttgttttctaacagttattttttaagccnnnnnnnnnnnnnnnnnnnnnnnnnnnnnnnnnnnnnnnnnnnnnnnnnnnnnnnnnnnnnnnnnnnnnnnnnnnnnnnnnnnnnnnnnnnnnnnnnnnnnnnnnnnnnnnnnnnnnnnnnnnnnnnnnnnnnnnnataatactaactaaagtagaaagtttaaaaagtagagattttagtcttttcactaatgtccttttactgttccaagacccagccttgcatttagctatcatgcctacgtcctgtcttccagtctgtgacagtgtatcataacaggggatacctgatgttgtaatgtnnnnnnnnnnnnnnnnnnnnnnnnnnnnnnnnnnnnnnnnnnnnnnnnnnnnnnnnnnnnnnnnnnnnnnnnnnnnnnnnnnngtaattattgaatatttgctggagatacccggagnctangcaaatgtcccgtttctgcttaaactnttgctcattttactacccattggcagatcttgcttgtggcagttactactgtggtgttctaatggtgattttctatttctctcaatccttctacatttattattggaattcttctgtaaggaagagttgtcagttctggatttatatttttaactataataagatattcaggataagtatagatttagaacttaaagatgttaaatcatgttaaaattattccaaataccaatatcaaagaaaactaagttggtaatctatctcagaaaatatatgaacttaagaaggaaaatagtatttatgatttgtagaattggttcaacttttgacttaatactgactttggactgaattcaaagttttcttgaaatttcacatctggactttttaaagtgtctacatttatattactttggggatcattttgtcaaagtcttgaataaagttacccagtcctggcatgataaacccaaaaaaa

SEQ ID NO: 5047 - protein, 101 aa, Homo sapien
  unsure 2: unknown amino acid
  unsure 3: unknown amino acid
  unsure 4: unknown amino acid
  unsure 5: unknown amino acid
  unsure 6: unknown amino acid
  unsure 7: unknown amino acid
  unsure 8: unknown amino acid
  unsure 9: unknown amino acid
  unsure 10: unknown amino acid
  unsure 11: unknown amino acid
  unsure 12: unknown amino acid
  unsure 13: unknown amino acid
  unsure 14: unknown amino acid
  unsure 15: unknown amino acid
  unsure 16: unknown amino acid
  unsure 17: unknown amino acid
  unsure 18: unknown amino acid
  unsure 19: unknown amino acid
  unsure 20: unknown amino acid
  unsure 21: unknown amino acid
  unsure 22: unknown amino acid
  unsure 23: unknown amino acid
  unsure 24: unknown amino acid
  unsure 25: unknown amino acid
  unsure 26: unknown amino acid
  unsure 27: unknown amino acid
  unsure 28: unknown amino acid
  unsure 29: unknown amino acid
  unsure 41: unknown amino acid
  unsure 42: unknown amino acid
MXXXXXXXXXXXXXXXXXXXXXXXXXXXXVIIEYLLEIPGXXANVPFLLKLLLILLPIGRSCLWQLLLWCSNGDFLFLSILLHLLLEFFCKEELSVLDLYF

SEQ ID NO: 5048 - DNA, 1351 bp, Homo sapien
  Unsure 657-902: Unknown base
gcaggaattctgtgtccatgtcctggatgtatttctgtatgttcctataactctggacaaatcattaaacctctctgggcagcattttcctcatccatgaaatgaatgtgttcaatttgatctcaaagatctttccaaaatattaaatgccattaatcatggaatagaccaaattattatatcacaggaacttgaatccagccagagaaaaattccctggacaattggataaacaaatgtgattgctaccttatggatacaacggacttttacatttctttttagcctttttagtcagttgagggtaactcaagcagagtatgtccaatcattagcttcctttgatatttacattacaggtaaaaacggccaaaaatatattttaaggtctctccccaaataattgtttttatttttaaactatcaatgttgtttaaaataatcatgtacttgttgagttcctgaggtttggaacaaattacacataaaatttagaatactttatttctgaaaagcatatacatatatgttatgtttatttttccttgttgattagaaaggtgatggaatatgtgacaatgcaaaatgaattgataatttttctgtattttgagtgaaagttgtctgtaatatgtcaagcaagaatgttataattcnnnnnnnnnnnnnnnnnnnnnnnnnnnnnnnnnnnnnnnnnnnnnnnnnnnnnnnnnnnnnnnnnnnnnnnnnnnnnnnnnnnnnnnnnnnnnnnnnnnnnnnnnnnnnnnnnnnnnnnnnnnnnnnnnnnnnnnnnnnnnnnnnnnnnnnnnnnnnnnnnnnnnnnnnnnnnnnnnnnnnnnnnnnnnnnnnnnnnnnnnnnnnnnnnnnnnnnnnnnnnnnnnnnnnnnnnnnnnnnnnnnnnnttcattgtgctacaatgtaacaatggctgtggcatcactaggtgataggaatttttcagttccattataatcttataggatctctgtcatatgtggtcaattgttgatcgaaacatgactgtatgtcgtattttcagaaaatggaataggtaatcatcacttgtgtgaattttaatcaaatgacttaggaaagaaactggatgtttcaaaagctgttgcatttattacaaatgtcacaaatacagctcttgccttttgagaatgttggagagatgtctttaaaaaatatgtttgtgtgtaaaaatgtgtctgtatgcaatagctagaaaaatgcctgtgtcttaagtcattactcatgttctaatttttgttctttgtactatttatctgtatgcttgttcttcagtatttcagactcaaaataaatttatttttttatgttaaaaaaa

SEQ ID NO: 5049 - protein, 96 aa, Homo sapien
  unsure 9: unknown amino acid
  unsure 10: unknown amino acid
  unsure 11: unknown amino acid
  unsure 12: unknown amino acid
  unsure 13: unknown amino acid
  unsure 14: unknown amino acid
  unsure 15: unknown amino acid
  unsure 16: unknown amino acid
  unsure 17: unknown amino acid
  unsure 18: unknown amino acid
  unsure 19: unknown amino acid
  unsure 20: unknown amino acid
  unsure 21: unknown amino acid
  unsure 22: unknown amino acid
  unsure 23: unknown amino acid
  unsure 24: unknown amino acid
  unsure 25: unknown amino acid
  unsure 26: unknown amino acid
  unsure 27: unknown amino acid
  unsure 28: unknown amino acid
  unsure 29: unknown amino acid
  unsure 30: unknown amino acid
  unsure 31: unknown amino acid
  unsure 32: unknown amino acid
  unsure 33: unknown amino acid
  unsure 34: unknown amino acid
  unsure 35: unknown amino acid
  unsure 36: unknown amino acid
  unsure 37: unknown amino acid
  unsure 38: unknown amino acid
  unsure 39: unknown amino acid
  unsure 40: unknown amino acid
  unsure 41: unknown amino acid
  unsure 42: unknown amino acid
  unsure 43: unknown amino acid
  unsure 44: unknown amino acid
  unsure 45: unknown amino acid
  unsure 46: unknown amino acid
  unsure 47: unknown amino acid
  unsure 48: unknown amino acid
  unsure 49: unknown amino acid
  unsure 50: unknown amino acid
  unsure 51: unknown amino acid
  unsure 52: unknown amino acid
  unsure 53: unknown amino acid
  unsure 54: unknown amino acid
  unsure 55: unknown amino acid
  unsure 56: unknown amino acid
  unsure 57: unknown amino acid
  unsure 58: unknown amino acid
  unsure 59: unknown amino acid
  unsure 60: unknown amino acid
  unsure 61: unknown amino acid
  unsure 62: unknown amino acid
  unsure 63: unknown amino acid
  unsure 64: unknown amino acid
  unsure 65: unknown amino acid
  unsure 66: unknown amino acid
  unsure 67: unknown amino acid
  unsure 68: unknown amino acid
  unsure 69: unknown amino acid
  unsure 70: unknown amino acid
  unsure 71: unknown amino acid
  unsure 72: unknown amino acid
  unsure 73: unknown amino acid
  unsure 74: unknown amino acid
  unsure 75: unknown amino acid
  unsure 76: unknown amino acid
  unsure 77: unknown amino acid
  unsure 78: unknown amino acid
  unsure 79: unknown amino acid
  unsure 80: unknown amino acid
  unsure 81: unknown amino acid
  unsure 82: unknown amino acid
  unsure 83: unknown amino acid
  unsure 84: unknown amino acid
  unsure 85: unknown amino acid
  unsure 86: unknown amino acid
  unsure 87: unknown amino acid
  unsure 88: unknown amino acid
  unsure 89: unknown amino acid
  unsure 90: unknown amino acid
  unsure 91: unknown amino acid
MSSKNVIIXXXXXXXXXXXXXXXXXXXXXXXXXXXXXXXXXXXXXXXXXXXXXXXXXXXXXXXXXXXXXXXXXXXXXXXXXXXXXXXXXXXHCATM

SEQ ID NO: 5050 - DNA, 3943 bp, Homo sapien
cgctaactcggctacggtgtatctgcgtctttggtcaggttgttccttggctaagagggcagtcgtcgcggacccacgcggttagcaaggcttagtgctcgggccggccgccttcacttccctcccggcttttcctcccgacttatccactttaggggcgtctcggagtgccggaggcccccggggaagagcggggtgccggtgtccgctccgggctcggatgggaagtggtgggaggagcgacccgggatgttcagtctgatggccatttgctgcggctggttcaagcggcggcgggagcctgtcagaaaggtgactcttttgatggtgggacttgataatgctggtaaaaccgcaacagcaaagggaatccaaggagaataccctgaagatgtagctcctactgttggattttcaaaaattaaccttagacaaggaaagtttgaagtcaccatctttgacttgggaggtggaataagaattcggggaatctggaagaattactatgctgaatcctatggggtaatatttgttgtggattccagtgatgaagagagaatggaagagacaaaagaggctatgtcagaaatgctaagacatcctaggatatcgggaaagcctatattggtgttggcaaataaacaagataaagaaggagctttaggagaagctgatgtcattgaatgtctatctctggaaaaattggtcaatgagcacaagtgcctgtgtcagatagaaccatgttcagcaatctcggggtatggaaagaaaattgacaagtccattaaaaaaggcctttattggctgctacatgttattgcaagagactttgatgccttaaatgaacgcatccaaaaagagacaacagagcagcgtgctcttgaggaacaagagaaacaagaaagagctgaacgagtgcgaaaattacgagaagaaagaaaacaaaatgaacaggagcaggctgaactcgatggaaccagtggtctggctgagttggacccagaaccaacgaatcctttccagccaatagcatctgtaatcattgagaatgaaggaaaacttgaaagagagaaaaaaaaccaaaaaatggagaaagacagtgatggctgccacctgaaacataaaatggagcatgagcaaatagagacacaaggccaggttaatcacaatggccaaaaaaataatgaatttggactagtagaaaattataaggaggcattaacacagcagttaaagaatgaagatgagacagaccggccatcattggaatcagctaatggtaaaaagaaaactaagaaactaagaatgaaaaggaaccaccgggtagaaccacttaatatagatgactgtgctcctgagagtccaacgccacccccaccccctcctcctgttggctggggaacccctaaagtcactagacttccaaaacttgagcctcttggtgaaacacatcataatgatttctataggaagccactgcctcccctggctgtgccacagcgacctaacagtgatgctcatgatgtgatctcataaacaagacgtatggaggagttctcttaatatcagcaaggtgaactgggacattcttctttctcagaagaagaaacatcttgtaaattgatgactggggcaagataaccataataattttagtgagaagattaatactcaaggacctgacttgataattacttatttgtgtttttcatggttaaaacaaaaaaagaagcacaatgaccagtacatgaaatcagcatttggaccaaattagcaagatttactgttgactctggtttatacatccccactcatgagcatacttctgaaggaaaactttacaaaaagagccaatggactcagcactttctttactatttgttcaatagcctatatttctagatattaaatattttttgtaagatatatgcacatagaagggggacttctaggaatttataaccaaaattttaaaactatttttatatttttttaaatctttaaaaattttaattactgtgatattgattatacaccttttttatagatgatttgtttaaattatatctggaaaatagagttgatttactttcagacatgaactatacaaacaggatatatttatatggcttgaggtatgttttgtaatagcgttgttctttaagtgtacatcgtaatttgacctaatttaaaaataatatattttcgaagtagtagattctcagatctttattctaacaattacatgatttgaaaacagtactcaatgagactggaaataccttttgtacctaaatgttttttaaattaatcaaaatacattctgtgagatactattaaaagtctcagtaaagtcctattttaaaggttagacactttcagagatcaaggtgctccctatactcccttgttccatcagaagctgcagtgactcttttaggtgattctaattctttcatgccttgaaattaaactatgaaattaaaggcagaaaaactggaaaacctactgcaggtccagagacttctgttttacaactgggaaacagcttgtgtactaaagtaatgagaataaaaatgttggcccaaaattacttttataaataaataattccaaaataatttcttaatttaaaatgatagcacttctcttgcacttaagaatggcatccataagattctgtatttggcatttagactaacttctagatgtatatttttaataatagattcataatgttacatttaattgaaaacaaacctttatatccaatgaaaatagtataaacagaatgatttttataccaccttgttaagattggtgcttttggtaacttgtactgacacaacagacatgtgctagtatctgataacattaagtacattttatgtcgtttaatataattatttactttaaaaattgtacttcagaacatcagattttattcacattttttaactcactgaactttaataatcaggtcacctgtactctagtcagcactgtatatattcttggagtttgtacatgggacttagcaaccacactgagtgaggtaaaagcatttgatttcagatctaaaattcgtaacaacctaaatttgagaggtggctgaaatgtgatgaaaagcaatacgaaaagacaatgtaaactttgaaaaggattttagagggaaaattgcatagctttttgtaacatttacttaattttaaaactaaactcatacttttgctatctttttaatatttatctcgtttgggagtatacgtgtttttaaaatttgtgttttctatctgtttactatagtgtagctactggcttcatttaataaaaataaatgattttgaaattaaatataatatagaattcacattttatatagctctctcaaaaattaatttttattccttaagcattttaaaaacattttaaaaaatgttttgtaaatccaggtgtattttaacaattaaatgcctattttgttatatgttatacttttattcttaattctgaattttgacattttcacacaataaaaataatttatatcaatattctgtttctcttttcaattggtagatttaaatgatttcctttgggtaataaaataggtaaagattttaaaatatgattattgaaaaacagtttaaatcagtagattaaaataatgcatttttttgatactttacacacaaaacttttttctctctgcaagtttttatgtatgtgggaaagaatttgtgattttaaatgcagctacaaatagcatttcaccatatgatgttagaggatttgatgtctgtcttgcgttaaagctgttggtcaacagatatgtttttatgtatttaaaagaggctcttgtgtgcctttatgtgtaaaatgcatattacgtagtatacatgatattgtatgtaactgacttcaaatataaaactatgcatag

SEQ ID NO: 5051 - protein, 511 aa, Homo sapien [sequence omitted]

SEQ ID NO: 5052 - DNA, 7484 bp, Homo sapien
tgctcacttctgacagccagacaagggctgtgctcaggggcagctcggctgggcacacagtaggtgctttagcggacagcactgaggcccccagcaagaagcccatgagctcctccccctcccgcagtgccgccgacatctacatccgggagtatttccacagccacgtcagcggcggccaccccgaggccactcctctccgtgtgatgtacacggaccggccgctgagccagacggacccagtcacgctgcagtactgttgcctgaccgacgaccgccaggctttccgcccgcccacacgggcagagctggcgcggcaccgcgtggtggtcaccaccacctcccaggcccgtgagctcagggtgccggtcggcttcttctcccacattctcatcgatgaggcggcccagatgctggagtgcgaggccctcaccccgctggcctacgcctcgcacggcacccgcctcgtgctggcgggcgaccacatgcaggtcacaccccggctgttcagtgtggccagggcccgggcggccgagcacacgctgctgcaccgcctcttcctgtgctaccagcaggagactcacgaggtggcgcggcagagccgcctggtcttccacgagaactaccgctgcacggacgccattgtcagcttcatctcgcggcacttctacgtggccaagggcaaccccatccacgccaggggcaaggttccgccccacccccggcactacccgctcatgttctgccacgtggcgggcaacccagaccgggacatgtccatggcgtcctggctgaatctggctgagattgcgcaggtcgtcgagaaggtgcaggaggcctacaacacctggcccagctgctggggcggccgtgagcagaggtgcatctgtgtcgtttcccacggtgcccaggtcagtgcactgaggcaggagctgaggaggcgggacctaggccaggtgtctgtcggcagttttgagatcctgccagggcggcagttccgggtcgtggtgctcagcactgtgcacacctgccagagcctgctcagccctggggcactggcccctgagttcttcaccgacgcccgcgtgctcaacaccgtcctgacccgcgcccagtcccagctggtggtagtgggggacgccgtggccctctgctccttcggggcctgcggcaagctctgggagagcttcatccgtgagtgcgtggagcggcacagtgtctgccccgagggcctgtccatggagcaggtcgagcagggtgtggcgcagagacggcgctggcctccccgaggcacacaggctggggcagcggggaactgggaggctgccccagagccagtaggggacctggccgaggagcaggcggctgtggtgacggccatggtgaaggcagagccgggagatgaggctctgagcccagcatcccgtgacatcacggcaaccacagcgcagacggaggctgcggcagcaccagcaggagacgcagtgaaggaagacgtggtgcccggggcctgtgcggcaggagcggctgctgcagcgggcgtggagtccacggaggctgaggatgcagaggctgacttctggccgtgggacggggagctcaacgctgacgacgccatcctacgggagcttctggacgagagccagaaggtgatggtgaccgtcggggaggacgggctgctggacaccgtcgccaggcccgagtccctgcagcaggcccggctgtacgagaacctgcccccggctgcgctacggaagctgctgcgcgcggagcccgagcggtaccgccactgctctttcgtgccagagaccttcgagcgggcgtcagccatcccgctggacgatgcctcctcgggccccatccaggtcaggggccgcctggactgtgggatggccttcgccggggatgaggtgctggtgcagctcctttcgggagacaaggcgcccgaggggcggcttcggggccgcgtgctgggcgtgctgaagaggaagaggcacgagctggcgtttgtgtgccgcatggacacgtgggacccgcgcatcatggtccccatcaatggctccgtgaccaagatcttcgtggccgagctgaaggacccatcgcaggtccccatctacagcctccggaagggccggctgcagcgtgtggggcttgagaggctcaccgccgaggcccggcacagccggctcttctgggtccaaattgtcctgtggcggcaaggcttctactacccgctgggcatcgtccgggaggtgctgcctgaggccagcacctgggagcagggcctccgcatcctcggcctggagtacagcttgagggtgcccccgtcggaccaggccaccatcaccaaggtgctgcagaaataccacacggagcttggccgggttgccggccgccgagaggactgccgcgccttcttgaccttcactgtggacccccagggcgcctgcaacctcgatgatgccctcagtgtccgagacctgggtcccaggtgcgaggtggctgtgcacatcactgatgtggccagcttcgtgcccagggacggggtgctggacgtggaggcgcgaaggcagggcgctgcgttctatgcccccggcagggagccagtgcccatgctgccggccagcctctgccaggacgtcctcagcctcctgcctggccgggaccgcctggccatctccctgttcctcaccatggagaaggccagtggccagctgaagagcctgcgctttgcaccctccgtggtccagtctgaccgccagctgtcctacgaggaggcggaggaggtgatcaggcagcacccgggtgccggccgtgagctgccggcccgcctggactccgtggacgcctgcgtcgtggccgcgtgctacttctctcggctgctgcgccggcaccgcctgcggtccgactgcttctatgagcagccggacgaggacggcaccctgggcttccgcgcggcccacatcatggtgaaggagtacatgattcagtttaataggctcgtggctgagttcctggtgggcagcgagtgcacgcggacggtcacgcctctgcggtggcagccagcaccccgcagccagcagctcaaggccctgtgtgagaagcatggggaccgggtgcccctgtcactgcacctcggccaccacctgcacggcggcgggggcagtccccccgacacgcggctgcacctcctggcctccctctggaagcaggtccagtttgctgcccgcacccaggactacgaacagatggtggacttggtcaccacggacgacatgcacccattcctggctcctgcaggccgcgacctccgcaaggccctggagcgctcggcgttcggccgctgcgcccggggccaccagcagcagggcggccactactcgctgcaggtggactggtacacgtgggccacctcgcccatccgcaggtacctggacgtggtgttgcagcggcagatcctgctggcgctgggccatgggggctctgcctactctgccagggacatcgatgggctctgccaggccttcagcctccagcacgcacttgcccagagctatcagcggcgggcgcgcagcctgcacctggccgtgcagctcaaggcccagcctctggacaagctgggcttcgtggtggacgtggaggcgggctcccgctgcttccggctgctcttccccagcaaccgggagacgctgcctgacccctgccccgtcccctacggctccctgcagctggccgagcacccccacgccctggcaggccggccgggcctgcggctcctgtggcggcgccgtgtctactcagcgcagggatccagcccgcccctgccactgcctggcactgtgccggacccacacaccctggccgtggagacggccctgtggaagcagctgctggagctggtggagctgcagcgctggccggaggcggctgctctcatccaggagaagggcgaggcgtcccagcggcgggagctggtgcaggtgcagcggagccactgtggccatttcctggaggtggcccgggagctgggcagtggggacaccctgcaggtgcagctcggcaccagcctgcagcacggcttcctggtaccgagccctcagctctggacggtggcaccgggcttcagcctctgcctggagcacgtggagcggcccggagactgcttctcaggccgtgtgtaccgggccccgagggaccggtaccgcgacgtggatgagtacgcctgcgtgtgggaaccattctgcgccctggagtcggccaccggcgcggttgccgagaatgactccgtcacacttcagcacctgagtgtctcctgggaggcgtcacggacgccgcaggggcagctgcagggcgccttccgcctggaggccgccttcctcgaggagaactgtgccgacatcaacttcagctgctgctacctctgcatccggctcgaggggctgctggctcccacggccagcccacgccccgggcccagcagcctcggccctggcctgaatgttgaccccggcacgtatacctgggtggcccacgggcagacggaggactgggaccaggagcgccgggcagaccggcaggaggctcccagacgggtgcacctcttcgtccaccacatgggcatggagaaggttccggaagaggtgctgaggccgggcaccctgttcaccgttgagctgctgcccaagcagcttcctgatctccgcaaggaggaagccgtgcgtggactagaggaggcgtccccgctggtcaccagcatcgcactgggccggcctgtcccgcagcccctctgcagagtgatccccagcaggttcctggagcggcagacctacaacatccccggaggccgccacaagctgaaccccagccagaacgtggcggtcagggaggctctggagaagcctttcacggtcattcagggcccaccaggtacagggaagacgatcgtgggcctccacatcgtattctggtttcataaatcaaaccaggagcaggtgcagcccggaggccccccccgtggggagaagcggctggggggtccctgcatcttgtactgcggcccctccaacaagtcggtggatgtcctggcaggactgctcctgagaaggatggagctgaagcccctccgtgtgtacagtgagcaggctgaggccagcgagttcccagtgccgcgtgtgggcagcaggaagctgctcaggaagagcccccgggaggggaggccgaaccagagcctcaggagcatcaccctgcaccaccggatccggcaggcccccaacccttactcgtcggaaatcaaggcctttgacacccggctgcagagaggggagctcttctccagggaggacctggtctggtacaagaaggtcttgtgggaggctcggaagttcgagctggaccggcatgaggtcatcctctgcacctgctcctgtgcagcctctgccagcctcaaaatcctggacgtgaggcagatccttgttgacgaggcaggcatggccacggaacctgaaaccctcatccccctggtgcagttcccacaggccgagaaggtggttcttctcggagaccacaagcagctgcggcctgtggtcaagaatgagcggctgcaaaacctgggtctggaccggtctctgttcgagcggtaccacgaggacgcacatatgctggacactcagtaccgcatgcatgagggcatctgtgccttcccctctgtggcgttctacaagagcaagctgaagacgtggcagggcctgaggaggccgcccagtgtcctgggccacgctggcaaggagagctgtcctgtcatctttggccacgtgcagggccacgagcggagcctgctggtgtccacggacgaagggaatgagaactccaaggccaacctggaggaggtggctgaggtggtccgtatcaccaagcagctgaccctggggaggaccgtagagccccaggacatcgccgtcctcacgccctacaacgcgcaggcctctgagatcagcaaggcccttcggcgagagggcatcgccggggtggccgtgtcctccatcaccaagagccaggggagcgagtggcgctatgtgctggtgagcaccgtccgcacctgtgccaagagcgacctggaccagcggcccaccaagagctggctcaagaagtttctgggcttcgttgtggaccccaaccaagtgaacgtggctgtcacgcgggcccaggaggggctctgcctgatcggagaccacctccttctgcgctgctgccccctctggcgtagcctcctggacttctgcgaggctcagcagaccctcgtgcctgccggccaggtgcgcgtctgcaggaggccaactatgccttcctgaagagccctctccacctgcaaggtgccaggactgggagggaaagtccagggcccccccaccctccccaccaccctccgccatcagcctgcctgggccagcctgcctcctggcctcaggatctccctggggcaggaagtgggtggacttggaggaggaacggcaagggccggtccccacactcttgcttctcctgggcatctggggacaggaacacctctcagggtggccaagaggggcttccttgggaccagtgtaaggaagttctgctgtccctgggaagtctcagaaccaggaaggaaaccctgtggaggctgccctttgacctttggacgccacctgtaatcactctggatggtgtctgtggagttcaggtttattttctatttaaatgaactaaaagccagcatcctgccgggcgtggtggctcacgcccataatccagcactttgggaagccgaggcgggcagatcacctgaggtcaggagttcgagaccatcctggccaacatggtgaaaccccgtctccactaaaaatacaaaattagctgggcgtggtggcgggcgcctgtaatcccagctacttgggaggctgaggcaggagaatcgcttgactccaggaggcgcaggctgcagtgagctctgatggtaccactgcactccagcctgggtgacagagcgagaccctgtcttaaaaaaaaaaaaacaaaacaaaaccagcatctgttactggaacagagacctcagcccaagctcaggacaaggaggcctccctgggagagggggcctttctcccaccatcaccgcctgtgtccttcaggggctgctggagggcagcccaaagccaggggcccaccccgccccaccccaccccaccccaccctctgaaatgtgaaaagcctgcactcttcctgtgggctgcgcagtgggctcgggggttggggggtgccggggcgatgcttccaccctggactgagtgttcggggcagcctgctcggctgtatgtttctcgcacgctcacccgcttcagtgcggctctgtccctgctgccgcctccagtcctgagggaggggcttgccccaccttctacattccaatttttatatctttgaattatgtgattagatattaatttaatgat

SEQ ID NO: 5053 - DNA, 3120 bp, Homo sapien
aatattttggttataatcataagaagaatccttacaatttaaaatattttcacttttattttgaaaaagagccaactttctcaaaggaagctgtcattaacttctgttgtttggttagctaataaattctgttagtatgcaagttaaacctgtgtaaaggaggttataatgtggtaaggtataattttccaatatgagacaatggcttaaatttgcctttggagatggagaatattttcaacatacataattttaacaaatagttttgttgctttttgttaagcttaaaaaaaaatttggatcagaaattataggattgagctggtaccaaaagaatcctaaagtacagaatggttttccaaaagagcagacatttcaatgaaaataaaaccccaaaacattttttttatatatcatgattgcatgcttttaaaataaggaggcttatcattgaattttagttccataaaaatgaaaatacatgtttattatttagaaatggttagtgactggtattgaagtattattcacacttatgtttgtaataatttatttaaagaatgccaacagtttagcacacttttgtaatctctagaacagttctatacattaaaaataaacattaaaaataaagcagttcctttaaacaacttactatgaaactataattgttaatgaaataagatattcctatgtatacattagtatgatttaagggtatgaaaaacagtgctaaaatgtggagttaattggaatgtgtgcagctgcatactcactttctgtgtttttatatttccttacctagttttaaaaatcatcacttttcggcacttcagctagacttatttcaatattataattatgattaatgaaggagcagtcagaagtagaggtgtggtattccgtgggcagaagtcaaatgaaaaaagctatattgtttacttgtttactatatcaatgttaatattatgccttattttgataaatcaaatagtatatcttaatcattgttgataaatatacaggcaaagtttgagcatcatatgtatttttatgaagctgcttaattccaaattgcctcccaccccactatctagcatagtttaagcaacacataattttgaaagaaaagtttgtaatccctcctttcttttttttgcccatttctaaatcctgtatgcccgcagtaaagatagtttggggattttaaaagttttctctattacccatttctaaatcctgtatgtcaaagatagtttggagattataaaaattttcatgtattggtgtaggttgagtatccctaatgagaaaattcaaaatctgaaatgcttcaaaatctgaaatttttcgagcacagacatgatgctcaaaggaaatactcacagagcattttacatttgtaggttagcgatactcaacaagtaaatataatgcacatgttctaaaatatccccccaaaccccagcaatccaaaacacttctggtcctaagcattttgagtaggggatactcactcaacctgtatatttgtgctaatacatgactcattagaatgattctttgtaaacttaatattttaaaagtacagcacttctgtagtatggaaggtttcagtaataattatattcattcagtagtctcttaccattatctcccagatggaaaaagaggactaatgtggaaaccccagagggtgtccagttggaccagggagatattagacacttaacagtattttcagtctgtccatctctttattccaatgtgagaaatggaagtgtttttttttttacgtttattggctcttcatatttctctacattatttttaatgtgcagtttcttcaattggttagtatttccatactatttgcaactttatggcctttaaatataggacatattatatagcagaaattttgactttaaatcctcttgagtagtatattttgagaagaaaagctatactgctcttctggatggtttccatcctttatttaggtcttttctttttgaattcaagtgttttgtatgcttagaaagtagacatgtataatattgagatcggttatttctgagctggaaattggaaactttggaaactcaggaaattgctctgacaatgttttaactgctctcaatttaagaaaatgacgaaatgtataaaaaagacaaaaataacgtgtgctgttttttccaagtgctttttctaagtgcttttccattgtgcaatgaggtgaagtttggtaatttttcggtgtagtagttaaatattgctcaatttttatttacatgtaaagaaaacagatttaaatgtttatgtggccaaaaggtgtcatttaaaaggtaaaataagtttatgtagaatgtatgttcatggtgcttatttttaaaatgtaattcaagtttacagtattacttaatgcttctttacagaatttaatagagaaacaaggctagaacacatctacatcctgaagagccgtttataacttcatattatatgatgacaaagttcattattttccttaaagttgagcaattgacttttatggtccaatgatgaacttattattaataaatgattgagttaactgtgaggcttctcattaaaatacaatattgcagctatcagttggagaatatattataaaattttcagacagtatatcagaaaaatgtttttatttgtactgtatagaaaatgtaattttgctgttaactctgtactttttaaattgaaaatgttttataaatttgcttttaaattttcttatgaagccatttgcaaattacatacttaatttaataaaatactttagccacaaaaaaattacattttctatacagtacaaataaaaacatttttctgatatactgcctgaaaattttataatatattctccaactgatagctgcaatattgtattttaatgagaagcctcacagttaactcaatcatttattaataataagttcatcattggaccataaaagtcaattgctcaactttaaggaaaataatgaactttgtcatcatataatatgaagttataaacggctcttcaggatgtagatgtgttctagccttgtttctctattaaattctgtgtcgacg

SEQ ID NO: 5054 - protein, 39 aa, Homo sapien
YFGYNHKKNPYNLKYFHFYFEKEPTFSKEAVINFCCLVS

SEQ ID NO: 5055 - DNA, 1973 bp, Homo sapien; identical to SEQ ID NO: 2268

SEQ ID NO: 5056 - protein, 203 aa, Homo sapien; identical to SEQ ID NO: 2269

SEQ ID NO: 5057 - DNA, 2616 bp, Homo sapien
  Unsure 2080: Unknown base
  Unsure 2156: Unknown base
  Unsure 2215: Unknown base
  Unsure 2270: Unknown base
ctttatggcgtgggagaggccacagcccggactccatcgactcccccggctcttagactaaaatcatgcccaagttcaaacaacgaagacgaaagctaaaagccaaagccgaaagattattcaaaaaaaaagaagcctctcactttcagtccaagctaattacacctcctcctccaccaccctcaccagaaagagtcggtatttcttcaatagatatatctcaaagcagaagctggctaacatcatcctggaacttcaattttcctaacatcagagatgcaataaaactttggacaaatagagtatggtctatatacagctggtgccagaactgcataacccagagtttagaagtattgaaagacaccatctttccatctcgtatctgccaccgagaactttacagtgtaaaacaacagttttgcattttggaaagtaaattatgcaagcttcaggaagcactgaagaccatctcagaaagttcttcctgtccaagctgtggtcaaacatgtcacatgagtggtaaacttacaaatgtgcctgcctgcgttctgatcacccctggagactccaaagctgtgcttcctcccacactgccacagccagccagccattttcctcctcctcctccacctccacctctgccacctcctccaccaccactagcacctgtgttgctcagaaaacccagtctcgctaaagcacttcaggctggaccattaaaaaaagatggacccatgcagataacagttaaagatctgctgactgtaaaattaaagaagacacagagtttagatgaaaagaggaagcttataccatcgccgaaagcacggaatccactagttaccgtctctgacttgcagcatgttaccctgaaacctaactccaaagtgttatcgactcgagttacaaacgtcttaatcactcctggaaaaagtcagatggatctgcggaaactgcttagaaaagtcgatgtagagaggaggccaggtggaacccctcttaccaataaggaaaatatggaaacaggaacaggactgactccagtgatgacgcaggccttaaggagaaagtttcagctggctcaccctagaagcccaactccaactctgccactttctacaagcagctttgatgaacaaaactgatgccaactctgcctcactccatgagatgatccataacaaatacagataaaaacacccagctgggtgcagtggctcgcacctgtaatcccagcactttgggaggctgaggcaggtggatcacctgaggtcgggagtttgagaccagcctggccaacatggtgaaatcccatctctactgaaaatacagaattggccgggtgtggtgtcacgcgcctgtggtcccagttacttgaacctgggaggcggaggttgcagtgagccgagattgcaacactgccactccagcctgggtgacagagcaagagaccctgtctcaaaaaaaaaaaaaaaaaaattaaatgggtagtgacgttaagagatatatatcagcttctagtaaaagtttttttttttaaacctgctagctacatttacattatgtaaaaataaatggaataatcactgagaataaagcagttgagtatttataacaataatattttatggggcgcttataatgtttataatattgtaaaccactgtgtactctattcatttaatgctaaatgacttgaccattcttgtgggataagagatcattaaaaaaatgctagggccgggcaccatggctcacgcctgtaatcccaggactttaggaggccaaggcaggtggatgacttgagctcaggagtttgagaccagcctgggcaacatgatgaaaactccgtctctaccaaaaatcaaaaaaattagccaggtgtgatgttgtgcgcctgtagtcccagctacttgtgaggctgaggtgggaggatggtttgggccccggaggtagaggttgcagtgagctgagattgtgccactgtattccatcctgggcaacagagccagaccctgcctcaaaaaaaaaaaaaaaaaaaaaaaggcctggctttgctacataatgaggccaggcnaaaaaaaaaaagtcctgtggaaatcatatagacaaacatttgcaaagctgctactgccattgtaccagtgttaaantgtgttctaccttgcatcttttactgatttttatgacagattttatattgtaaccattngagaactctgtaagtgctatggcttccttaaactacgatttatcatatgctcccngtgtttactttgagactgaatggcaaccagagaatgtaaacaaccaaggtgcatctggttatgtttgcacagtggctcacgcctgtaatcccagcactttgggaggctgaggcgggcaaaacacttgaggtcagacgtttgagaccagcctggccaacatggtgaaaccccgtctctaccaaaaataaaaataaaaattatccaggcgtggtggcatgtgcctatagccccagctactcaggaagctagagcacgagaattatgtgcatcctggaggtgaaggttgcagtgagccaagatcacaccactccactccagtctggacaacagagtgagaccctgtgtc

SEQ ID NO: 5058 - protein, 360 aa, Homo sapien
MPKFKQRRRKLKAKAERLFKKKEASHFQSKLITPPPPPPSPERVGISSIDISQSRSWLTSSWNFNFPNIRDAIKLWTNRVWSIYSWCQNCITQSLEVLKDTIFPSRICHRELYSVKQQFCILESKLCKLQEALKTISESSSCPSCGQTCHMSGKLTNVPACVLITPGDSKAVLPPTLPQPASHFPPPPPPPPLPPPPPPLAPVLLRKPSLAKALQAGPLKKDGPMQITVKDLLTVKLKKTQSLDEKRKLIPSPKARNPLVTVSDLQHVTLKPNSKVLSTRVTNVLITPGKSQMDLRKLLRKVDVERRPGGTPLTNKENMETGTGLTPVMTQALRRKFQLAHPRSPTPTLPLSTSSFDEQN

SEQ ID NO: 5059 - DNA, 1292 bp, Homo sapien
ggacgtgactgggaggagcctgcccgccccggctcgctgcgccgcgcgcacagggcccgcgccagcgaccatggcggagcccacagtgtgctccttcctcaccaaggtgctgtgcgcccacggcggccgcatgttcctgaaggacctgcgcggccacgtggagctgtcggaggccaggctccgggacgtgctgcagcgcgccgggcccgagcgtttcctgctgcaggaggtggagacgcaggagggcctcggggacgcggaggccgaggcggcggccggcgcggtgggcggtggcggcacctccgcctggagggtggtggccgtgtccgggactataggtgcatgccaccatactcagctaatctttttaggtttttagtagagacaaggtctcactatgttgcccaggctggtcttgaactcctaagctcaagcagtcctcccgccttggcctctgaatgtgctgggattacaggcatgagccactatgcctaaccatattttttccaatattaaaaaatctttttttccccctaaggaatgtgttatataaggtcaacatgtttttagtgcttcagtttgacttgtctacatctaaagttaactctttaaggcttacatttatgattataattctttccatcgagggatttagtctccattattgtcatgtttcttgatttttttcattatacttggttcttctttttgtctaggttttatatataccttaattaattctttcttggctgttttatatctatgttgctgtcagcatgggaatctctattattagaaagctattaacttttaaaatatgtatcttttggtgattttctttgttctaacagttttagatggcctgtttgctctttctaaatataaaatcataggtatttctattttgtttttgtgtttcataaaattgtaataagtttttttgatattttttcattacatatgaagttaattgttggttttaaacaaatgttctttgttaggataacagaaataacatcttctattcttgtttgttggaagctaaaagcttgataaaaggaattggtgtcttttgatacaatcaaatttttatcacttaaattgcctaatatgattataataagggtttttgtaatattaaaacatccttaaattcctgagataaaactctacctggttatagtatatgttcttttaatgtattatctttcctatttgctgtacatctatacattcataaataaaattcatttatattttagaaaaaaaaaaaaaaaaaaaaaaaaaaaaaa

SEQ ID NO: 5060 - protein, 102 aa, Homo sapien
MAEPTVCSFLTKVLCAHGGRMFLKDLRGHVELSEARLRDVLQRAGPERFLLQEVETQEGLGDAEAEAAAGAVGGGGTSAWRVVAVSGTIGACHHTQLIFLGF

SEQ ID NO: 5061 - DNA, 2392 bp, Homo sapien
  Unsure 2362: Unknown base
  Unsure 2375: Unknown base
  Unsure 2384: Unknown base
  Unsure 2386-2388: Unknown base
gctgagtgcagttcacagcagtcatcatgaaattggagttaatgactctaatttattctctttggaaatgcgagagccccttgagtcaagtaatacaaaatccttccacagtgcagtggaaattaaaaataggtcccagcatgagctaccatgttttcagcatcatggtatagataccccaactagccttcagaagagatctgcatgtgtccaccttcgttactcagacttgaagagacagccagcagttcccaggatggtgaccctcaaattgggatgatctgccattctctgaaagcctgaacaagtttctggcagttcttgaaagtgagattgctgtaacccaggcagatgtcagtagtaggaaacatcatgtagataatgacattgataaatttcatgcagaccacagcaggttatctgtgactccccagagaactactggagccctgcatacaccacctatagctttaagatcatcacaagtaatagtcaaagcaaactgtagcaaagatgacttccttttcaactgtaaaggaaatctaagtcctagtgttgaaaaggagtcacaaccagataacaaagtagaggctgtctctgtaaatcataatggaagagatatgtcagaatattttttaccgaatccttacctgtcagctctgtcttcatcttcaaaagatttagaaacaatagttactcttaagaagactatcagaatctcaccacacagggagagtgaccattctagtctaaataacaaatatttgaatggatgtggagaaatatcagtttcagaaatgaatgaaaagttgacaactctgtgttataggaagtataatgatgtctctgatctttgcaaattagaaaataaacaatattgtaggtggtccaagaaccaagatgacagttttacaatttgcaggaaacttacatatcctttagaaactctttgcaatagtccaaatagaagtacaaatacattgaaagaaatgccttggggacatatcaataacaacgtaacacagagctattctattggttatgaaggtagctatgatgcctctgctgatctctttgatgatattgctaaagaaatggacattgcaactgagattaccaaaaaatcacaggatattttgttaaaatggggaacatctttggcagaaagtcacccttcagagtctgatttttcactgagatcactttctgaagacttcatccagccttcacaaaaattatccttgcaaagcctatctgactctaggcattcaagaacatgctctccaacacctcattttcaatcagattcagaatataattttgaaaatagtcaagactttgttccatgttcacagtcaactccaatttcagggttccaccaaacaagaattcatgggataaacagagctttcaaaaaacctgtattttattcagatcttgatggtaactatgaaaaaataaggattttccctgaaaatgacaaacagcaagccagcccaagctgtccaaaaaatataaaaacacctagccagaaaatcagaagccctattgtatctggtgtttcacaaccagacgttttcaatcactacccttttgctgagtgccatgaaactgatagtgatgaatgggtccctcctaccacacaaaaaatatttccttcagatatgcttggattccaaggcataggtctagggaaatgccttgctgcctatcatttccctgatcaacaagagttaccaagaaagaaactgaaacatattagacaaggaaccaataaaggtttaattaagaagaaattaaagaatatgcttgcagcagttgttacgaaaaagaaaactcataaatataactgtaaaagttcaggctggatttccaaatgtccagacattcaagtcttagcagcacctcagctgcaccctattcttggacctgattcttgttcagaagtcaaatgttgccttccattttcagaaaaaggcccaccttcagtgtgtgaaactcgaagtgcttggtcacctgaattgttttcataaaaagtcacctgaacccaattcctgaacttttaaatctgtttggaaatgtttgccttcaggggtacggaaagcattctttacattttgaacacttggagagaagcaaattgaaaacaggactctgctgggagctactgtgccttttaaaatataaagccattgttttccccagggttttatctagaatactatgattaggtagttgagcactttatcttatactgtttattgtactttaataatattgttaagattgtttttgaaagtattaatgtttgttaaaatcacatatacatccagaaataaagactttgcaaaccaaaaaaaanaaaaatggaaaangaaaaaaanannngaaa

SEQ ID NO: 5062 - protein, 676 aa, Homo sapien
LSAVHSSHHEIGVNDSNLFSLEMREPLESSNTKSFHSAVEIKNRSQHELPCFQHHGIDTPTSLQKRSACVHLRYSDLKRQPAVPRMVPSNWDDLPFSESLNKFLAVLESEIAVTQADVSSRKHHVDNDIDKFHADHSRLSVTPQRTTGALHTPPIALRSSQVIVKANCSKDDFLFNCKGNLSPSVEKESQPDNKVEAVSVNHNGRDMSEYFLPNPYLSALSSSSKDLETIVTLKKTIRISPHRESDHSSLNNKYLNGCGEISVSEMNEKLTTLCYRKYNDVSDLCKLENKQYCRWSKNQDDSFTICRKLTYPLETLCNSPNRSTNTLKEMPWGHINNNVTQSYSIGYEGSYDASADLFDDIAKEMDIATEITKKSQDILLKWGTSLAESHPSESDFSLRSLSEDFIQPSQKLSLQSLSDSRHSRTCSPTPHFQSDSEYNFENSQDFVPCSQSTPISGFHQTRIHGINRAFKKPVFYSDLDGNYEKIRIFPENDKQQASPSCPKNIKTPSQKIRSPIVSGVSQPDVFNHYPFAECHETDSDEWVPPTTQKIFPSDMLGFQGIGLGKCLAAYHFPDQQELPRKKLKHIRQGTNKGLIKKKLKNMLAAVVTKKKTHKYNCKSSGWISKCPDIQVLAAPQLHPILGPDSCSEVKCCLPFSEKGPPSVCETRSAWSPELFS

SEQ ID NO: 5063 - DNA, 5584 bp, Homo sapien
gtcccatactgttttcattgactaccaagaaaaggaaagaacagacagacctaactttgaactatcccaaaggaaaagcctaggaacaccaacagtgatatgtactcctactgaggagagtgttttctttccaggaaatggtgaaagtgaccgtctagtagcaaatgacagccagctaacccctctggaggaatggtctaataataggggccctgtagaggtagctgataacatggaattgtctaaatcagccacttgcaaaaacatcaaagatgtacaaagtcctggatttctgaatgaacctctatcaagcaaaagtcagagaagaaaaagccttaagctaaaaaatgacaagaccattgtattttcagagaatcataaaaatgatatggatattacccagagttgtatggtggaaatagataacgaaagtgccctggaggataaagaggacttccatttggcaggggcttctaaaactattttgtattcatgtgggcaggatgacatggagatcactaggagtcacacaactgccttagaatgtaaaactctcctgccaaacgaaatagctattaggcccatggacaaaaccgtattgttcacagataattacagtgatctggaagtcaccgattcccatactgttttcattgactgtcaagccacagagaaaatacttgaagaaaaccctaaatttggaataggaaaaggaaaaaacttgggtgtttcctttcctaaggataatagctgtgttcaagaaatcgctgaaaaacaagcactggctgtaggaaacaaaatagttcttcacaccgagcaaaagcaacaactctttgctgctactaatagaactactaatgaaatcatcaaatttcatagtgctgctatggatgaaaaggtcatagggaaagttgtagaccaggcctgtacattggaaaaagcgcaagttgaaagctgtcagttaaataatagagatagaagaaatgtggactttacaagtagtcatgcaactgctgtttgtggatccagtgataattattcctgtttaccaaatgttatttcctgtactgataatttggagggtagtgccatgctcttatgtgataaagatgaggaaaaagccaattattgcccagtgcaaaatgatcttgcttatgcaaatgattttgccagtgaatattacttggaatctgagggacagcctctctctgctccttgtcctttgttagagaaggaagaagttattcaaaccagtaccaaaggacagttagactgtgttataacactgcacaaagatcaagatctgattaaggatccacgaaatctattggctaatcaaactttagtatatagtcaagatctgggggagatgactaaacttaattcaaagcgagtatcttttaagcttccaaaggatcaaatgaaagtctatgttgatgacatttatgttattcctcagcctcatttctcaaccgaccaacctccattacctaaaaaaggacagagtagtatcaataaagaagaagtaatactgtctaaagctggaaataagagtttaaatattatagaaaattcctctgcacccatatgtgaaaacaagcccaaaatactcaatagtgaggaatggtttgctgcagcctgtaaaaaagaactgaaggaaaatattcaaacaactaactataatacagctctagatttccacagtaactcagacgtaactaagcaagtcattcaaactcatgtcaatgctggagaagcaccagatcctgtaattacatctaatgttccatgttttcatagtatcaaaccaaatctgaataatttgaatggaaaaactggagagtttttagcctttcaaactgttcatctaccaccccttccagagcaattacttgaattaggaaataaggcacacaatgatatgcatatagtgcaagctacagaaatacataatattaacataatctccagcaatgctaaagatagtagagatgaggaaaataaaaagtctcataatggagctgaaaccacctctctaccgccaaagacagtttttaaagataaagtaaggagatgttctttgggaatctttttgcctagattgcccaacaagagaaattgtagtgtcactggtattgatgacctggaacagattccagcagacacaactgatataaatcacttagaaactcagccggtctctagcaaagattcaggcattggatctgttgcaggtaaactgaacctaagtccttctcaatatataaatgaggaaaatcttcctgtatatcctgatgagatcaattcttcagactctattaacatagaaactgaggaaaaggccttgattgagacataccaaaaagagatttcaccatatgaaaataaaatgggaaaaacttgcaatagccaaaaaagaacgtgggtacaagaagaagaagatattcataaggagaaaaaaatcagaaaaaatgagattaagtttagtgatacgacacaagatcgggagatttttgatcaccatactgaagaggatatagataaaagtgctaacagtgtattgataaaaaacctgagcaggaccccatctagttgcagcagctctctggattcaatcaaggctgatgggacctctctggacttcagcacttaccgcagtagtcaaatggaatcacagtttctcagagatactatttgtgaagagagcttgagggagaaactccaagatgggagaataacaataagggagttctttatacttctccaggtccacatcttgatacagaaaccccgacagagcaatctcccaggcaattttactgtaaacacaccacctactccagaagacctgatgttaagtcaatatgtttaccgacccaagatacagatttatagagaagattgtgaggctcgtcgccaaaagattgaagaattaaagctttctgcatcgaaccaagataagctgttggttgatataaataagaacctgtgggaaaaaatgagacactgctctgacaaagagctgaaggcctttggaatttatcttaacaaaataaagtcatgttttaccaagatgactaaagtcttcactcaccaaggaaaagtggctctgtatggcaagctggtgcagtcagctcagaatgagagggagaaacttcaaataaagatagatgagatggataaaatacttaagaagatcgataactgcctcactgagatggaaacagaaactaagaatttggaggatgaagagaaaaacaatcctgtggaagaatgggattctgaaatgagagctgcagaaaaagaattggaacagctgaaaactgaagaagaggagcttcaaagaaatctcttagaactggaggtacaaaaagagcagacccttgctcaaatagactttatgcaaaaacaaagaaatagaactgaagagctactggatcagttgagcttgtctgagtgggatgtcgttgagtggagtgatgatcaagctgtattcacctttgtttatgacacgatacaactcaccatcacctttgaagagtcagttgttggtttccctttcctggacaagcgttataggaagattgttgatgtcaattttcaatctctgttagatgaggatcaagctcctccttcctcccttttagttcataagcttattttccagtacgttgaagaaaaggaatcctggaagaagacatgtacaacccagcatcagttacccaagatgcttgaagaattctcactggtagtgcaccattgcagactccttggagaggagattgagtatttaaagagatggggaccaaattataacctaatgaacatagatattaataataatgaattgagacttttattctctagctccgcagcatttgcaaagtttgaaataactttgtttctctcagcctattatccatctgtaccattaccttccaccattcagaatcacgttgggaacactagccaagatgatattgctaccattctatctaaagtgccactggagaacaactacctgaagaatgtagtcaagcaaatttaccaagatctgtttcaggactgccatttctaccactagacccttggaccaccattggaacaaccaagcagaatgtacttgatattatttcagggtcccattgctgttcagcctttgtttttacgtcattacaagctgagtaaaattccttctgatgatgttatagttaatctgtatgttttttatatctctgcagaatgatggtgatgaagtctggatggtaggcctcatagcctactatcaacttactcatctttgtaccaaaggtttaagtaataggacacttaggaaaaatgtctcctaactaaactagtgctttctgctttagtacaagccctaaggattaacttaagtataagaagtgttatcactgacaagaacattagccattttcccataactagatagagctatgattttttaggttgcctggcttctgcctagcagatatttctggagtagaaatgtatctgtctacaaactattatcctttttctccgttactaaaatgctattaagagaaagtagggctgggtgtgagccaccacacccagcaatgttttcttaataagtatagtttttctagggaaagttaattcatttttgtctagtacatatatgtaaatatattaatgttgtttttgtgtttgtgatgtagtaaggagatgtacatagaaattcattgaggtatatagatactcatctgtctaggcagttcccaattttctgaagaatgttttacagcaaaattttctattttcttttattaaatagtgacacgtcaaacaatgtcacatccaaaacactagtttcatcaatttctagcagtaataatagacttgctgtaagtattgttttctgatgccatacccttgtcatacatattattaaatgaccaatattatgtatgaagtagacaaaaaaatttactcaaacttcattcaaatcctaattgtgataatttttgttttatatttaattataaaccaaaatacatttgcatttttaagctaatttgtctcaaaattttgctttatatttttggatcaggttaaagtcctgtggatcccctgaatgttattgtccctcttgattggtttttacttctgagctatacgtcaaaagacacataagcttcaaaagtcaagacaaacctcatttgccataaaaatcaagatatagatgttctgttccgtaaactccttgaaaaacattttaaagtcatcaatatgatctgtttcccatgaaacttaagttagctttcttattggagttatttcttttctgtaagtctgaaaagtagagattttgttttacgcattttagtaacctgcaacaaccaactctaaaaaagatttggcttgtaatgacggtctctgcttttttgggtttggagtacacaattgtaatatttacttagttatttgtgtttttctttgttcaaggtattgactagtttcataaattttttgcaagtttttctttcattggttggaaagcagattacattttgcactattaaaataagtttattacttt

SEQ ID NO: 5064 - DNA, 2194 bp, Homo sapien
ggaagtgcttttgaatgaggtactgagggccaaggtgttggaagttcctaattctttcctcggttaactgtgaaactctgcgtattgggaaggcctggcctcagtcatcaggccaggagaggtactggacgccgcgcacgcactcgtctgccagcgaggcccaaaggggaagcctagcggagctcagtgtggcagctgctggcctctgggccgctacttgtcaataccatgctttcctgtaatatttgtggtgaaacagtaacctcagaaccagacatgaaagctcacctaattgttcacatggaaagtgaaattatatgtccattttgcaagttgtcaggtgtgaattatgatgaaatgtgttttcatatcgaaacagctcattttgagcagaatacacttgaaagaaactttgagaggataaatacagtacaatatggaacttcagataacaagaaagacaacaccctacagtgtggaatggaagttaattcaagtattctttcaggttgtgcatctaatcatccaaaaaattcagctcaaaacctgactaaagatagtactttaaaacatgaaggcttctattcagagaacttaactgaatctagaaaattcctgaaaagtagggaaaaacagtccagcctgaccgaaataaaaggatctgtttatgaaacaacatacagtcctcctgaatgtccattctgtggaaaaatagaggagcacagtgaagatatggaaactcatgtgaaaacaaagcatgccaatcttttagacattccattggaagactgtgatcaaccactctatgattgtcctatgtgtgggctcatatgtacaaattaccatattcttcaggaacatgttgacttgcatttggaagaaaacagctttcagcaaggcatggatagagtccagtgttctggtgatctacaattggctcaccagcttcagcaagaagaagacagaaagaggagatctgaagaatcaagacaagaaatagaagaatttcagaagctgcagagacaatatggtttagataattctggaggatacaaacaacaacaactacgaaatatggagatagaagtaaataggggaagaatgcctccatctgaatttcataggagaaaagctgatatgatggaatcattagctcttggttttgacgatggaaaaacaaaaacttccggaattattgaagcacttcataggtattatcagaatgctgccacagatgtgagacgggtgtggctttcttcagtggtggatcactttcattcatctttaggcgacaaaggttggggttgtggttacagaaatttccaaatgctactttcatcattattacaaaatgatgcttacaacgattgcttaaaaggtatgttgattccttgcattccaaaaattcaatctatgattgaagatgcatggaaggaaggttttgatcctcagggggcctctcaacttaataacaggttacagggaacaaaggcctggattggagcatgtgaagtatatatactcctgacctccctaagggtaaagtgtcatattgttgattttcacaaatcaactggtcctttgggtacacaccctcgcttatttgaatggatattgaactattattcttcagagggagaagggagtccaaaggtagtgtgtacatctaaacctcctatctatcttcagcatcaaggtcacagtcgaactgttattggaattgaagagaaaaaaaaccgaacattatgcttactaatacttgatcctggatgtccttctcgagaaatgcagaaattattaaagcaagacatagaggctagcagtctcaagcaacttcggaaatctatgggaaatttaaaacataagcaataccagatattggcagtagagggtgctctttctctagaggagaaacttgccaggagacaagcttctcaagtctttacagccgagaagattccttgaagaatcaagcatttaagcatttcagtgattgagaacaatactttgttttctaaatgtagatattgaactccttaatacaattatgaatctgtgaattctcttaagtcttaacatataatttaatttctaaaatgcctgtgttaattgaattatacctatcatacttcattgtttggtaaattatttcaataaaatgtcttgtttttgcattgtgaaaaaaaaaaaaaaa

SEQ ID NO: 5065 - protein, 578 aa, Homo sapien
MLSCNICGETVTSEPDMKAHLIVHMESEIICPFCKLSGVNYDEMCFHIETAHFEQNTLERNFERINTVQYGTSDNKKDNTLQCGMEVNSSILSGCASNHPKNSAQNLTKDSTLKHEGFYSENLTESRKFLKSREKQSSLTEIKGSVYETTYSPPECPFCGKIEEHSEDMETHVKTKHANLLDIPLEDCDQPLYDCPMCGLICTNYHILQEHVDLHLEENSFQQGMDRVQCSGDLQLAHQLQQEEDRKRRSEESRQEIEEFQKLQRQYGLDNSGGYKQQQLRNMEIEVNRGRMPPSEFHRRKADMMESLALGFDDGKTKTSGIIEALHRYYQNAATDVRRVWLSSVVDHFHSSLGDKGWGCGYRNFQMLLSSLLQNDAYNDCLKGMLIPCIPKIQSMIEDAWKEGFDPQGASQLNNRLQGTKAWIGACEVYILLTSLRVKCHIVDFHKSTGPLGTHPRLFEWILNYYSSEGEGSPKVVCTSKPPIYLQHQGHSRTVIGIEEKKNRTLCLLILDPGCPSREMQKLLKQDIEASSLKQLRKSMGNLKHKQYQILAVEGALSLEEKLARRQASQVFTAEKIP

SEQ ID NO: 5066 - DNA, 678 bp, Homo sapien
acattttctatgtagtaaacatgtatgtgtatgtgtgtgggtgtgtgtctaattactttgttggacagattcctgtggtttggaactgctggggccaagtttatacaaaaatctacatttttgagtaaactccccatgactctagtaagtttccacagtatttgagtattctttatttcctaaagctgtacaaacatcagataatcaatatttgtaaggatcgataatataatttataatgaaattgctttatcagctattaatgttaactacatcatcttcatatagccttataactcatttgtgctattccattttcctctgttccttttattttcacttcccttgtaatgttagtctctttgtactgatttctgaagagttcatttatgattaaacatgttaacattttgtctagaattgcaaatatgttttttctcattcattttactatggtgttttattttttggttatacagaagttgtatattgaaatataatcttgttctgttttatgactttggagttttgtggttttttaaaacatgtttacattggtatcatttatttgtattgccttctatttcagcagttagtttgtcatttctttttccattaatcatcattctggtgttaatgaatgcattaaatatttaaagtaaaaaaaaaaaaaaaaaa

SEQ ID NO: 5067 - protein, 46 aa, Homo sapien
MCMCVGVCLITLLDRFLWFGTAGAKFIQKSTFLSKLPMTLVSFHSI

SEQ ID NO: 5068 - DNA, 714 bp, Homo sapien
ctgaaaagcgtccgcggggccgtctgacaggtccgggaagaggcccctgaggggcggacgggcgcgtctccaccgttttcgcagagggatactggtgaagcgggagtggtgtgcggcctcaggtccgggcggcactggggttagggactgcggagggaagtggtgcgtgttttttgtcctgagggccagtaaatgacctgcgacataactatttgcaaaacaaatggggaagaccaagataaagataagttatatcacaggaaagcaattgaaaatgcaaaaatgaagcatctgaatgaaggactaataacactgaattcagcttttgtgaatcttatctgcagatatgtacagaccacatcctaagattgacttctgcctcaacagaaatacatgagccagtgccttattggaaatgatttgcgtgttttaagaactggtgtatataggtacatcttgaatgttctgctttccttgccttatgcctgtacttcacctcagccttcaattccattgtgtttccttgctacttggtatcttgaaatctggtacgaaactattgcatgatccctgcacctttgcttctgcatatatcatagctctcttatagtgagtgtgcacaatctatttcatttgatgtaatcaaagtttaatatattggatagttaaaaataaaatacaactttaaatcctaaaagacttgagcaagcttat

SEQ ID NO: 5069 - protein, 15 aa, Homo sapien
EKRPRGRLTGPGRGP

SEQ ID NO: 5070 - DNA, 2116 bp, Homo sapien
cccaagagagatgggctggtgggtcactgacataaagcagtccacaagatctattttagaaaagtatcaatgacatttccttagttggtttgattctcttgagaatacatgagtttaaaagaactgaggtcaaattgctttatgtggaaagcaataaaaacaagtatttttgacttgcaaattagaggtaactgtaagcaatttttgctattgaagcctatggcccaaattattccacctgcaaaataactttcacccttgcaaggctgatagacggctcttcattggtctttttttatggttttgttttgtttttttaagtcattggtcttaaatctgtatggtgacaaatctatttgagtttgattgagactttcttggactcctttggacaagaggtcagagcacaaaggctagtcaccacttctttgacttcttgaggtatgagccaaaattttacttttccattgatttaaagcagaatttttggagatgctgtgttctagttcctgacggaatcggtggtggttgctgactttgacactttggagagtgatgtggggagttatatagaaggggaaacactagtttaggtgtgaggagttctagtatgccacaaattagctgaggctttagacgaagcacaatatttgagcatcaatcttctcatctatgagatagacctgtcaggattattgtgaaaattagatgagataagttgaaagtacagtgcttggtaaacagttagcactcaaatattagttctttttcactttaattaagagcagactttgaatggtctgatgccaagtgtagatccttaagagacaaaacaaagaaactttcctggcttcaaagaaaagaactccatttctgaaagggtgccttaaaaggaattcatttgtctgatccatccttttgcctttgggcattactactgtcaccctccatttctttacaaacttcaggcaaggtggtctctctctctctcccaataggcaattccagggttgtaaactcattatcaggaagcttaatcttagaactgaaatacctcacagagcaatttaaacctctttcttcttgttcctattcttcatgggaagaaaactgggttgatccctatcttctttttaaggagccacatttgccatttattattgctcttttgcctatttaaaaaaaataacagtcagaaaaaataatgattattaaaatgatagtcattatttacttagtgaatgtcaggataggtatttattactcttagcttcttattggtatcagatgtagatcacggtcttactgttgattaactcttcagttatatatacatactttgattctttagttacataattgataacaaagtgtgcttctgaagaattattctggctgtatggctcttgtttcctccccttggtaaaaatggaggcatgaatctcagttttgtgatctgcttttaatttcatatatgacattatttgatatacataattaccaacatccaaaagcgtttcttcccctttctacgtgtgcactaaattctaaaacaaaaattggaatacaaaatgcctaataaagaaaaaattcatgtacagaaaagcaaaagataatctactttgttaagataatttgtcactagctggttgaataatgcacagtttttgtttaaggttacacatttatgcctggattaaataacaatagtaaaacttgacaagtcttttgaaaaacagctgctaaacatattgctttctggaatgtaatcattagcaacaaatattctcttattctatacaattgcagaatgctagtggaactttcttgtaggttatttgacaatgaatgttaattgatttattttttaaaaatgtaaaatcctcttatccctttaaggccggtttaggctttcatgtccctgtggtagaaaatttcaaatgctggcttctaatttctactcactgaagtgtcttccagacataccagatggttggagctcctttgatagtatataagggagctacataaatgtatttgaactaactcgtgagcaaaatttctgtttcccgcaaaaaaaatctatgtcgggtgcggagaaagaggtaatgaaatg

SEQ ID NO: 5071 - protein, 23 aa, Homo sapien
PREMGWWVTDIKQSTRSILEKYQ

SEQ ID NO: 5072 - DNA, 5035 bp, Homo sapien
  Unsure 359-427: Unknown base
ggtcgacgaacacttacatgaagataatggtgaagttgaagtgcgtcgaagttgtaggattagaagtcgttatagtggtgtaaaccagtccatgctgtttgacaaacttataactaacactgctgaagctgtacttcaaaaaatggatgacatgaagaagatgcgtaggcagcgaatgagagaacttgaagacttgggagtgtttaatgaaacagaagaaagcaatcttaatatgtacacaagaggaaaacagaaagatattcaaagaactgatgaagaaacaactgataatcaagaaggcagtgtggagtcatctgaagagggtgaagaccaagaacatgaagatgatggtgaagatnnnnnnnnnnnnnnnnnnnnnnnnnnnnnnnnnnnnnnnnnnnnnnnnnnnnnnnnnnnnnnnnnnnnngaagaagatggagaagaagagaatcagaagcgatattatcttagacagagaaaagctactgtttactatcaggctccattggaaaaacctcgtcaccagagaaagcccaacatattttatagtggcccagcttctcctgcaagaccaagataccgattatcttccgcaggaccaagaagtccttactgtaaacgaatgaacaggcgaaggcatgcaatccacagtagtgactcgacttcatcttcctcctctgaagatgaacagcactttgagaggcggaggaaaaggagtcgtaatagggctatcaataggtgcctcccactaaattttcggaaagatgaattaaaaggcatttataaagatcgaatgaaaattggagcaagccttgccgatgttgatccaatgcaactagattcttcagtacgatttgatagtgttggtggcctgtctaatcatatagcagctctaaaagagatggtggtgtttccattactttatccagaagtctttgaaaaatttaaaattcaacccccaagaggttgtttgttttatgggccacctggaactggaaagactctggttgccagagcacttgccaatgagtgcagtcaaggggataaaagagtagcatttttcatgaggaaaggtgctgattgtctaagtaaatgggtaggagaatctgaaagacagctacgattgctgtttgatcaggcctatcagatgcgcccatcaattattttttttgacgaaattgatggtctggctccagtacggtcaagcaggcaagatcagattcacagttctattgtttccaccctgctagctcttatggatggattggacagcagaggggaaattgtggtcattggtgctacgaacaggctagattctatagatcctgctttacgaaggcctggtcgctttgatagagaattcctctttagcctgcctgataaagaggctcgaaaagagattctaaagattcacaccagggattggaatcccaaaccactggacacatttttagaagagctagcagaaaactgtgttggatactgtggagcagatattaaatcaatatgtgctgaagctgctttatgtgctttacgacgacgctacccacagatctataccactagtgagaaactgcagttggatctctcttcaattaatatctcagctaaggatttcgaggtagctatgcaaaagatgataccagcctcccaaagagctgtgacatcacctgggcaggcactgtccaccgttgtgaaaccactcctgcaaaacactgttgacaagattttagaagccctgcagagagtatttccacatgcagaattcagaacaaataaaacattagactcagatatttcttgtcctctgctagaaagtgacttggcttacagtgatgatgatgttccatcagtttatgaaaatggactttctcagaaatcttctcataaggcaaaagacaattttaattttcttcatttgaatagaaatgcttgttaccaacctatgtcttttcgaccaagaatattgatagtaggagaaccaggatttgggcaaggttctcacttggcaccagctgtcattcatgctttggaaaagtttactgtatatacattagacattcctgttctttttggagttagtactacatcccctgaagaaacatgtgcccaggtgattcgtgaagctaagagaacagcaccaagtatagtgtatgttcctcatatccacgtgtggtgggaaatagttggaccgacacttaaagccacatttaccacattattacagaatattccttcatttgctccagttttactacttgcaacttctgacaaaccccattccgctttgccagaagaggtgcaagaattgtttatccgtgattatggagagatttttaatgtccagttaccggataaagaagaacggacaaaattttttgaagatttaattctaaaacaagctgctaagcctcctatatcaaaaaagaaagcagttttgcaggctttggaggtactcccagtagcaccaccacctgagccaagatcactgacagcagaagaagtgaaacgactagaagaacaagaagaagatacatttagagaactgaggattttcttaagaaatgttacacataggcttgctattgacaagcgattccgagtgtttactaagcctgttgaccctgatgaggttcctgattatgtcactgtaataaagcaaccaatggacctttcatctgtaatcagtaaaattgatctacacaagtatctgactgtgaaagactatttgagagatattgatctaatctgtagtaatgccttagaatacaatccagatagagatcctggagatcgtcttattaggcatagagcctgtgctttaagagatactgcctatgccataattaaagaagaacttgatgaagactttgagcagctctgtgaagaaattcaggaatctagaaagaaaagaggttgtagctcctccaaatatgccccgtcttactaccatgtgatgccaaagcaaaattccactcttgttggtgataaaagatcagacccagagcagaatgaaaagctaaagacaccgagtactcctgtggcttgcagcactcctgctcagttgaagaggaaaattcgcaaaaagtcaaactggtacttaggcaccataaaaaagcgaaggaagatttcacaggcaaaggatgatagccagaatgccatagatcacaaaattgagagtgatacagaggaaactcaagacacaagtgtagatcataatgagaccggaaacacaggagagtcttcggtggaagaaaatgaaaaacagcaaaatgcctctgaaagcaaactggaattgagaaataattcaaatacttgtaatatagagaatgagcttgaagactctaggaagactacagcatgtacagaattgagagacaagattgcttgtaatggagatgcttctagctctcagataatacatatttctgatgaaaatgaaggaaaagaaatgtgtgttctgcgaatgactcgagctagacgttcccaggtagaacagcagcagctcatcactgttgaaaaggctttggcaattctttctcagcctacaccctcacttgttgtggatcatgagcgattaaaaaatcttttgaagactgttgttaaaaaaagtcaaaactacaacatatttcagttggaaaatttgtatgcagtaatcagccaatgtatttatcggcatcgcaaggaccatgataaaacatcacttattcagaaaatggagcaagaggtagaaaacttcagttgttccagatgatgatgtcatggtatcgagtattctttatattcagttcctatttaagtcatttttgtcatgtccgcctaattgatgtagtatgaaaccctgcatctttaaggaaaagattaaaatagtaaaataaaagtatttaaactttcctgatatttatgtacatattaagataaatgtcatgtgtaagataactgataaatattggaactttgctagaacaagaccctgtagtaatagtaataatagttgaagtttggccaactcttaataaagttattttggtaactaatgttttatggcacttaagaataattagcagcgttaaattttgtttgtattaagcacttttaattttatccttcctaaaaatagtttattgtatctgacaagaaacttacttaaccattgtgtccttcccatcttttttgtcatctttgttttcttcaaatgccctcctcccatctgccttgagattcccttgtcttcacttaaaagccagagtgcaagtcatgatttgcgggagggctcttgaaccacttctggctgcaccacaattctgtacttgagtatcacagtcattgtttttgagacaaacatttttataattctaatttgggttaataaagattttaaatatttcttggtttacttttgtaattatatacacaacaaatgtattaataactaccttgttaaacaccttttaatagcacaaggtttttatatttgcaagctgttgatatctttctaaaactgtttaggttatagtctattgatactttttatatacaattttataaatataaatattataattttatattaatggtaccaaaaatacatttcttaaggttaaaagcatgcacttccatgcatacttgcttttggggagagtggggagaagacattctaataatcagtttgtgaaatagcttctgttggaaaccttttgaggggaataaggaatggtcatctaaaatgagagattctggattttaatgcagttcaaagttgagctgtatttttgttgttgatttatctggattttttttaaagccttctaaaacccagtgaattcaataccttaattagtacatactatcttatgtaatgcataaagcaatgccagtcactgagaacatttaaatatatttatattcctggagatacacattctcatttttgttggtttattataaattattcttctagatgcatcttttataactaggatttcattttgtgtgtatagcttatgtaataaattttaaaggtgaaaactctctt

SEQ ID NO: 5073 - protein, 1250 aa, Homo sapien
  unsure 120: unknown amino acid
  unsure 121: unknown amino acid
  unsure 122: unknown amino acid
  unsure 123: unknown amino acid
  unsure 124: unknown amino acid
  unsure 125: unknown amino acid
  unsure 126: unknown amino acid
  unsure 127: unknown amino acid
  unsure 128: unknown amino acid
  unsure 129: unknown amino acid
  unsure 130: unknown amino acid
  unsure 131: unknown amino acid
  unsure 132: unknown amino acid
  unsure 133: unknown amino acid
  unsure 134: unknown amino acid
  unsure 135: unknown amino acid
  unsure 136: unknown amino acid
  unsure 137: unknown amino acid
  unsure 138: unknown amino acid
  unsure 139: unknown amino acid
  unsure 140: unknown amino acid
  unsure 141: unknown amino acid
  unsure 142: unknown amino acid
VDEHLHEDNGEVEVRRSCRIRSRYSGVNQSMLFDKLITNTAEAVLQKMDDMKKMRRQRMRELEDLGVFNETEESNLNMYTRGKQKDIQRTDEETTDNQEGSVESSEEGEDQEHEDDGEDXXXXXXXXXXXXXXXXXXXXXXXEEDGEEENQKRYYLRQRKATVYYQAPLEKPRHQRKPNIFYSGPASPARPRYRLSSAGPRSPYCKRMNRRRHAIHSSDSTSSSSSEDEQHFERRRKRSRNRAINRCLPLNFRKDELKGIYKDRMKIGASLADVDPMQLDSSVRFDSVGGLSNHIAALKEMVVFPLLYPEVFEKFKIQPPRGCLFYGPPGTGKTLVARALANECSQGDKRVAFFMRKGADCLSKWVGESERQLRLLFDQAYQMRPSIIFFDEIDGLAPVRSSRQDQIHSSIVSTLLALMDGLDSRGEIVVIGATNRLDSIDPALRRPGRFDREFLFSLPDKEARKEILKIHTRDWNPKPLDTFLEELAENCVGYCGADIKSICAEAALCALRRRYPQIYTTSEKLQLDLSSINISAKDFEVAMQKMIPASQRAVTSPGQALSTVVKPLLQNTVDKILEALQRVFPHAEFRTNKTLDSDISCPLLESDLAYSDDDVPSVYENGLSQKSSHKAKDNFNFLHLNRNACYQPMSFRPRILIVGEPGFGQGSHLAPAVIHALEKFTVYTLDIPVLFGVSTTSPEETCAQVIREAKRTAPSIVYVPHIHVWWEIVGPTLKATFTTLLQNIPSFAPVLLLATSDKPHSALPEEVQELFIRDYGEIFNVQLPDKEERTKFFEDLILKQAAKPPISKKKAVLQALEVLPVAPPPEPRSLTAEEVKRLEEQEEDTFRELRIFLRNVTHRLAIDKRFRVFTKPVDPDEVPDYVTVIKQPMDLSSVISKIDLHKYLTVKDYLRDIDLICSNALEYNPDRDPGDRLIRHRACALRDTAYAIIKEELDEDFEQLCEEIQESRKKRGCSSSKYAPSYYHVMPKQNSTLVGDKRSDPEQNEKLKTPSTPVACSTPAQLKRKIRKKSNWYLGTIKKRRKISQAKDDSQNAIDHKIESDTEETQDTSVDHNETGNTGESSVEENEKQQNASESKLELRNNSNTCNIENELEDSRKTTACTELRDKIACNGDASSSQIIHISDENEGKEMCVLRMTRARRSQVEQQQLITVEKALAILSQPTPSLVVDHERLKNLLKTVVKKSQNYNIFQLENLYAVISQCIYRHRKDHDKTSLIQKMEQEVENFSCSR

SEQ ID NO: 5074 - DNA, 2665 bp, Homo sapien
gctcagctggtagtttgacctccgttggtgcaatgccagagatgggattgtcagccaccacactgccaccaccctgcacacagtctgggtccctccgagagaagcacgccaaccttaacatcccctacagcatcttggtgcttcacacaccatttaggaggccaccctaacgaggcaagaggacatgggggtgtgcagaagttctgttcttagtgagaatggctggcctgagaatccagctcacctcctctgcccacagtctggactgcttgtgggaaggccatctcctcctgtctggtggtacctccactctgggcagggagggcctgtctgtgactcgctctggaccccacttcccgctctggccaagggctgtcttctgtgcacatagctcaggagcctgcagcagttccctgtatgggtggatgtcctcaggggccaagaagagaagaatggggacaacagaaacctgctttgtaggggattatgtagactaaaagcctagaagttctgcccacatccttatgacgcagccaatctggagcttcatgtttccttctaaaagtagtaaccgggtagaagtgggtgacccatcgaggacacatgatgtgaggtatttctgccggattctaggttagcaaagactcaaatgggtgactcatgaatgaagggagaacaggcacaggacttaatgaaaagagtttcttgaacttagttttctgaatgggggtggggagttggggcacgtgtgtgtaaggggaggctgcctcactttgaaggaatggtgttggctaacaggatccatgaaattcctaggtcagttgaataataactgaactactggtttgactgtggattatttcctgggtattagtgggacccaacagcacattgctattaatagtatggaaataatggtccctctgtttcattgaattgctgaagtaatgataatgccatgaaccaggagaagatggttgtgggggtttctaggaagcagctgctgtgacaggccaatcccaggcttgcccccgagccctcctgtccttctgggtttgtgtttgccttgcctggtgcttcctccctcattgtgttgttgaatagacctaggcagccttgtatccatagaaagcctccactgctgggccggggagggggttgtggtaagggccctctggaaatcaagcagagaatgcctttgcagtggtctcccgggcattgggcagggcctagccttttgcagcccccagaggaccttgcctgcataaagcactcagaagggttagccacctggtgattttgtctctagtgaaactgtgtttgccgataatcatccacatagccacctctgtcctcgcagtttggatgcctttttttgacacctgcgctaggttcttgtatgctggcttttcttaaaggaacagcagagtagaaaagaggttgagaatgttttctagcaggcagaatgtgcatacatgttttcatgagtgtcctttgggtgctgtttcttttaaatcctctgtgcacagggctctggcctttagtaaactgtttttctgtcttacgtcatgctgactgggtgctaggggctgattacaaaggggaagagttgaacagacatcaggggccgatgaaaccaaaggactaggagtcaggagaacaagtcagggattaggagacagcggtttggtttattgttatccagctggaggactcctaggggcagcagcaggaggaataccagggccacggaggggccaggagtctcacagtggagggcagactctaacagatgccagctgaacgctcgctggccctggatgtcatacgagttggggaccagaaatctgggctcagagaacccgtccagggagatttgaagccatgggttatcttctagagttgatactgataatatattttaatttttattgatgtttaataccttctgaaacaggagggtaagatcagatgggaagcccctctgttgaaggatcttgggaaccttggtggtttttttttttttttggttttttttttttgatcgagctgtggacatccttcttaattcgattctgaggatttgtttaactaaaaagttcccaaacacagaaagggcctccccacctgctttggggagctgtctgtgctgggagtgccaggcatcccatgggacccatcactgccagtgtctgtgcctcccagaggtcagccgtgtctgccctggctctgtctcctctgtgacagggcagagcatttctggtcagtttctccatggtgcctcccacccctttgtaaagtggatggacatgatggaattcagttgtctcaccctgatagcctgggtgttgatattcactttacccgcactcagacacaggcgaccttgaagcagttctcggtgtgtagagtccacgtgacagtccccacagcctccccagatagctgtgtgcctgtgcgctactgctgtgccattttcccaacttggcgtttcactaaatgcagctgatctctctctctgtgcactcgtgatccatgttgaacaatacatgtaggttctttttccacgcaatgtaagaacatgatatactgtacgttggaaagcatttaccttatttatatacctgaatgttcctactacacaaataaacatatattaaattct

SEQ ID NO: 5075 - DNA, 3084 bp, Homo sapien
agttggcgggaatggctgctcgcggaggggcagtgtacgcggggccgctgtaggctgtccagcgatggatcccaccgcgggaagcaagaaggagcctggaggaggcgcggcgactgaggagggcgtgaataggatcgcagtgccaaagccgccctccattgaggaattcagcatagtgaagcccattagccggggcgccttcgggaaagtgtatctggggcagaaaggcggcaaattgtatgcagtaaaggttgttaaaaaagcagacatgatcaacaaaaatatgactcatcaggtccaagctgagagagatgcactggcactaagcaaaagcccattcattgtccatttgtattattcactgcagtctgcaaacaatgtctacttggtaatggaatatcttattgggggagatgtcaagtctctcctacatatatatggttattttgatgaagagatggctgtgaaatatatttctgaagtagcactggctctagactaccttcacagacatggaatcatccacagggacttgaaaccggacaatatgcttatttctaatgagggtcatattaaactgacggattttggcctttcaaaagttactttgaatagagatattaatatgatggatatccttacaacaccatcaatggcaaaacctagacaagattattcaagaaccccaggacaagtgttatcgcttatcagctcgttgggatttaacacaccaattgcagaaaaaaatcaagaccctgcaaacatcctttcagcctgtctgtctgaaacatcacagctttctcaaggactcgtatgccctatgtctgtagatcaaaaggacactacgccttattctagcaaattactaaaatcatgtcttgaaacagttgcctccaacccaggaatgcctgtgaagtgtctaacttctaatttactccagtctaggaaaaggctggccacatccagtgccagtagtcaatcccacaccttcatatccagtgtggaatcagaatgccacagcagtcccaaatgggaaaaagattgccaggaaagtgatgaagcattgggcccaacaatgatgagttggaatgcagttgaaaagttatgcgcaaaatctgcaaatgccattgagacgaaaggtttcaataaaaaggatctggagttagctctttctcccattcataacagcagtgcccttcccaccactggacgctcttgtgtaaaccttgctaaaaaatgcttctctggggaagtttcttgggaagcagtagaactggatgtaaataatataaatatggacactgacacaagtcagttaggtttccatcagtcaaatcagtgggctgtggattctggtgggatatctgaagagcaccttgggaaaagaagtttaaaaagaaattttgagttggttgactccagtccttgtaaaaaaattatacagaataaaaaaacttgtgtagagtataagcataacgaaatgacaaattgttatacaaatcaaaatacaggcttaacagttgaagtgcaggaccttaagctatcagtgcacaaaagtcaacaaaatgactgtgctaataaggagaacattgtcaattcttttactgataaacaacaaacaccagaaaaattacctataccaatgatagcaaaaaaccttatgtgtgaactcgatgaagactgtgaaaagaatagtaagagggactacttaagttctagttttctatgttctgatgatgatagagcttctaaaaatatttctatgaactctgattcatcttttcctggaatttctataatggaaagtccattagaaagtcagcccttagattcagatagaagcattaaagaatcctcttttgaagaatcaaatattgaagatccacttattgtaacaccagattgccaagaaaagacctcaccaaaaggtgtcgagaaccctgctgtacaagagagtaaccaaaaaatgttaggtcctcctttggaggtgctgaaaacgttagcctctaaaagaaatgctgttgcttttcgaagttttaacagtcatattaatgcatccaataactcagaaccatccagaatgaacatgacttctttagatgcaatggatatttcgcgtgcctacagtggttcatatcccatggctataacccctactcaaaaaagaagatcctgtatgccacatcagaccccaaatcagatcaagtcgggaactccataccgaactccgaagagtgtgagaagaggggtggcccccgttgatgatgggcgaattctaggaaccccagactaccttgcacctgagctgttactaggcagggcccatggtcctgcggtagactggtgggcacttggagtttgcttgtttgaatttctaacaggaattccccctttcaatgatgaaacaccacaacaagtattccagaatattctgaaaagagatatcccttggccagaaggtgaagaaaagttatctgataatgctcaaagtgcagtagaaatacttttaaccattgatgatacaaagagagctggaatgaaagagctaaaacgtcatcctctcttcagtgatgtggactgggaaaatctgcagcatcagactatgcctttcatcccccagccagatgatgaaacagatacctcctattttgaaaccaggaatactgctcagcacctgaccgtatctggatttagtctgtagcacaaaaattttccttttagtctagcctcgtgttatagaatgaacttgcataattatatactccttaatactagattgatctaagggggaaagatcattatttaacctagttcaatgtgcttttaatgtacgttacagctttcacagagttaaaaggctgaaaggaatatagtcagtaatttatcttaacctcaaaactgtatataaatcttcaaagcttttttcatctatttattttgtttattgcactttatgaaaactgaagcatcaataaaattagaggacactattgagagtgagccactagcttgattttctttctcctctgatttcagttcactgttcagtttagcattaaaataataaaataatcatacagttcc

SEQ ID NO: 5076 - protein, 878 aa, Homo sapien
MDPTAGSKKEPGGGAATEEGVNRIAVPKPPSIEEFSIVKPISRGAFGKVYLGQKGGKLYAVKVVKKADMINKNMTHQVQAERDALALSKSPFIVHLYYSLQSANNVYLVMEYLIGGDVKSLLHIYGYFDEEMAVKYISEVALALDYLHRHGIIHRDLKPDNMLISNEGHIKLTDFGLSKVTLNRDINMMDILTTPSMAKPRQDYSRTPGQVLSLISSLGFNTPIAEKNQDPANILSACLSETSQLSQGLVCPMSVDQKDTTPYSSKLLKSCLETVASNPGMPVKCLTSNLLQSRKRLATSSASSQSHTFISSVESECHSSPKWEKDCQESDEALGPTMMSWNAVEKLCAKSANAIETKGFNKKDLELALSPIHNSSALPTTGRSCVNLAKKCFSGEVSWEAVELDVNNINMDTDTSQLGFHQSNQWAVDSGGISEEHLGKRSLKRNFELVDSSPCKKIIQNKKTCVEYKHNEMTNCYTNQNTGLTVEVQDLKLSVHKSQQNDCANKENIVNSFTDKQQTPEKLPIPMIAKNLMCELDEDCEKNSKRDYLSSSFLCSDDDRASKNISMNSDSSFPGISIMESPLESQPLDSDRSIKESSFEESNIEDPLIVTPDCQEKTSPKGVENPAVQESNQKMLGPPLEVLKTLASKRNAVAFRSFNSHINASNNSEPSRMNMTSLDAMDISRAYSGSYPMAITPTQKRRSCMPHQTPNQIKSGTPYRTPKSVRRGVAPVDDGRILGTPDYLAPELLLGRAHGPAVDWWALGVCLFEFLTGIPPFNDETPQQVFQNILKRDIPWPEGEEKLSDNAQSAVEILLTIDDTKRAGMKELKRHPLFSDVDWENLQHQTMPFIPQPDDETDTSYFETRNTAQHLTVSGFSL

SEQ ID NO: 5077 - DNA, 8848 bp, Homo sapien
  Unsure 5780: Unknown base
  Unsure 5782: Unknown base
  Unsure 5784: Unknown base
  Unsure 5786: Unknown base
  Unsure 5788: Unknown base
  Unsure 5790: Unknown base
  Unsure 5796: Unknown base
ctcgcaggagcaacacgtgatgtgtctacttatcagggtgagagggggagagcgagactccgagcgtgcgggcgaggaagctgggcggggggccgagacgggggccgggacgacggctggggcgccggggtcgccagctcctcgcccacctccctccctgtgggagaagaggaggaggggaagtgactgcggagttgatgaactttgcacatccagaaacgccattttgattccttttccggaacaagtttgcatctctcctcggtctctccctgaagcccaccggtccccaacgcatcatgccagggagccaagcgtcctgcccggccgtaagttgctccgactgtgtgttccaggagtggtggctctgaggtgtgaccctgcccacgtttgggcccagccaggttcagccccccaataaggagggcagcttgataacacaaagaaaacagtgtcaacgagtactaccaagagaagaagacaagaggtcaacacagactcattttctactccgtgtgaatgatagctacagcaggggaaagtttcatagtctatcagtgggtcagaaaatggagttttatagcagaggcttcttagaagcttaaacccctgtcccaatgacgtcaagttcgcccgctggcttggaaggttcagacctatcttccatcaacaccatgatgtcggcggtcatgagtgtagggaaggtcacagagaatggcgggagcccccaggggatcaagtccccctcgaagcctccaggaccaaatcggattggcagaaggaaccaggaaacgaaagaggagaagtcttcctataactgccccctgtgtgagaagatttgcactacccagcaccagctgaccatgcacattcgccagcacaacacagacactggaggagccgaccactcatgcagcatctgcggaaagtcactgagctcggccagctccctcgatcgccacatgctggtgcactctggcgagaggccttacaagtgcactgtgtgtggccagtcatttaccaccaatgggaacatgcacagacatatgaagatccatgagaaggaccctaacagtgccacagccacagcccctccatctcctctgaaacgtaggcgattgtcctccaagaggaaactgagtcacgatgccgagtcagagagagaagacccagcaccagctaaaaagatggtagaagacgggcagtcaggtgacttggagaagaaagctgatgaagtctttcactgcccagtatgtttcaaggagtttgtttgcaagtatggactggagacccacatggagacccattcagataacccactaagatgtgacatttgttgtgtcacctttcgaacacatcgaggactgctgcgtcacaacgcgcttgtccacaaacaacttcccagggatgcaatgggcagacctttcatgacagaacaacccttcaattcctgctggcttccacgacttaggattcacggacttctcctgtaggaagtttcctcgcatttctcaggcctggtgcgaaacaacctgcggaggtgcatcagcgagcaacaccgttttgtctgcgacacctgtgacaaggcgttccccatgctctgctcactggctctgcacaagcagacccatgtggcggcagaccagggtcaagaaaagccgcaggccacgcccctgcctggtgacgccctggaccagaagggcttcctggccttgcttggcctgcagcacaccaaagacgtcaggcctgcccccgccgaggagcccctgccggatgacaaccaggcaattcagctccagacactcaagtgtcagctacctcaggaccccggctgcaccaacctgctgagcctgtcacctttcgaagctgcttccctaggcggttctctcacagttctccccgcgaccaaggacagcataaagcacctgtccctgcagcccttccagaagggcttcatcatccagcctgacagcagcattgtggtcaagcccatctctggcgagtcggccatcgagctggcagacatccagcaaattctgaagatggcagcctcggctccccctcagatcagtcttccgcccttctccaaggcccctgccgccccactgcaggcgatcttcaagcacatgccccctctgaagccaaagcccctggtcacaccacggacggtggtggccacctccacgcccccgcctctcatcaacgcccagcaggcttccccgggctgtatcagccccagcctgccgccaccgcccctgaagctcctcaaaggctcagtggaggcggcctccaacgcccacctgctgcagtccaagtccgggacccagccccacgcggccacgcggctctccctgcagcagccgcgggcggagctgccgggccagcctgagatgaagacgcagctggagcaggacagcatcatcgaggccctgctgccgctgagcatggaggccaagatcaagcaggagatcacagagggggaactcaaggccttcatgacagcgcccggcggcaagaagacgcccgccatgcgcaaggtgctctacccctgccgcttctgcaaccaggtgtttgccttctcgggggtcttgcgtgcccacgtgcgctcccacctgggcatctcgccataccagtgcaacatctgcgactacatcgccgccgacaaggccgcgctcatccgccacctgcgcacgcacagtggggagcggccctacatttgcaagatctgccactaccccttcactgtcaaagccaactgcgagcggcacctgcgcaagaagcacctcaaggccacccgcaaggatatcgagaagaacatcgagtatgtgagtagcagcgcggccgagctggtggacgccttctgcgccccggacaccgtgtgccggctgtgcggcgaggacctcaagcactatcgtgccctgcgcatccacatgcgcacgcactgcggccgcggcctgggcgggggccacaagggccgcaagcccttcgagtgcaaggagtgcagcgccgcgttcgcggccaagcgcaactgcatccaccacatcctcaagcagcacctgcacgtgcccgagcaggacatcgagagctacgtgctggccgccgacggcctgggccccgcagaggcgccggccgctgaggcgtcggggcgcggggaggacagtggctgcgctgcccttggtgactgcaagcccctcactgccttcctggaaccccagaacggctttcttcacaggggccccacccagcctccacctccccatgtctcgatcaagttggagcccgccagtagctttgcggtggacttcaatgagcccctggacttctcgcagaagggcctggccctggtccaagtgaagcaggaaaacatctcctttctgagcccttcttccctggtcccctatgactgctccatggagcccatcgacctgtccatccccaagaacttcaggaaaggggacaaggatttggccactcccagcgaagccaagaagcctgaggaggaggcggggagcagcgagcagccctctccctgcccagcacccggcccttctcttcctgtaactttggggcccagcggaatcctggaaagccccatggcccctgctccggcggccaccccggaacccccagcacagcccctgcagggccctgttcagctggcggtcccaatctactcctcagccctggtcagcagccctccactcgtgggcagctcagccctcctgagtggcacagccttgctgcgtccactgcggcccaagcccccgctgcttttgccaaagccccccgtgacagaagagctgcccccgctggcctccattgcccagatcatctcatctgtatcctcggcccccaccctgctgaaaaccaaggtggcggacccagggcccgcaagcactggcagtaacaccacggcttcagacagcttaggaggttctgtccccaaagccgccaccaccgccacccccgctgccaccaacagcccaaaagagtctagtgagcctcccgctccagccagcagcccagaggctgcctctcccaccgagcagggcccagcgcggacgtcgaagaagaggggccggaaaagggggatgaggagccgaccccgcgccaacagcggcggggtggacctggactccagcggggagtttgccagcatcgagaagatgctggccaccacagacaccaacaagttcagtccgtttctgcagacagcggaggacaacactcaggatgaggtggccggagcccctgccgaccaccatgggcccagtgatgaagagcagggcagtcccccagaagacaagctgctgagggccaagcggaactcgtacaccaactgcctgcagaagatcacctgtccccactgtccccgggttttcccttgggccagctccctacagaggcacatgctcacacacactgacagtcagtcggatgcggagactgcagccgccgcgggcgaagtgctagacctcacctcacgggacagagagcagccgtcggagggcgccactgagctccgccaggtcgcaggggatgcgcctgtggagcaggccacggcggaaacggcctcgcgcgtgcaccgggaagagcacgggcgtggggagagccatgagccggaggaggagcatggcactgaggagagcactggggacgccgacggcggaagaggacgcgtcgagcaaccagagcctggacctggacttcgccaccaagctcatggacttcaagctggcggagggcgacggcgaggcaggcgccgggggcgcggcctcgcaggagcagaagctcgcctgcgacacctgtgggaagagcttcaagttcctgggcaccctgagccgccaccggaaggcgcacggccgccaggagcccaaggacgagaagggagatggcgccagcactgcagaggaggggccccagcccgcccctgaacaggaggagaagccccccgagaccccggcagaggtggtggagtcggccccgggtgccggggaggccccggcggaaaagctcgcggaggagacggagggcccctccgacggggagagcgcggccgagaaaaggtcctcagagaagagcgacgatgacaagaaaccaaagacagactcccccaaaagcgtggccagcaaggcagacaagaggaagaaggtctgcagcgtgtgcaacaagcggttctggtcgctgcaggacctgacccggcacatgcgctcccacacaggggaaaggccatacaaatgtcagacctgcgagcgaaccttcaccttgaagcacagcctggttcgccaccagcggatccaccagaaagccaggcatgccaaacaccacgggaaggacagcgacaaggaagagcggggtgaggaggacagcgagaatgagtccacccacagcggcaacaacgccgtctcagagaacgaggctgagctggctcccaatgccagcaaccacatggctgtcacccggagccggaaggagggcttggccagtgccaccaaggactgcagccacagggaggagaaggtcacggcagggtggccgtctgagcctggccagggtgaccttaacccagagagcccggcggccctggggcaggacctgctggagccgcgcagcaagaggcctgcccacccaatcctggccacagctgatggcgcctcccagctcgtggggatggagtgacagcctcagtccccctcagcacagacaaaagccagcagagcaaagcgtctatacttcatggggtttcctcagtgccctttggctgttgaggagtgagagananananananagaganagagagagacaagcaggagcgtggctgctcgctcagtgccatagccttaccgcagcctgcgcgggaggccacagcccgtgccgattccagtgccttaactacttaccggatccctccatattatcatgggtgttgtatttttccaaaatgacttcttaaacaaaacaaatattataatgatattgtctggagaggacctcttcatttgagcattagcgttattttgtattggtgtgtgtgagcttgttcttgtgaatctgtgatagcaccgtttgttctgtgagctggaaacagaaggaaaaaacatacccttgggtacccatagccaataactggaagaaaatgatgtgaatttcatgtaaatgaccagaggaaagatggataagatgataatttcttaaatagacattttccctttttctttgtgcttcatggtggagctgtcatctggtccttggtattacaggatgtggttgatgaaggtttccaatatggtttcaggccaaaaccagggaagattctagcttcagcctcatgtccatttccagtctgtcagcattagacatggtcactgttcaagtttcaagacatccattcttaactatagagaagagtactcccctggcgtcttaacctatggaaaacatgcacggataggatatatttgattgcctcctcttccctttcagtatatgtattattaatattattattattattattattattagttcatcagtttgctgttctctgcagtgagcagaatcaaatgggcaatatttgtcctgggagacctgtgccgcacccaggtccccgtgttaacgtgtgcctgcggttgtggttggcaccctcgggtggtagctcttctactgtaatgagacaagcctttcttctgtcactgcagaatttagaaggggccgtgagcagtcttcccaagcatggtccaggagcagctcagagagggtggagtgaggatgcatgcatccagggaacaggcatcaagaagccagggccgtgcctggagcactgcagagatgactttggagaaagcaaagcagtgacccagtgaccaggcacattactcgtgagcgaggtattcccagtcttcctgctaagcctaatccaagccttacccagctgtgctactgtcatttgcaaagcaaggaaatactactactggtaataaaactacacatgcaagatgtcagataagaaataggtttatatttaccttcctgcgatgtggggttggtgcttgaagataaatgtgctgtttctagtttcttaaatagcccacacccctggatgcaaaaaggcagggttatttttacccatgagcatcctgtgcaggcaatagacttccctcactgtctccgcctgcagggaggagaatgtaccccactgcacctgagctcctggtccctcagccaagacctcaggggtccccagccagcctgctgctggggacccctgtgcttgctgcagtgtatggagcctcttgccttcccctggggaggcacccctgtaccccagcttccttcccctggccttttctggccccagtgctcctcctttacatagacttgttcacacagaaacgtgcacgcccccttttctccgccacttcaccagtttctgaaatccaacctcccagacttcacaggaagatagatattcttgagataatgaaaagtgatatcttcgcatacgaaaggaaaaaaggttgaggtatatatgatttttaactgtattaggggtgtatgaaccagtttaaaaacgaggttttatttactgtagagatgaatgcaaatcagaaccaatgatcccttggcctacttagttaaaaccagttcatacatcccttagggtttttattattattattattattattacagttgttattgttgtttttgttgttattattatttggggtttcttgtgttttttctttgcgactctccacactaaacttgcaatattgtggggagaagctgtgactaaactctacgctgcggtgagatgtagcagtaatcagctcccagcgacgtgtgtagctggggctgccgctcgcaataatcactattgatttaaagctttacttagccttgatctgtaccctcgtagtcaataaggtcttgccacattttattagtgaggtggagaaacgtattatttgtttgttgtttttgcccttcccccaccccccaatattaaactgtgaaatttgtgatttgtttaaactctgggtgaatcatagcttagtttgcatgtccagctaatttgtttctatacattttgtttgattctctttctccttctctcagggcttttacaaaaaaatatatatatatggatcttctgaaaagttttttgaggtgcaagttttttctcttgtttttttttcttttttttttctcattgattaatggacatgatgctgagattcaatcactacatgaaacacctggctgtgaaaacaaaacaacccagagggctgtgttccaagcagcgctggggaagctacgtaacagtcggatgccagttttggaagattcaccatgcgttctgaccctctgttcgtctctttcctctcctctttcttcaagaaggaaattgatcctagtgatttcagcccatgcattaaacaggaaacaataataaatttgtagaattcatatttttctaaagggaacttaaaaactgctgctacatgttatgtacaaaactggtttatgccacatgaacagagaatcacaagtttggttttggtactttttgttcctctttgtattcagttgtatagaacttccaaattcagaatgagaagaaagctgttctgtatcaaaccatttaagcaataaatgttatattttaaaagctgcagattgccggtcacgtggccgtcctgtgattttttgtgatcccatccccaaacccacagcccacttggggcaggtcccaggtgtgcagtaccattggggggagtcacaggtgcccaggaaagctcttgtcacccaggcagcatttttatttgcgctggaggctgtgg

SEQ ID NO: 5078 - protein, 1418 aa, Homo sapien
  unsure 272: unknown amino acid
MSAVMSVGKVTENGGSPQGIKSPSKPPGPNRIGRRNQETKEEKSSYNCPLCEKICTTQHQLTMHIRQHNTDTGGADHSCSICGKSLSSASSLDRHMLVHSGERPYKCTVCGQSFTTNGNMHRHMKIHEKDPNSATATAPPSPLKRRRLSSKRKLSHDAESEREDPAPAKKMVEDGQSGDLEKKADEVFHCPVCFKEFVCKYGLETHMETHSDNPLRCDICCVTFRTHRGLLRHNALVHKQLPRDAMGRPFMTEQPFNSCWLPRLRIHGLLLXEVSSHFSGLVRNNLRRCISEQHRFVCDTCDKAFPMLCSLALHKQTHVAADQGQEKPQATPLPGDALDQKGFLALLGLQHTKDVRPAPAEEPLPDDNQAIQLQTLKCQLPQDPGCTNLLSLSPFEAASLGGSLTVLPATKDSIKHLSLQPFQKGFIIQPDSSIVVKPISGESAIELADIQQILKMAASAPPQISLPPFSKAPAAPLQAIFKHMPPLKPKPLVTPRTVVATSTPPPLINAQQASPGCISPSLPPPPLKLLKGSVEAASNAHLLQSKSGTQPHAATRLSLQQPRAELPGQPEMKTQLEQDSIIEALLPLSMEAKIKQEITEGELKAFMTAPGGKKTPAMRKVLYPCRFCNQVFAFSGVLRAHVRSHLGISPYQCNICDYIAADKAALIRHLRTHSGERPYICKICHYPFTVKANCERHLRKKHLKATRKDIEKNIEYVSSSAAELVDAFCAPDTVCRLCGEDLKHYRALRIHMRTHCGRGLGGGHKGRKPFECKECSAAFAAKRNCIHHILKQHLHVPEQDIESYVLAADGLGPAEAPAAEASGRGEDSGCAALGDCKPLTAFLEPQNGFLHRGPTQPPPPHVSIKLEPASSFAVDFNEPLDFSQKGLALVQVKQENISFLSPSSLVPYDCSMEPIDLSIPKNFRKGDKDLATPSEAKKPEEEAGSSEQPSPCPAPGPSLPVTLGPSGILESPMAPAPAATPEPPAQPLQGPVQLAVPIYSSALVSSPPLVGSSALLSGTALLRPLRPKPPLLLPKPPVTEELPPLASIAQIISSVSSAPTLLKTKVADPGPASTGSNTTASDSLGGSVPKAATTATPAATNSPKESSEPPAPASSPEAASPTEQGPARTSKKRGRKRGMRSRPRANSGGVDLDSSGEFASIEKMLATTDTNKFSPFLQTAEDNTQDEVAGAPADHHGPSDEEQGSPPEDKLLRAKRNSYTNCLQKITCPHCPRVFPWASSLQRHMLTHTDSQSDAETAAAAGEVLDLTSRDREQPSEGATELRQVAGDAPVEQATAETASRVHREEHGRGESHEPEEEHGTEESTGDADGGRGRVEQPEPGPGLRHQAHGLQAGGGRRRGRRRGRGLAGAEARLRHLWEELQVPGHPEPPPEGARPPGAQGREGRWRQHCRGGAPARP

SEQ ID NO: 5079 - DNA, 3503 bp, Homo sapien
ctcatcccggccccgggatggcgtccccacgggaattgacacagaaccccctgaagaagatctggatgccatacagcaatgggcggcccgctctgcacgcttgccagcgcggtgtgtgcatgaccaactgcccaactctcattgtcatggtgggcctgcccgccaggggcaagacctacatctccaagaagctgactcgatacctgaactggattggtgtgcccactcgggagttcaatgttggccagtatcgccgggacgtggtcaagacctacaaatcttttgaattttttctccccgacaatgaagagggcctgaaaatcaggaagcagtgtgccctggcagccctccgtgacgtccggcggttccttagtgaggaggggggacatgtggcggtttttgatgccacaaacaccacccgagaacggagagcgaccatctttaattttggagaacagaatggctacaagaccttttttgtcgagtccatctgtgtggatcctgaggtcatagctgccaacatcgtgcaagtgaaactgggcagccctgactatgtcaaccgcgacagtgatgaggctacggaggacttcatgaggcgcattgagtgctatgagaactcctacgagtcgctagatgaggacctggatagggacctgtcctatatcaagatcatggatgtgggccagagctacgtggtgaaccgtgtggctgaccacatccagagccgcatcgtatattacctcatgaacatccacgtgaccccccgctccatctacctctgccggcacggggagagcgagctcaacctcaagggccggattggcggggacccaggactgtcccctcggggcagggagtttgccaagagtctagcccagttcatcagtgaccaaaatatcaaggatctgaaggtctggacaagccagatgaagaggacaatccagacggctgaggcactgggtgtgccctatgaacagtggaaggtcctcaacgagatcgatgcgggcgtctgtgaggaaatgacctacgaggaaattcaggataattatccactggagttcgccctgcgggaccaggacaagtaccggtaccggtaccctaaaggggagtcctacgaggacctggtccagagactggagcctgtcatcatggagctggagaggcaagagaatgtgctggtcatctgccaccaggctgtgatgcgctgcctgctggcctacttcctcgacaaggcagcagaacagctgccctacctcaagtgtccgctgcacacagtcctgaagctgactcctgtggcatatggttgtaaagtggagtccatattcctgaacgtggctgctgtgaacacgcaccgggacaggcctcagaacgtggacatctcaagacctccagaggaagcccttgtcacggtgcctgctcaccagtgaccatgttcatccactgtgaccactaggcaggcactgctctctgcagagggggtcattccaggccctccagtgtgtgtgatagtcaccatgccatgcagggatattcttgaagccacacatggctggcggaacccagagcccccaccccagcccacctggctctttgttgacagtcggcgacaaggttgtgcgtggctcctgacctgctgctaagagtcacttgaccagactgcatctgcatgggctgcgcggaggttgcccagccccagtttcttccggcgcagctcttaggtgttcactctcgccagctcagttggctttgtgaagtgtgaaaccctacaatgtgaaaggaaagtgcttgctgtgatgttcctactgtggcccagctgcccagcatggacctggtgactctccacagggcctctaccatcctctctgtggccacttcctgagccagaggccaggtcttcatggggccctgagcttctgctgcctctggtgagagggagagcccttcccatccttacccaccaggaactagagccccaaccacagcagatgcttcctgggcagccactggccaggccgttgtatccatgtcacccttagttgtgggcattcatgaaagcaatgcgcttgcttcagcacattgggatgcacagaaacgtgagggcaggggggcagttgtggtcgcccctccccagttgtgcatgtacccggctacttaggtatgcttaggggagctggtggccaggggtgccccttcaggcctgctctcacagtgaaaccacttcaagacagggcaggaagttaccttcctggtgcacacaccgaagtgctcgagggagaggctgccgccccctctccccttccctggctgtggacactggcagccaatggggaggcggcctctcccctgttgctgcccgtgtccacacaggaatgtacactggtggcagaaacatgcatttgccataaataattcagaaacacttgtatggtcctgtaaaacttctctggtgtttgttgacttctgcctgtgggtctgaggaagggagaaggcagaacccataggcagtccctgggcaagggaggattttcccggccgcagcacagccttccattcatgtgcacgtgagtctggtgaaaatggccttgtgaagtccagtgtctgtcatgcccctgagttcttttggtcccagagaggcagcctgggcagtctgtttacagctggcaaacagactggctggcaagttgtggggctgggtcagaaagtgtctggacttgtaatcgggtgccctgctgtccacaggtggactctggggaagccaggcccctggatcccaagtcctttgtgtccggagcctttcctggcctgtgcctggagggtagcacatctttccagcctcccagggctttgcagcctgcagatgccacctgtccctgagagaagttagcgtccctggccctggccggtggtctctcatccttgtgtgctgctctgctaagagatgtccaaggcggagccggggcaagatccttccagactcatctgtcagagccccaagccctttagacccagagcccaaggaccatgcctttgggacattaggactgcagcctttgcttctgtgtattttggagttttggtgacttttgtcacctggacacactcatttgttagccatagtgggttcccttggtcagcaacagtgcatgtacctctggatgtcatctgaggtgagaccaccgaggccttttctctctgtgtacagaggggagttaggagttgctggactggatgcattacgaggactggggacagggtagagggacatccagggatcagggcatgagtgggggcaaccccccggcctctgccctggcatggtctccgcatgggctgaggtgtagctgattggctgccacatttcggccatgctggctggcgtgcccatgttgcagatattttcccgagttccccagaatggatggtattgaatctcagccacatgcaacactgtgtccagcattctttgcaataaatactttttaaaaaataaaaaaaaaaaaaaa

SEQ ID NO: 5080 - protein, 469 aa, Homo sapien
MASPRELTQNPLKKIWMPYSNGRPALHACQRGVCMTNCPTLIVMVGLPARGKTYISKKLTRYLNWIGVPTREFNVGQYRRDVVKTYKSFEFFLPDNEEGLKIRKQCALAALRDVRRFLSEEGGHVAVFDATNTTRERRATIFNFGEQNGYKTFFVESICVDPEVIAANIVQVKLGSPDYVNRDSDEATEDFMRRIECYENSYESLDEDLDRDLSYIKIMDVGQSYVVNRVADHIQSRIVYYLMNIHVTPRSIYLCRHGESELNLKGRIGGDPGLSPRGREFAKSLAQFISDQNIKDLKVWTSQMKRTIQTAEALGVPYEQWKVLNEIDAGVCEEMTYEEIQDNYPLEFALRDQDKYRYRYPKGESYEDLVQRLEPVIMELERQENVLVICHQAVMRCLLAYFLDKAAEQLPYLKCPLHTVLKLTPVAYGCKVESIFLNVAAVNTHRDRPQNVDISRPPEEALVTVPAHQ

SEQ ID NO: 5081 - DNA, 376 bp, Homo sapien
ttaatatacaatttttatttgtcaattagaaagtaacaataaagagtgagcttataagttatggagttaaaattttatgcagaagcaagggaaaatcttcctccagtgaaaaaattctaatgagattttgaagacagaaacaaatcacattttttttgtttttgttttctaaatgttttacaagagaaaatttcaaaagcataatcagtaagagggagaaaagtgtgctgaattccatgtatccagcttgcagccattgttaactcaggactaatcttgtttcggttctacttccctttcaccacccccacaccccaaacacaaaattactgattctagatcatgtcatttatttacaaatactttagtatgtatc

SEQ ID NO: 5082 - DNA, 917 bp, Homo sapien
gtcagtcttagacgactgcgtcgtgctatgaccggactttttcttgaaaggggatgacagcatgggaggcaatggctccacatgtaaacccgacactgaaagacaaggcactctctccacagcagccccaacaactagccctgcaccctgtctctctaaccaccacaacaaaaaacatttaatccttgccttttgtgctggggttctactgacactgctgctgatagcctttatcttcctcatcataaagagctacagaaaatatcgaagggagaggcttcccatttccccaggcccattgctgagatgggtccctcttctttctggcaccatggcagatcactccaagccccaggccccagatcctcactcagatcctccagccaagctttcatccatcccaggggaatcacttacctatgccagcacaactttcaaactctcagaagaaaagagcaatcacttggctgagaaccattctgcagactttgaccccattgtctatgctcaaattaaagtaacaaactaactcagcttttccaatgaggcttgaatccatttcctctcatctcagccctatcttcacacatcactttcacttttttacaaattttggaccaccacctgtgtgaaactgcagtcggagttgtttagatgtgatctggcaatgctatccagcatctttggagaccaatggtcagtcttttcctggccagaggaaagattgatggccctcccacttgaactgacagcctgtgagccccttgggggcatagactgccttccttggacccttccaaagtgtgtggtacggagctcagtgcacagagtattcacccagcatcatgaatcaacttgggaggagtcaaccaaatgaacaatctaccaaaaatttcaaataaagtcaaaccccccac

SEQ ID NO: 5083 - protein, 155 aa, Homo sapien
MGGNGSTCKPDTERQGTLSTAAPTTSPAPCLSNHHNKKHLILAFCAGVLLTLLLIAFIFLIIKSYRKYRRERLPISPGPLLRWVPLLSGTMADHSKPQAPDPHSDPPAKLSSIPGESLTYASTTFKLSEEKSNHLAENHSADFDPIVYAQIKVTN

SEQ ID NO: 5084 - DNA, 1281 bp, Homo sapien
ctttccagccaccctcctggaacacgcagtcacgtgaccctgatgccaggctctccagggaatcaggaggaaaagcccaggtgctcttgacaataatgtggtgcctgctgccctgtgggctccctaatccccagaggggcctgttcagcaaaaggagcacaagcaggacttaaacaggcacaatcaaaaccatctcagtcagaagtcagagcgtggtacctgggagagaaccccgaggggcatctggagtgttggggccatgttggtgatatggacgtacttcacttgtgaaaattctcaccaaaatgttcacaagttcttttgaaggagaggggatgtggggagggagaagaggttatatgagattgtctttaatgttttgtactttttgcatttttaagctttttgacaacatgtattttataatcagagaaaaatgctgacttttataaagtgccattattatgattatgagctgcctcgtgtgtgtgggcatgggtttgccatgaaaactatgaagaactttgagatgggcaagacaattcctgggtgtcttctggacaagatctagggagttacctagcagaccttccggactgacgtgatgctacaggggtcccatctttccttgtcattgagctattttacagttctgtgaattgtaaagaactgagggtaatgcgaatgactcttgttcatagaggcaaatgaattttgtcccatggagatttaattgatattactctgtggatgttgacaagttttgtgtctgttagcaaattaatttcagtgttcttatttgtctttgaattgtttctttttaaaattttactggttcctttataaatttacctttttgaaaaagtattgtcctttaacaggaccctggtggcagacatggttgctgggccctccctcactgcctgggaacctcttccccaaggccccagggcaccctctcccctctcccctgcagccccagagctgcccactcccaggattcctcctacctcaccccctccatccctctgcttctcagtgtaggatatagactcaggggtgggagatcaggggtgaaagccactatgaatactgagtcggctaaacagagttgctaaattggcctgggaatctgctgagggtccatcctcttgattctatgggaaaatgcagtttaaagatctaaagagctgggaggtccttacaagaggcttccttctgtgggcacgcattggggtggggtggtgaggttaccccgcgggtgtctccctgccccagtgg

SEQ ID NO: 5085 - protein, 56 aa, Homo sapien [sequence omitted]

SEQ ID NO: 5086 - DNA, 2366 bp, Homo sapien
  Unsure 1185: Unknown base
  Unsure 1831-1952: Unknown base
gcaattggtggctttgaaggcgcggcgagcgggaacagctcttgaggagtgagactgcaggagatgtgggccgtgccaaagagatggatgagactgttgctgagttcatcaagaggaccatcttgaaaatccccatgaatgaactgacaacaatcctgaaggcctgggattttttgtctgaaaatcaactgcagactgtaaatttccgacagagaaaggaatctgtagttcagcacttgatccatctgtgtgaggaaaagcgtgcaagtatcagtgatgctgccctgttagacatcatttatatgcaatttcatcagcaccagaaagtttgggatgtttttcagatgagtaaaggaccaggtgaagatgttgacctttttgatatgaaacaatttaaaaattcgttcaagaaaattcttcagagagcattaaaaaatgtgacagtcagcttcagagaaactgaggagaatgcagtctggattcgaattgcctggggaacacagtacacaaagccaaaccagtacaaacctacctacgtggtgtactactcccagactccgtacgccttcacgtcctcctccatgctgaggcgcaatacaccgcttctgggtcaggcgctgacaattgctagcaaacaccatcagattgtgaaaatggacctgagaagtcggtatctggactctcttaaggctattgtttttaaacagtataatcagacctttgaaactcacaactctacgacacctctacaggaaagaagccttggactagatataaatatggattcaaggatcattcatgaaaacatagtagaaaaagagagagtccaacgaataactcaagaaacatttggagattatcctcaaccacaactagaatttgcacaatataagcttgaaacgaaattcaaaagtggtttaaatgggagcatcttggctgagaggaaagaacccctccgatgcctaataaagttctctagcccacatcttctggaagcattgaaatccttagcaccagcgggtattgcagatgctccactttctccactgctcacttgcatacccaacaagagaatgaattattttaaaattagagataaataagacgtgcgtggtttcttaagcacagctcctccttcttgatattgcacatgcacttcagttcatgggctagctgtatagcttncgtctgtaaacttgtaatttcaagaatccttggtattgaattttagaaatgctcacataattgttgggactgattcattcctccacggatatgcctcctctctctgatatcctgctaactgtagccgttgtggcatttgagatgacaggacatatatatatatggccccacacttgaccttgagtgcctgaatgctctgaaatcaagcatatggcacagcgctcaagacttttgggtttgtgtccttttttctatggctgtctcttctcaattctggagaggtctggttccagtggctggtttccagggattgattcttaagctctggatcacagagagaagcaacaaggaactatactcaactcaaaactttttaggagaatcatgaaattggtctattcaaaggatggagttgagtccattctgttattgttgcaagaggttgcatatttggtgagtcagttatataaaatagtgttcttattgtaaatatgatacttctcataatctattttatcatgtgtataacattcaaactgacaaatatattgacttatgaataaaggtgtcaaaaaactggcacatcagttaattttgatcaaagtacttcagtgatcatcactaaataccctatctttttaaaaannnnnnnnnnnnnnnnnnnnnnnnnnnnnnnnnnnnnnnnnnnnnnnnnnnnnnnnnnnnnnnnnnnnnnnnnnnnnnnnnnnnnnnnnnnnnnnnnnnnnnnnnnnnnnnnnnnnnnnnnnaatgacatcactttggttcagagctctaaaatggagggaggaagccattctaaaaaggactccctacatgacctgcaacttgaaaaaaaattaaaagctccaaaaaaaaaacaatacaggagcttaccttgaacctttgaattgggccaaattgcgatgaccactgcatcctggaaaattttatttcaccagcactacaactcctcaacagcaccaaccaataaactatggatttttgtactaagccagttgcctctttcaaaacaacttgtcaacttgtctaatcaccctcagctttttttaaaaacccctcctctaccctctctcttcagaacacaagtggcttctagctgaatctgtctcccaaattgcaattcctaagacctcaataaaaacaccttgtcttgctgaaaa

SEQ ID NO: 5087 - protein, 366 aa, Homo sapien
AIGGFERGEREQLLRSETAGDVGRAKEMDETVAEFIKRTILKIPMNELTTILKAWDFLSENQLQTVNFRQRKESVVQHLIHLCEEKRASISDAALLDIIYMQFHQHQKVWDVFQMSKGPGEDVDLFDMKQFKNSFKKILQRALKNVTVSFRETEENAVWIRIAWGTQYTKPNQYKPTYVVYYSQTPYAFTSSSMLRRNTPLLGQALTIASKHHQIVKMDLRSRYLDSLKAIVFKQYNQTFETHNSTTPLQERSLGLDINMDSRIIHENIVEKERVQRITQETFGDYPQPQLEFAQYKLETKFKSGLNGSILAERKEPLRCLIKFSSPHLLEALKSLAPAGIADAPLSPLLTCIPNKRMNYFKIRDK

SEQ ID NO: 5088 - DNA, 7689 bp, Homo sapien
  Unsure 5100-5123: Unknown base
gccaggccctggtcggacggaaacgctccgccggctttattgtcgcttcgttatgtggcggagccgagcagtttagcgtgcctctcaccctcagcgcctgcgaagccggcggcggcgtcgggactcctcggcgcgcggaggaaggatatctgtgtggaggatcggtgtgtgcgcgcgcggctttaaagagggggcagcggagggtctccccgcactccgctgctcaacttcgaagggcctcgctcgctgcaggctcgctcctcaacctctccgccgcccggccccccttctccgcgcgggacgctgcccggagcgcggcggggccggggggtggaggacgagagaagcggtcggaggcgtcggcccggcagcggcagcggcagcggacgcgtgcagcagacccgggagcgagcgcgagccgggctgccgggcgagagggcgaggccgagccccgcgagaccggaacgccgggggcgggggcgagacagagggggagccgcggggagcgcgcgggacgcggcccgaggccgtgcgcgagccggggcaccggacggcggacggcggacggcgcgcagccatgtcgttcagtgaaatgaaccgcaggacgctggcgttccgaggaggcgggttggtcaccgctagcggcggcggctccacgaacaataacgctggcggggaggcctcagcttggcctccgcagccccagccgagacagcccccgccgccagcgccgcccgcgcttcagccgcctaatgggcggggggccgacgaggaagtggaattggagggcctggagccccaagacctggaggcctccgccgggccggccgccggcgccgccgaggaagccaaggagttgctgctcccccaagacgcgggcggccccacctcgcttggcggtggcgcggggggccccctgctagcggaaaggaaccgtcggactctggccttccgaggcggcggcggcgggggtctcggcaacaatggcagtagccgcggccgccccgagacctcggtgtggcccttgaggcatttcaatgggcgagggccggcgactgtggatctggagctggacgcgctggaggggaaggagttgatgcaggacggcgcgtccctgagcgacagcaccgaggacgaggaggagggggcgagcctgggcgacggcagcggggcggaaggcggcagctcaagcagcagcaggcggtcgggcggcgatggcggggacgaagtggagggcagcggtgtgggagctggcgaaggagagactgtccagcacttcccgctcgcgcggcccaagtctctaatgcagaagctccaatgctccttccagacctcctggctcaaggactttccctggctgcgctattccaaggatactggtcttatgtcttgcggctggtgccaaaagacccctgcagatgggggaagcgtggaccttcccccagtggggcatgatgagctttcgcgagggacccgcaactacaagaaaaccctcctcctgaggcaccacgtctctaccgagcacaaactccacgaagccaacgcccaggagtcagaaataccatcagaggaggggtactgtgactttaatagtaggccaaatgagaactcttattgctatcaacttctgcgacaactaaatgaacagagaaagaaaggtattctttgtgatgtcagcattgtggtaagcggaaaaatcttcaaagctcataagaacatcctggttgcaggcagccgtttctttaagactttatattgcttttcaaacaaagaaagccctaaccaaaacaatactacccacttagatattgctgcagttcaaggtttttcagtcatcttggacttcttgtattctggtaacctggtgctcacaagccaaaatgccattgaagttatgaccgtggccagctatcttcaaatgagtgaagttgttcaaacttgccgaaatttcattaaagatgccttaaatataagcattaaatcagaagctccagagtctgtagttgtggactataataatagaaaaccagttaatagagatggtctgtcttcatcacgggatcaaaaaattgccagtttttgggcaacacggaatcttaccaatttggcaagtaatgtaaagattgaaaatgatggttgtaatgtcgacgagggccaaatagaaaactaccaaatgaatgacagtagttgggtccaggatggatctcctgaaatggctgaaaatgaatctgaaggtcaaacaaaagtgtttatttggaataatatgggctcccagggaattcaagagactggcaaaacaaggaggaaaaaccaaactacaaaaagatttatttataatattccacctaataatgaaacgaatttagaagattgctcagtaatgcagccacctgttgcctatccagaagaaaatacactactcatcaaggaagaaccagatttagatggtgctctactctcggggccagatggtgataggaatgtgaatgcaaatttattggctgaagctggcactagtcaagatggaggtgatgctggtacttcacatgatttcaagtatggtttgatgcctggtccttcaaatgatttcaagtatggattattgccagaatcttggccaaaacaagaaacctgggaaaatggtgaatcatctctaatcatgaacaagttaaaatgccctcattgtagctatgtagccaaatacagacgaacactaaaaaggcacttgctcattcacacaggagtgagatcatttagctgtgatatttgtggaaaactgtttactcgaagagaacatgtaaaaagacattccctggtgcataaaaaggataaaaaatacaaatgtatggtgtgtaagaagatcttcatgttagcagccagtgttggaataagacatggatctcgacgttatggtgtttgtgtagactgtgcagataaatcacagccaggagggcaagaaggtgtagatcagggacaggatacagaattccctcgggatgaagaatacgaggagaatgaagtaggagaagctgatgaagagctagttgatgatggagaagatcagaatgatccctctcgatgggatgaatcaggagaagtttgtatgtctctagatgattaactgacctactatactcctcaaggatgctgcatttggacctaatatgaatcgacaatttggattgttgaacttgaaggcttgcaaaatatggtacatgctggatagtagttatgttgctgtgaaaactgtagggtcaaagccttatagcaaaaaaaatttttttttatatttgcacaggactatacagcaaacaaccatgtggttggattacatggagtccccacatactcagtcagttatcaaagtaaaatattttttatttataggatatacagtaactatttgggtcctatgaaaatagtccttaaagagcttacattcatgtgctactttaacatgaatggagaaaatccgtttatggaagtacagtgacaattgacccaatcactctgtccatcaaaccactcaggctagtttgtactagtagagttttgtttctatttttatttttattaattttattttttttaatacagattttcagtgaggggctttttcaatcccattggttctattttcttgtatttttccatttaatttgcttcataacttaaaccaagtctcttctagtcttaggtattatttctcgattttgtgctgatgggcatgtttataagaactggagaggtaatttattggaatgaactaactgacttcctccattcccctcttcctttttgacatgaattttactacttcacaaatgaagaatgatgttatgaagttaccgtggcgaagttgacaaataccactaagaatgattatgatttagaagtaactttcttctgctgctctaatctgataaatggttactatatgatattttctgacatggtatttggttttgggtatctgttactttggcactattcttgtttgcctctttatttttgccagtgtactatacctcagtcctatttgaaagacctaattgaaagaaaaatcatagaaataagtaaaatgatttgttttataatttatccaccatgtccagtttggttagcttgttatgcaatataagtgaaatatcaggtttttacccgtgtcccttttatcatgaaaattaacacaaaatgtgcattctcttttgtttcatacttagcgggatattgattgttttgaaattatgatcaatacttaatttatttttttctgtccttgaagtcactacaccttgatacagtctttctagtagtcaccatgattcaacagtctcaaaaatcttacaaataaaattctgagaagctttattattctataaattcttcagggtacaaagggtgacatattgaggtgaaattgtcagatttacttagcctggtgacatgaattagctgattgtggaactctcagcagcatttcacgtattgttaacatgtatggcatttattagcatattgtatattatataagattgagggatgtcatattttcagctttcttttaaataaaaattgagtatattttcctattttatatcaggtaactaaattatgctagttatgtggaaaaaattgcaaagatgctttgacagatataatccctttggtgctccatctgatcaaagttgaaaagttgatgttttttaagagacaagctttatcattgtctctgatttcagtagaataatggtttattgttagacaatgatgtttctgcttggataaatcaaagataaattacagttacatggttagatgcatcttttgtcatctatattgtagtttctacataactgtaaacctgacagataagaatagtttcggtttgatttttgtttaaaacagatgagtacttcttaatgttctagacaaatgagtaaaatgtatttctggtagaaattagttgggcaaagatactatgaatgaaaaagtattttaaacgtaaaatgttctttgtgaatatgtaagtatagtataaagatttctttcatcccatttatccccttcctttaaataaactagtttacaattggtagnnnnnnnnnnnnnnnnnnnnnnnntaaagaacaaagatatatatctaaaaatcacctaaatctgctttattagactacagttcacttattgcatagaaactggacttggctttacattcttaatgtacttttacttttcctcaagatatgaacttactctcttgaagctgaattttcttttactacttaaatcatttatgtatatctggtaaattatgaccaaatttttgttagattgcatacagtaaattgaaatacacacttggtacactacgggattgttgtgcttttgtttggttttagttggaaataaggtttgatgtagatggcttgttactgttaatttaaaatattctataattgtccattactttatgttgtgttgtgacagatttggctatatttttagtcaattgaaatatgatactttaaaagtttgtttttaggtaatccaaaggaaaagtgtttatactcttgaatatattagcctcagcctatataaaaatttctttgaagtaaacattttaccggaaacagaattgacagatttttctacttgctgactgcctaacttattttgtttcatgatctcgagggactgccttttcccatctagatcttttaaaaaaatagttttagtactaaggtatactactggacatttctatttttttaagtgtattctttttctgacttacagtaaaatttcaggaagttgatagatactaagaacttatgattggtctcagaggtaacaatgaaatactcataattttgtctgtggaactctggcagaattatgttacacatttggcgaagttgtctcttgtaatttatattttaaatgaaaaagtattttagagcttttaatgaaggggaagagtataaactttctttcatattcactctgtagttacagaccgtctcataaatcaagattgtgcattattagagttctcagagacagatacttccatatggacccctgttcatttttcttatttactagatattttgctaaatttagcacactagcaattaagagtttaaaaaagaagaaacgttataggaaagggaaactgaacagtaatgagtagctttgaaattggggaaaacacactagctgggttaggtacagctatcctaatggagaagagtgagctaaatgcgttaattcatgtaaagtgcttagaacactggtacataataggtgcataacacatcttaaagttgtttaataatagataagaaccaagaggaaaaagaaataagaaaagatgggggaaaggaaggagaaaataggaaatgaaaggattaggacttgggcatttatattaatacaaaatggtgtaaacggcctgaatatcactgtagtagtatcatacgggggaaagtgtgatggaaaataggtttaaaaatcttaatttttaaaactttagtaagctttatttatattttttaggattttctgaacatagcatgaagggtttagattcatttttctgaaaaacgattaaaaaaactaccaattttttttttgagtgcccacacttgccgttgtgctgtatacatgattttaccttaatcctctataaggtaggtgctaattgtctccattttatagatgaggaaaggctcagagaaattcagaaacttggctaatttaacacagctgtgacagagctcgaatttgaccacgtctgattctgaagcccatactctttcagggaggctctattgctgcctcattaaacaactcttgtagaatttcagctcttaatggagtctatggattatatttttcctataagacagctgtgtttagaattttgagtgtctttcctccccccaataaatttccttactactctttcttcataaagcagttgttttgtcactttgactatattaagacacatcagtgtagcacatgctcttaactggctgtggcattttaattttataaaagaatggtttttatctgaagaactagatagaaaccccagtttttgtgccgttcagtcacccagatccttaaacttaactatggtacataatatccacacttagaactaacaggtgtttagtcactttaggacttaaaatggaaagttttttttttttcctgctgtatctctgctttcaactgaagttaaagaattctagatagtttaaaatgtgttagggataagcacacttcaaaagatgttttctagccctaaattttatgacattgggtacttaaatttggagtacactagctattgagaacaatattttgggttgaggagagatggttgaggccattatttagtgggagcattggcattttgaacactgtaaacaaaagaacacttccgcctgctgtttgtaaaagctctttgggaagatcttttacgaagaccaactttttaaaatgtaaattacctacctaatataagtgtcctaagacatgtatgtaaacttccggaactgttttgtctgtgtatttagaaaatacacaagaatctttattcaaacctaaaaatataaacttgtgagcactaaaagagaatctatgtcgggtgcggagaaagaggtcaatgaaatg

SEQ ID NO: 5089 - protein, 1039 aa, Homo sapien [sequence omitted]

SEQ ID NO: 5090 - DNA, 1545 bp, Homo sapien
ggggcgcgggcgatttgtaggtaatggcaggcgttcggtcactgaggtgtagcagaggatgcgctggcggctgtgagtgcggcgacaagggcaaatgcagcgactcctcgctgttgggcaagagactctccgaagactcgagccgccaccagctgttgcagaagtgggcgagcatgtggagctccatgagcgaagacgcgtcggtggccgacatggagagggcgcagctggaggaggaggcggcggctgcggaggagaggccgctggtgttcctgtgctccggctgccggcggccgctgggcgactcgctgagctgggtggccagccaggaggacaccaactgcatcctgcttcgctgtgtttcctgtaatgtttctgtggataaggaacagaagctatccaaacgtgaaaaggaaaatggttgcgtccttgagactttgtgctgcgcggggtgctcactcaatcttggctacgtgtacagatgcacgcccaagaatcttgattacaagagagacttgttttgcctcagtgttgaagccattgaaagttatgttttagggtcctctgaaaagcaaattgtgtcagaagataaagagctttttaatcttgaaagcagagttgaaatagaaaagtctctaacacagatggaagatgtcttgaaagcattacaaatgaagctgtgggaggccgaatccaaattgtcctttgccacttgtaaaagctgaactctagtctgtgtcctccattctgcccccgcccttcctccccttatttgttaaatgaagcaacatagtgagacgtcgtctctacaaaaaaaaaaagaaaaaaaaaattagccaggcatgcgaaacgctgaggtgggaggatcagatgagcttgggaggttgaggctgcagtgagccttggtcatgccactactgtgttctagtctgggcaacagagtgagaccttctctcaaaaaaaaaaacccaaaattgtagaattacttctatagctatattttatgataaagaagtgattgtttctcaaaatcgcattttaaagacgttttatggtacttgttggaattgggacttaggagttttgattttgataagaaactgggataattttctgaactttttttcctctgtatcacatttatttactatttttaaaaactttgacatttaacacttgggacaacatttattataaatgataagaaaaatcttagaggtttgtctacccacagtgtcatggaatcttctctgaaaactaatccataaagttccctggagaaattggtcagaatgatctgtcagaaccatttgaaaacttgctcaagagcagttgcttatatatagtaggattttactttttcctgcttatgtactactatatgcttaaaaaacctggaggaatacttaccaaagaggagtaaccatctctgagggtgggattctgggggaatttttgtttttttctgttttctataatgtgaaacttttgtagtatgtatttttctaattgaagagaataaagattaaaacaaagtgctttaaa

SEQ ID NO: 5091 - protein, 233 aa, Homo sapien
MAGVRSLRCSRGCAGGCECGDKGKCSDSSLLGKRLSEDSSRHQLLQKWASMWSSMSEDASVADMERAQLEEEAAAAEERPLVFLCSGCRRPLGDSLSWVASQEDTNCILLRCVSCNVSVDKEQKLSKREKENGCVLETLCCAGCSLNLGYVYRCTPKNLDYKRDLFCLSVEAIESYVLGSSEKQIVSEDKELFNLESRVEIEKSLTQMEDVLKALQMKLWEAESKLSFATCKS

SEQ ID NO: 5092 - DNA, 6240 bp, Homo sapien
  Unsure 5733: Unknown base
gccggggcgtcggcaccggcggccatcttgtgcttcccggggaaaggcggcgtgaggggaagaagttgtagggtgggggcaggagtgaggaggagggaagagagagggggaggaggccgcggcggggcagggcggggactgcctgcctgcctgggttgcggaagtgatagccgccgaccgagcctgctgctttcttgctactgcttcggcttcccggctaccccccggacggtgaaggcggcccagctgtggatggtcagatagcccttgtctcccgccgccaatctctggcccctagcagcacggagcagacggcggcacagcagcagcaggcgaggaggaagatggcgggacggctgccggcctgtgtggtggactgtggcacggggtatacaaaactaggatatgctggaaatacagaaccacagtttatcatcccttcctgtattgctattaaggagtcagcaaaagtgggtgatcaagctcaaaggagggtgatgaaaggtgttgatgacctagacttcttcattggtgatgaagcaatagaaaaacctacatatgcaacaaagtggccaatccgccatggtatagttgaagattgggacttaatggaaaggtttatggagcaagtgatctttaaatatttaagggcagaacctgaagaccattattttcttttgactgaacctccattgaatactccagaaaacagggaatatactgctgaaataatgtttgagtccttcaatgttccaggcttgtacattgctgtgcaggctgttcttgccttagctgcatcttggacctcaagacaagtaggagaacggacgttgaccggtacggtaatagacagtggagatggtgtcactcatgtcattcctgtggctgaagggtatgtgattggcagctgtattaaacacattccaatcgcaggacgagatataacatattttattcagcaactgctgagagaccgagaagtaggaatccctccagaacaatccttggaaactgctaaggcagtaaaggagcgctatagttatgtctgcccagatttagtaaaagaatttaacaagtatgatacagatgggtcaaaatggattaaacagtatactggaatcaatgctatctcaaagaaagagttttctatcgatgttggttatgagagatttttgggacctgaaatcttttttcatccagagtttgctaatccagactttacacaacctatctcagaagttgtagatgaagtaattcagaattgtcctattgatgtcagacgtcctctctacaagaatattgtcctctctggaggttcaaccatgttcagggactttggacgtcgcttgcaaagagatttgaaaagaactgtagatgcccggctgaaattaagtgaggaattgagtggtggtagattgaagccaaaacctattgatgtacaagtcattacacaccacatgcagcgatatgcagtttggtttggaggatcaatgctggcttccacgcctgagttctaccaagtatgccacaccaaaaaggattatgaagaaattggacctagcatttgtcgtcacaatccagtgtttggagtcatgtcgtaaaattggcttcatagttattggggttagggaggtggggaagagataatctttctgattacctgttttgtctggatggctggttttgaggttttaaacctgacttgaaatagtaacaccaaacatgattatacaggaatattttaataagtgtatcaccatgcagatgtagaagagagcgaaagtgattgtgtttttctttagattgaatatttgaatcttatgtgtaacaaaaagaagtgggttttagttctttctgtgccctgatattttgtatattaatgaattatccaagattcgatgggatttatcagtgtgtagatagctctataatgcttgaattgtacacttctaagtgtgcagtgcaagagcttgtttatatttcatactttttatactttgaggaaaaaaagtcaaaagaaaaattgtatttgagggaaaaaaccatgaccaagtaaaggataaattcaaaaaatagcctcatgagacttggcatacacactcatgggattccagttattatggagtgcttccatccctctccaccccttccccccaaaaggttttctttgcaagtgcttttggaactaagagctagtatcttggattaactgatgcctgctagtgctttctgattactcgcattctgtttcttgctttaaaagaagagtaaagacaagagtgttggaccagtattgcagttctgtagtgtcatttcttataaaaaacaaaacaacaacaataatttatcaaaattggcatatttaaagcctaacattctaataaaggcacaaatttctttttaatacttgtttcagcctctttaatctctttataagttaactaataaatctattttcttcagacttctgcaatagttctttaaaatcacaacagttagcaagctgacttttgtaatgtgctcaatacaaatacttgtgaacttttaatatgttgagtgctttcattttgataactggatctccatttgatattttcatttgtataactcatttgcagtctgaaaattttttttagtgccagtccctgaacatatcattgaaagttaattttctttgcattttaaaatatctggattatgaagaaaaagtgatgaaaataaattaaaactgaattaccttttctaatgttttttttttttaagtaatgtaattctattttgtttttatgtatgtgatatctgtttctgttgagatttgggagttattgaaatctctgtaatgtgtatggtagaaaatttcttgtgaccttaaaattttaccagttatttatagaaagagaaaatgggaaatgttttataggctttttactagcagtatcagtgaacacttgaactccattattcatgaaaataacacgttaggattggaatacgtctattcaaaagtgaaagaatataaagtgtttagttttttgtttttactctaaagatagaattggggagtaaacttcagtttttgtttagagtggatctgaatatttaaaatcctataataatttttgtgaatcttcattctttgagtatgggattgtaaaagacaaactatatcctacagtagtatcatcatcagtatcaaaggtctcctttttttacttggaaaagtaattcacaaacattataaaaatactattcaaacagtaccaaagagtagattagcaaaagtaagtttttttccctagcctgtctcatttttccatcattacacagactacttggaatgtcttagatgtccttgtattgtaattttctgtgtaggtagaaataaatgtagctttcttattttacacaaataggaacttactgtatatactgttctgcactttgcttttattaaagatcttttgataaagaactatattgataagcagtaaagatgtcatgctcctggcccaataaaatattgttagcattgtcataaatatgtcttttccaccggcgatggttgggtagttaagtgaataagctagaaagacatgtttataaagctatttgatgacaatctcaggcatatttatacagagatgttcttaactgtttgctacaaaaacatgaagatcaaaaactttcttgaagcttacgcttaacttatttggggaaacaaaactccagcccttcttgtgtatgttctgatatccctttgctctacttttagaggagtgaaccctaataggatggtagcagcattcttgtttctttatatctctcctctgtgattgtataccgttttttcaacttaaagcaacttcagctggaaatatgtagaggttggccaaggtgaactaaatagtctgtaacattgattagatatcaagcaacgtgagcatggtagcaaaagcactaactgaagccagtgatttaatttttaattctgattctgataattgatgatatagctcctcgaactttgttttttgttaaaacttggaaaatatatttgtattattttggacaaattatttgaactctctggaccttgattcaatttatatataaggtaaaggcattatactggattatcctgcaatttctttgagttgttagaatataatgtagcttattaatagcaatattagcagtgtagtagattctgactgcaaaacctagccttttctattgattcattagtggtagtaaaggtattatctgatttatcctttttaataggcagtgctttgatcaagtgggaaatagtaatggacaaataaaatcaatgatcattatctaacttgatgcctgcttttcaaaaagtgagcaaatttcacatcttcacccttagacattaattcatggcacctactataagtactcatcctcttcttacctatcttcttttctataggagataaagtggttattcagaccccccaatacaattttttggtttgttttcacagctacttaaaagattaaaataactattcttgcagatatttctaggaatatttttagaaataatatgaaatacagggataataggccaattatgatctttatttttaatttctacagaaaagtactagagaatatatctatagaaacttctttcagataaccctaaagatgatactagaatgtttataaaattattgagaagattatttgtgttataaagcttatttgtaccatagtaaaggatgtttttgttcctcttcattctgggctaatctgtcaatactgaagtccagtcttttcccccttttcttaccagctcaaccttgattcctgtgacccattctttctgatctttcgtagttcatagtcaccaggcatgagtaccttggatagccctctgaagtctgttaccacccagatttccaactcgggttaattggtactaattctattagctggtataaataatccaaaatctgtgcagactctgggagcaaaatgttctactcagtttggaatactgtgccttaaaatatatttcattgtaacagcaccttgtatatatagttggccaaggacagagttgttacaagttacgtggaactttcatagcaaatcttgacagtaaataccttgttcttgtattaggtctatatcctgaattgacctttagcaagaatctttagatctgctggagggctgggatggcttttggacttcagtgaaaaagaatttctgctactcattgttgataacgcttcagtactgtataaatgtttatccttttccacgtaatttgttttctatgatatgagaacttttattataatttgcctcagtcttgatagaatcttaacaaaaataaaatctgtggtcgtctgaggtattctccatgctataacccagtttagctgatgcatttggagcttgggtgctgaaattaaatataacctatttgagttaaggatttattactagtgctccagtggtcacaggaacaataaaaaaggaacaacgatagaaatacgtgatctaggaaagaaggcaactgaaaaacctgaaagaaaaaaaatgaaagattaaaagtatacgatattctattttgatttagcaattacttgttttctagtgttctgtcaatttttggtgacttttataattacattaaaactaagatgctgaattaaaataaagtttctcttttattcaagcaccacattnacttatattccctatatattgcatcaagttttgagccttcaatcccagaagcattgattgactgtctactatggttcaagtactgtgcataaagatgaataaatattctgtccttggcttagtctaatagtaaaggcactcttagaggagggacaaatattttgcctagataagatttgagagatagtaagtgcggaatttctcttcataaaaatggtagtgttagttgtttagagggagaagtccagctatgtaaggtgaaagtggggcttataaaagtggatctgttgtttaaaaattagtactttgctcctaaaatttttacctaagtgttacatccaacaacagatgaaagtaattcgacagtagcatctgctttattcatttcatatttccagtgcctgacatattgcttggcatatagtagtttagtggatgtgtttgatgaatgaatgagtaaaaattatttttcatgttaaaataaaactttgaattacatgagtaaaa

SEQ ID NO: 5093 - protein, 532 aa, Homo sapien
AGASAPAAILCFPGKGGVRGRSCRVGAGVRRREERGGGGRGGAGRGLPACLGCGSDPPTEPAAFLLLLRLPGYPPDGEGGPAVDGQIALVSRRQSLAPSSTEQTAAQQQQARRKMAGRLPACVVDCGTGYTKLGYAGNTEPQFIIPSCIAIKESAKVGDQAQRRVMKGVDDLDFFIGDEAIEKPTYATKWPIRHGIVEDWDLMERFMEQVIFKYLRAEPEDHYFLLTEPPLNTPENREYTAEIMFESFNVPGLYIAVQAVLALAASWTSRQVGERTLTGTVIDSGDGVTHVIPVAEGYVIGSCIKHIPIAGRDITYFIQQLLRDREVGIPPEQSLETAKAVKERYSYVCPDLVKEFNKYDTDGSKWIKQYTGINAISKKEFSIDVGYERFLGPEIFFHPEFANPDFTQPISEVVDEVIQNCPIDVRRPLYKNIVLSGGSTMFRDFGRRLQRDLKRTVDARLKLSEELSGGRLKPKPIDVQVITHHMQRYAVWFGGSMLASTPEFYQVCHTKKDYEEIGPSICRHNPVFGVMS

SEQ ID NO: 5094 - DNA, 347 bp, Homo sapien
tgaggatcaaaaaactacctatctggtactatgctttttatctggatgatgaaataatctgtacaacaaaccctggtgacatgcaatttacctatatagcaagcctacacatgtgcccctgaacctaaaaaaaaagttaaaagaaaaacgtttggattattttccctctttcgaacaaagacattggtttgcccaaggactacaaataaaccaacgggaaaaaagaaaggttccagttttgtctgaaaattctgattaagcctctgggccctacagcctggagaacctggagaatcctacacccacagaacccggctttgtccccaaagaataaaaacacctctctg

SEQ ID NO: 5095 - protein, 39 aa, Homo sapien
RIKKLPIWYYAFYLDDEIICTTNPGDMQFTYIASLHMCP

SEQ ID NO: 5096 - DNA, 1843 bp, Homo sapien
ggaggaggtggcggcgctggagctcctcccggggaccagcgacccggggagcgagcacgtcgctccgcaccgctcttcctccagccgctgagccgtcccttctcgccatgtcccagagcaggcaccgcgccgaggccccgccgctggagcgcgaggacagtgggaccttcagtttggggaagatgataacagctaagccagggaaaacaccgattcaggtattacacgaatacggcatgaagaccaagaacatcccagtttatgaatgtgaaagatctgatgtgcaaatacacgtgcccactttcaccttcagagtaaccgttggtgacataacctgcacaggtgaaggtacaagtaagaagctggcgaaacatagagctgcagaggctgccataaacattttgaaagccaatgcaagtatttgctttgcagttcctgaccccttaatgcctgacccttccaagcaaccaaagaaccagcttaatcctattggttcattacaggaattggctattcatcatggctggagacttcctgaatataccctttcccaggagggaggacctgctcataagagagaatatactacaatttgcaggctagagtcatttatggaaactggaaagggggcatcaaaaaagcaagccaaaaggaatgctgctgagaaatttcttgccaaatttagtaatatttctccagagaaccacatttctttaacaaatgtagtaggacattctttaggatgtacttggcattccttgaggaattctcctggtgaaaagatcaacttactgaaaagaagcctccttagtattccaaatacagattacatccagctgcttagtgaaattgccaaggaacaaggttttaatataacatatttggatatagatgaactgagcgccaatggacaatatcaatgtcttgctgaactgtccaccagccccatcacagtctgtcatggctccggtatctcctgtggcaatgcacaaagtgatgcagctcacaatgctttgcagtatttaaagataatagcagaaagaaagtaaatctggagcaacttaaaaaatctttcagtagcacataaaaagttcccctctggccccttcccaagtaaaacttttaccgtagtgtttatgtcttgtttctaaatctcttcatagattccatcaacactccagatttaattatctcctcatagttgttattaagctctttttaatggcttcaactttgtatcagtatactgtatttataaactttgtaccacaagagagagtgtagcacccattttacagtgccatgcacatcagagaaagaaactgcatgtttgttgttgatgatgaaataaaaatgctagcgacagtctttcttactggtgcttaagctcttctttgcacaaagctttataaagggaattcaaaggaagccctttagaattagagtcttgagggacagcactaacaggcctttattaagtatgattgattgttaaatttcagggaacatgattggtctgctgtgtatttgaattcatgtaacaaagaactgttacgatgggattctgctcattttattaaaaagctactgacttgactgtcatcctgttcttgttagccattgtgaataagattttaatgttgataattctgttatttacatatctctaatttactttgaaattcaaaggtgaaaataaaaaatgatggcctaagtaaaatttaaaaaaaaaaaaaaaaaaaaaaaaaaaaaaaaaaaaaaaaaaaaaaaaaaaaaaaaaaaaaaaaaaaaaaaaaaaaaaaaaaaaaaaaaaaaaaaaaaaaaaaaaaaaaaaacccccggg

SEQ ID NO: 5097 - protein, 313 aa, Homo sapien
MSQSRHRAEAPPLEREDSGTFSLGKMITAKPGKTPIQVLHEYGMKTKNIPVYECERSDVQIHVPTFTFRVTVGDITCTGEGTSKKLAKHRAAEAAINILKANASICFAVPDPLMPDPSKQPKNQLNPIGSLQELAIHHGWRLPEYTLSQEGGPAHKREYTTICRLESFMETGKGASKKQAKRNAAEKFLAKFSNISPENHISLTNVVGHSLGCTWHSLRNSPGEKINLLKRSLLSIPNTDYIQLLSEIAKEQGFNITYLDIDELSANGQYQCLAELSTSPITVCHGSGISCGNAQSDAAHNALQYLKIIAERK

SEQ ID NO: 5098 - DNA, 5059 bp, Homo sapien
ctggttctcaacttcttttgaaataatgttcatagagaaggagggctgtctgagattcgagggaaacaagctctcaggacttccggtcgccatgatggctgtgggcggtaaacgcggttagtgcaagcatctgggccatcttcaatggtaaaaaagatacagtaaagacataaataccacatttgacaaatggaaaaaaaggagtgtccagaaaagagtagcagcagtgaggaagagctgccgagacgggtatacagggagctaccctgtgtttctgagaccctttgtgacatctcacattttttccaagaagatgatgagacagaggcagagccattattgttccgtgctgttcctgagtgtcaactatctgggggggacattcccaggagacatttgctcagaagagaatcaaatagtttcctcttatgcttctaaagtctgttttgagatcgaagaagattataaaaatcgtcagtttctggggcctgaaggaaatgtggatgttgagttgattgataagagcacaaacagatacagcgtttggttccccactgctggctggtatctgtggtcagccacaggcctcggcttcctggtaagggatgaggtcacagtgacgattgcgtttggttcctggagtcagcacctggccctggacctgcagcaccatgaacagtggctggtgggcggccccttgtttgatgtcactgcagagccagaggaggctgtcgccgaaatccacctcccccacttcatctccctccaaggtgaggtggacgtctcctggtttctcgttgcccattttaagaatgaagggatggtcctggagcatccagcccgggtggagcctttctatgctgtcctggaaagccccagcttctctctgatgggcatcctgctgcggatcgccagtgggactcgcctctccatccccatcacttccaacacattgatctattatcacccccaccccgaagatattaagttccacttgtaccttgtccccagcgacgccttgctaacaaaggcgatagatgatgaggaagatcgcttccatggtgtgcgcctgcagacttcgcccccaatggaacccctgaactttggttccagttatattgtgtctaattctgctaacctgaaagtaatgcccaaggagttgaaattgtcctacaggagccctggagaaattcagcacttctcaaaattctatgctgggcagatgaaggaacccattcaacttgagattactgaaaaaagacatgggactttggtgtgggatactgaggtgaagccagtggatctccagcttgtagctgcatcagcccctcctcctttctcaggtgcagcctttgtgaaggagaaccaccggcaactccaagccaggatgggggacctgaaaggggtgctcgatgatctccaggacaatgaggttcttactgagaatgagaaggagctggtggagcaggaaaagacacggcagagcaagaatgaggccttgctgagcatggtggagaagaaaggggacctggccctggacgtgctcttcagaagcattagtgaaagggacccttacctcgtgtcctatcttagacagcagaatttgtaaaatgagtcagttaggtagtctggaagagagaatccagcgttctcattggaaatggataaacagaaatgtgatcattgatttcagtgttcaagacagaagaagactgggtaacatctatcacacaggctttcaggacagacttgtaacctggcatgtacctattgactgtatcctcatgcattttcctcaagaatgtctgaagaaggtagtaatattccttttaaattttttccaaccattgcttgatatatcactattttatccattgacatgattcttgaagacccaggataaaggacatccggataggtgtgtttatgaaggatggggcctggaaaggcaacttttcctgattaatgtgaaaaataattcctatggacactccgtttgaagtatcaccttctcataactaaaagcagaaaagctaacaaaagcttctcagctgaggacactcaaggcatacatgatgacagtcttttttttttttgtatgttaggactttaacactttatctatggctactgttattagaacaatgtaaatgtatttgctgaaagagagcacaaaaatgggagaaaatgcaaacatgagcagaaaatattttcccactggtgtgtagcctgctacaaggagttgttgggttaaatgttcatggtcaactccaaggaatactgagatgaaatgtggtaaatcaactccacagaaccaccaaaaagaaaatgagggtaattcagcttattctgagacagacattcctggcaatgtaccatacaaaaaataagccaactctgacatttggattctaccatagactctgtcattttgtagccatttcagctgtcttttgattaatgttttcgtggcacacatatttccatccttttatgtttaatctgtttaaaacaagttcctagtagacaccatctggttgagtcagttttttttatggtgtattttgaacccattctgatagtctcttttaactggaagatttcaattacttacgttaatgtaattattaatatgttaggatttatcctcagtcagccagtttgttatgtcttttctattctactgttatcacatttgtaccacttaaagtggaatctaggcactttatcaccatttagatcctattaccttttctcatctaggatatagttatcttctacataatctttctgtatcttaaaacccatcaataaattattatatattttctacttttaatcactcagaagatttaaaaaactcatgagaagagtaatctgttatgtttttccagatatttaccatttctgttgctcttccttcattattttccaaatttcgttctgcaaatttccacttcttctgatagacgttttttagttcttttagagtggttctgataggtacagattctcttattttttgcttcctctgaggacatctttttctcaccttcattctcagtgatgttttttgcttgtagtatttttagttgacattgttttctgttcagcagtttccttttagcttccgtatttcctgatgagaaatctgcagtcattcaaattgttgtttccctgtatgtagtgtgtcatttttctgtcagatttcaaggtatttatctttagtttttagccatttcattatgttggggatgagtttccttgttttattccctttggaatttgctccaattcataaatttgcagttttatgtcttttaccaaacttagaggttttcagcctaatttctaaaaatactttttattagcctgattttcatctttataggaaatagtttaagtgatgacaagttccaatagcttatatgcccagaaggccttcaaaataagaattttgaaagaatacagaaaacaaacttttatatccttctcatgtcttctactgtaaaattcatatgctttgctactctaaacctagtttgaaatcaacagtcttgagaatagatgaaaattttgatgaatagtggaattcttttaaatggaaacctcttacatgtgattttccttgccatctagaaataaaccatagtatttatgttgaatcaatcaatattatattttgtttttttcctcctcttctgagactcttattgtggaaatgttagacttttatgttttcctaaatgtccctgatattctacttatttagaacatcttttcattttttccattattctgattgggtaattttaatttgtctattttcaaatttgctggagtgttcacctgttgttgtctgtgtcgtcccactgagtgcattcaccaccttttaaattttggtcactgtatgtatcagttctaaaatttccattttgttctctatattttaaatttcttggcttatattctattttcctgcaaatgtgtcagcatttgcttgtttgagctttttttttttcaagacagggtctcaactctgttacccaggctggagtgcagtggtgcgatctcagctcactgcaacctctgcctcctggttcaagcgattattgtgcctcagcctcctgagtagctgggattacaggcatgcaccaccacagcccagctaattttttgtatttttagtagagacagagttttgctatgttggccaggctggttttgaactcctggcctcaagtgatccacccacctcagcctcccaaagtgctgggattacaggccactacacctggcacatttgagtattttttttttttttttttttttgagatggagtctcgctctgtcatctaggctggagtgcagtggtgtgatctcagctcactgcagcctctgtctcccgggctcaagcgattctcttgcctcagcctcctgagtagctaggactacaggtgcatgccaacacgcccggctaatttttttaaaaaatatttttagtagagacagggtttcaccattttggccaggatggtctcgatctcctgacctcatgatccacccgcctcggccttccaaagtgctgggattacaggcatgagccaccgtgcctggcctcatttgagtatttttataatgtctcttttaaagtctttgtcagataattccactgtacatgttattcagtgtttggtgtccactgagttgtcatttgccagacaagtggagatttttgcagctcatccttgtattctcagtagttccgatatgtaccctcgacatgtgaatgttatcttatgagactctgttttatttgtatccaacagaagatgtttattatttatttggctttctgtgaactgaggtcttaatatcagctcattttaaaagtctttgcagtggtattcggatctatcctgtgtgtgcctatgagattgggtgcagtgtatcctgttagctccattctcagggcgtttgaatgtgaattaggaccagcgcaatgaatgctcaagttggggttgggcgttagaattcataaaagtctttatatgctcag

SEQ ID NO: 5099 - protein, 431 aa, Homo sapien
MMRQRQSHYCSVLFLSVNYLGGTFPGDICSEENQIVSSYASKVCFEIEEDYKNRQFLGPEGNVDVELIDKSTNRYSVWFPTAGWYLWSATGLGFLVRDEVTVTIAFGSWSQHLALDLQHHEQWLVGGPLFDVTAEPEEAVAEIHLPHFISLQGEVDVSWFLVAHFKNEGMVLEHPARVEPFYAVLESPSFSLMGILLRIASGTRLSIPITSNTLIYYHPHPEDIKFHLYLVPSDALLTKAIDDEEDRFHGVRLQTSPPMEPLNFGSSYIVSNSANLKVMPKELKLSYRSPGEIQHFSKFYAGQMKEPIQLEITEKRHGTLVWDTEVKPVDLQLVAASAPPPFSGAAFVKENHRQLQARMGDLKGVLDDLQDNEVLTENEKELVEQEKTRQSKNEALLSMVEKKGDLALDVLFRSISERDPYLVSYLRQQNL

SEQ ID NO: 5100 - DNA, 734 bp, Homo sapien
ggaggaccacgtctctatggtgtgccgggggccgcgcgggccgggagttgggtgggctgggggacaggcgcgcccgcgccgcccgctccagctgggctagtgctgcacattccggccagcccctcctcaagaccccattcccaagccccttctcagctccctcgggccggcagagcggctctgatcagtaaaatgctgttgaaggcccacgggcatgactgcacccctcactaattggtcattggtttggggaggacaccactgtcccagtggaaccttgagcacaccttggagccctcctcttcctctccggacctgtgccaaactgtgagtggcacagagcaaggactgtatgtgttctcttctttgttgcatactcagttccttgaccacagtgccaagcacacagcgagcactccctgtgtatctgctgagtaaataaacgaatgaacaaacccaacacatttcagccaagtcctgctgatgtttctcctccgatctagctcctcctttccagccttacttctgccactccagatttcacccccatcagcttcagactggataaaaggaaaccatttctctaaaggatcacttgctctctcatttcaggccatcctgcagccaccagaaccttccacatgaaatgaaaggctcaccacttcataggctttaaggaaattcttggccatggtgtggtgcctcactcatgtaatcccagtgctttaagagcc

SEQ ID NO: 5101 - protein, 77 aa, Homo sapien
GGPRLYGVPGAARAGSWVGWGTGAPAPPAPAGLVLHIPASPSSRPHSQAPSQLPRAGRAALISKMLLKAHGHDCTPH

SEQ ID NO: 5102 - DNA, 945 bp, Homo sapien
gcctccagtcttgagtgactcctgggctttggctcagcagtaactcctccataaaaacaagtgtgtgcatctggctgttagaagaattcatgctcatccgggaaaaatgaggaagctgtgagtaccagtggaaggaacgagccaggaagagggactggaaccatctcagaagccatgcccctcaggctggaacttgccctgtctcctcgcagatgagctacctcttgtgtttaagaattgagggaagatgagctaggaatcaagaaatacgcagaactgattcctgtcactggcgccaccctgccacttgcccagagctgtggtataaatttttttaataggctgaaataaaaatatgaatagcattttggtgttaagcattaaattgataaaggctatgagatacacctgctctcaaccatgttaattttttattattggtattaataaattattacttactaacatattaacaagaattgcattgagaaacaaagcatccacaggccaaatcttctgaatttcaaatgtttatattaatgcgttgtattctagaaaagtagaattgtcttaagtagctttgtaatataaagtcatctatcagcccattacacctattagaatgttttaacctttatttcccacttttttgtttctagactgagtgtacttggtctggtatttgtggcataacttacggaacacataagaatgatacagatactatttaatgatgacctaatacaagcttagatagctaaggtgaaagcttctatggccttaacattttcctcttgaagaatgtattttctgtaataaaatacagtggctacttgaaatctataaacttatgtgaggtctggataaatctgagcaactttcttctttgtgctccaggaacctacgcactatatatataaataaagcttaagtaaacatcaaaaa

SEQ ID NO: 5103 - protein, 13 aa, Homo sapien
PPVLSDSWALAQQ

SEQ ID NO: 5104 - DNA, 968 bp, Homo sapien
  Unsure 566: Unknown base
ccaagtctcagtttctaaatttataaaaatcaggagtgcaaaccagagcaagatttgtcaaagtctccagacacccagacatttgttactttcagctattgcagcttcatccttctgagtacatgagttagtgggcaagcccaacatttaaatttctttaaatggaagaaagaaagtggataagatagaaaaatcagggtgttgcactttattaagtgtaggtattgttttgagaagcttttatttcacacccaataaaagtgtgcaggattcctcttgttccagccttaccttcccgatgatcctagcacatacttgtgtgtatatacagacatgttacagtgccaagtgtacttcctactgtggtgtgatttaaaaaattgaaataccctaaactggaagaactcctcaaggtctaaactgccgaatcgaacttcctattgtaatggaaatgttctatagctgtactatctagtaccgtagccactagccacatgtagctgttgagcacttgaaatgtgtctagtgtgacgaagaattaagaattttggctgggcgtgagcccncccacgtttagcctgagtataattttaaatagccctatgtgacaagtggctactttattggacagtgtagatctaagattaattcctcaactgttttgcactcaacaaagacatacctctgagttggcaaccagcagggtggataacgggccagtggtgataaaatcaaagaataggtaatgaaacaatcatccagttaacaatcagcaaggttcttcagagcctaattaatgtttaattctaaataaattgcaacaattaagaaaagtagtgtttttgtagttctttattgcatttgcagaagagtactgtattttgtgagaattgggaaatgtgttttaaagagatgtgtgaggaggaaaatctttcttcctcacctttacagccgttaggccgatctga

SEQ ID NO: 5105 - protein, 38 aa, Homo sapien
QVSVSKFIKIRSANQSKICQSLQTPRHLLLSAIAASSF

SEQ ID NO: 5106 - DNA, 1243 bp, Homo sapien
caaggaagtggagtctagttttagggtgggcaagtcagcaattacaaaagtgcaattaggtttgagcagaggaagcatgagagcacctaggaaaggagtctttagcattgtcttaaatttcagttatattaattatacagtacccatctcttttccactcctgaataacatctaacatctagaaactttatgaaaatcattattgatttgagcatttttaacattaacttgttgccttagacaccaactctacaacattacctgtcatatactgaagaatctcttcttccagttatgcagcacctggctaagaatgtagtcatggtaaatcaaggacttacaaagcacatggtgagtcaatatagtggcattgtaagatgctgaaaagtgtaataattcaaacttaatgcctgcaaatgcctggtttatttttaatgagttaatgttttaaatgaatacctgtatcattgcatcttgtgattttttttcttttgcctctttaattgctatctttttgtcttccagactgtcaagaacaagtatgccacatcgaagcatgctaagatcagcactctaccacagctgaattctgcactagttcaagatttagccaaggctgtggcaaaggtgtaacttgtaaacttgagttggagtactatatttacaaataaaattggcaccatgtgccatctgtacatattactgttgcatttacttttaataaagcttgtggccccttttacttttttatagcttaactaatttgaatgtggttacttcctactgtagggtagcggaaaagttgtcttaaaaggtatggtggggatatttttaaaaactccttttggtttacctggggatccaattgatgtatatgtttatatactgggttcttgttttatatacctggcttttactttattaatatgagttactgaaggtgatggaggtatttgaaaattttacttccataggacatactgcatgtaagccaagtcatggagaatctgctgcatagctctattttaaagtaaaagtctaccaccgaatccctagtccccctgttttctgtttcttcttgtgattgctgccataattctaagttatttacttttaccactatttaagttatcaactttagctagtatcttcaaactttcactttgaaaaatgagaattttatattctaagccagttttcattttggttttgtgttttggttaataaaacaatactcaaatac

SEQ ID NO: 5107 - protein, 57 aa, Homo sapien
KEVESSFRVGKSAITKVQLGLSRGSMRAPRKGVFSIVLNFSYINYTVPISFPLLNNI

SEQ ID NO: 5108 - DNA, 3302 bp, Homo sapien
gcggccgcgcggcgattctcggacgggctggcctgccacctagcggtgggctgagatcgagttcgcggccatgggcggtgggctcgccgttccacctcccgggcggcggtaccctgaccagatgctaggactgacagaaggagggcaccctccaatggggatggcatacaacctccaaagttttggcaagagggatgaaaatcagaaaggcctcgctgcttgcccatcactcagcgatgagcatctatttgcactaagaaaaaccacaaataacccgcttcgaacacaccatcttcctgtccctgtggcccctcttaggggaagtcggtagtggaaggatgccacctaggagctcaggggctttgggacgtacaactctgttttgcagttgaggaaacaggcccgacgaggaggcttgttagtggtgagttagtgacttaaccaggaccagattttaagcttctgaatttcatgtcagtgactgaaagccaaaggcgggtttatctcagctccttagaagtatttatgagaaaggagcggctgccagaaccatgagtttaacctcttaggtcacctttgttgccagtgttcattggaaaccgctccccagcagtcttggaggattttttttaaagaaaatatggcctaagattttcggtaatgacacgaaaagcccagatggtgctgaagggtgtgggtctcggagctcgggggtttgcgtgttaagaggggggttaaggcctgcaccaaagacttgcagggcgagcctcgattctgaaatcgctctcttccccttcctaacatcctctgcatagtagcctggcgagaaaccgggtgtgtgtgtgtgagggggtgggggtcatgtggataggccagaatttgtgccacaacagttcctccgtaaagttttctttctccgagctcgtgacttaagatggcaaacgcgcgtccgcatgctggcggcccctagcggcagcaggcgcgctctgcagggggagacagcgccgtcgcccccgcccgggtcggcggggatcgagttcggcctctcccactgcgggagccgtcggaggccgcgtcggagaaacgcgcctctgttcggactggaaacgaatctgggaacgagtttgaagcgcggtcaagtttgactcatcgctttccaaggacagttagtgccttccatcttcattaacgtgaataaggaccttggctgacttctttccagatcggatttttaaaggcattgtttgcttgaggagatcatgcttctcccctcccccgccagcctttttgcaaaggctgagcccagtccagccaggacggccgagggatctctgctccgggacgcgatttgctggcattgtcttcgggcccttctggaaggctgtctcgcgctgagcgtatggggaacgtcccttctgcaactcctcttcagatcttgatgataaaacacatccctctgttttattgcatttcctagaagcttgcaggcttgcaagagcactgttggcaggaaacgtgatagaaatgaaagtcaggacacaatgtccccgaacacctcggttatccaaagcggctgtcgaggccatcgcgttatcaaattcgcttttatttactgtcgtctcctgcaccctcccgttccccagccaagagggcgaagagtgttttcccccaagaataaaaacagctccgcgatttgacctcaccccctgccgccggaccacggtggtgtctgcagccgtgcagctagttggctgaaacactgctgagaccgggagccccacggcagggcccctgatgcggggttcactacggcagttgcagccttattaaaattccttgtccttgtccctaaacagtgctttacactttcagatttccctttggatttttcagcgggttattggagttattagattaccaataatccaacagcctctgtagcctctctggctggagaggaggggggaagggcggaaggcattctccaaatcgggaggctctggccaaactaggtcaatgggaaggaggggaggggcgagaaaggggttgacggtttcaaaccttgatggagggctctctctagcgttaggcagcggtaaaaacaccattcggtttgagctcccggaaccacgggactcctaatttccaataaatgcacttacttcattttaacttcccagattctcatccctaccccttattaaatcccaaccgtctctttcacctttatcccaccgggcgaaggggtgagaaagcctcaatgtaggatttggaggccaaaggctcgttctttgcagaccgactctgacccttccgcttgccgcagaagggatgagcggcgcagtgtgacgccactggctagttttaggaccagactgcggcctttgtggctgagtctttcgctgtcccctagcccccgaaagcgcaccccggagcctgctaccgagaccaattaggacatggcacccgggggttataattcccgggagggccacaggaaggcgaggcaactttggagagtgccagtgcgcgcgcaggggtcggggccccggcctttgccgagtccaagctgtgtctctacggtttcggggaaatcggattcggaaatccttacggcttggcagctcctgttctaaagactttgggcggaaaccaagtggagctgggttcccgttcttgccaacgtaggcggaaggggctttctgtttagtttttctccaaccttgcctggggcgcctatgatggagaccctcagcccctagggactccatcttttgaccttgaagtctcgctcaaacattcccctaaaagaacgggggtgagggagaatggaaggcaaaaagagggaaaaaagcaaataaacttcggaatcggacaacttaaagtctcgatatgagcctcggattgtattcgaactcctgggttctagacccagctctgctactaacttgtctgaccttccccatttataaactgttgtgggtgagaggtgggactaggtgaactctgagagccctgcactcggcgcggacgagggatttaggggaaagtgtgctgtattccccgcgagccttccccagcggccccgcctccccgggtgaatccccggcggccagcgcagcgcaggcagcgatcctggcggctgccggggccggcagcttcctggaaagttacttcttgttggagccggcaataggcaaagtgtgttctgtgaaatccgcagagccgagattgactacgttccgggaatgagagggctgtgtcattcccctcattgcctgctgcattgacggcgtaacagg

SEQ ID NO: 5109 - protein, 41 aa, Homo sapien
GRAAILGRAGLPPSGGLRSSSRPWAVGSPFHLPGGGTLTRC

SEQ ID NO: 5110 - DNA, 858 bp, Homo sapien
aaaaaaaagaaaaaggaaaaaaacaaacaaacaacaactttgaaacctaggaacaattttggacctgttggagcagaaatgtgtagttgtcattgaaggtgtgaacataccctacctctactctacatgtggaagacctgacccacagaggacatgaacccatgaagaagagtgatgtgacatgttttgcattttattagtaccatgatctaaccaactgagctaactggccacaccattttatcctttataatgatcactatgagggctgagtgcagaatggagtgtatgtggtcaagagtggaagctgtgaggctattgcagtaatccagaaagaaaggtgacaatggcttagacttcagtggtagtgttggaaatggacataaatagacatattcaggaaatatattgatcttagatctaataagacacgtaatagattagaagtagggaaattaatgaaaaagcagaattaaggatgacttctcactggcttgaaatgctaaatggatgacggtgctgtttagtgagttggggaagactgggcgtggtgatgggtgtagaaattgagaaaggaaaatcaagaatttccagaactttcagagcaatgttaaatactttccttgatagtgggtcagtcatcatttataagtgcatttctaaaaatattgcttaattttgtttttgagctttgtataagtggaattttgtgtgtactgattattttgctcaatactatgtctttaagattctctgtattgttgcatgtggctgagtttatttttgatgctgtgtagtgttttactaattaataaatcataattcagtttttactgttctattgatggacatctgggt

SEQ ID NO: 5111 - protein, 31 aa, Homo sapien
KKKKKEKNKQTTTLKPRNNFGPVGAEMCSCH

SEQ ID NO: 5112 - DNA, 1182 bp, Homo sapien
ggggttctgtctgcgctgttacgtattacctacacttctgggtttttttgttcttgttctcagcctctctttaagagttcttgggccttccttttccctctttctattttaacagttttaattttagaaccatttacattccagtaggtaattcactatgcgctttatatgccttagggcatccaaataaaaaacaatagggtaaacatccccaaaacccacctttaaaaaaaaaaaaaaacccatacagatttccatatgtaataaaaccccgtgttcttggatagatattaataaggttgtaattccaactggtgacataactcctgtgagggataagaatgtgtctgcttatagtaataacatcagaacctctttgtgaaattgcggcctttaatgtacattttaatgaaagggtgcattagtattgtacaggggtcttgtaaagtcatcaaaacttgctatgaactctaattgccatttgaagctactgattggcagtggctctactctaaaactgctttttagcaattgtatttttttcctgattatattttttaatgtactttgatgtttatgctgatgagttttttatgtacttttggtgatgtttcagtcttatgtactcttctgacgtcagaaaagtaccactggttgtttgcagtcttattgtgtaatcagcctaccgcaggcttccatgtataataaagtaattaatattgtgcaagtgtaaaacacttctgttataaaagcagtgtttggaaaataagaaatattaaaaatggttacaaagtattagttaatttccttttcccactttcctccctttagctttagcagctaaagggtcaccaacttgtcattgcaagattcttagataatgtacttaatcttaaatacgctgagtactaaaaagtgtttatttcttatttcagtaagtgcggtaagttctattgagtacagagtacaagctgtaatcaaaggatggagaggacctttaccactgtatctcttaagctgtatgatttttctccagtttgttttatacaggttttgaatttctttaacttttattgtgtgtactgaatactgcatatgtattattctgattgtttgctctagtttactaccaataaaagtcctgttaatcgcaaaaaaaaaaaaaaaaaaaaaaaaaaaaaa

SEQ ID NO: 5113 - DNA, 3033 bp, Homo sapien
cccctgggccctgctccctgccctcctgggcagccagggcagccaggacggcaccaagggagctgccccatggacagggccccacagagacagcaccgagcctcacgggagctgctggctgcaaagaagacccacacctcacaaattgaagtgatcccttgcaaaatctgtggggacaagtcgtctgggatccactacggggttatcacctgtgaggggtgcaagggcttcttccgccggagccagcgctgtaacgcggcctactcctgcacccgtcagcagaactgccccatcgaccgcaccagccgaaaccgatgccagcactgccgcctgcagaaatgcctggcgctgggcatgtcccgagatgctgtcaagttcggccgcatgtccaagaagcagagggacagcctgcatgcagaagtgcagaaacagctgcagcagcggcaacagcagcaacaggaaccagtggtcaagacccctccagcaggggcccaaggagcagataccctcacctacaccttggggctcccagacgggcagctgcccctgggctcctcgcctgacctgcctgaggcttctgcctgtccccctggcctcctgaaagcctcaggctctgggccctcatattccaacaacttggccaaggcagggctcaatggggcctcatgccaccttgaatacagccctgagcggggcaaggctgagggcagagagagcttctatagcacaggcagccagctgacccctgaccgatgtggacttcgttttgaggaacacaggcatcctgggcttggggaactgggacagggcccagacagctacggcagccccagtttccgcagcacaccggaggcaccctatgcctccctgacagagatagagcacctggtgcagagcgtctgcaagtcctacagggagacatgccagctgcggctggaggacctgctgcggcagcgctccaacatcttctcccgggaggaagtgactggctaccagaggaagtccatgtgggagatgtgggaacggtgtgcccaccacctcaccgaggccattcagtacgtggtggagttcgccaagaggctctcaggctttatggagctctgccagaatgaccagattgtgcttctcaaagcaggagcaatggaagtggtgctggttaggatgtgccgggcctacaatgctgacaaccgcacggtcttttttgaaggcaaatacggtggcatggagctgttccgagccttgggctgcagcgagctcatcagctccatctttgacttctcccactccctaagtgccttgcacttttccgaggatgagattgccctctacacagcccttgttctcatcaatgcccatcggccagggctccaagagaaaaggaaagtagaacagctgcagtacaatctggagctggcctttcatcatcatctctgcaagactcatcgccaaagcatcctggcaaagctgccacccaaggggaagcttcggagcctgtgtagccagcatgtggaaaggctgcagatcttccagcacctccaccccatcgtggtccaagccgctttccctccactctacaaggagctcttcagcactgaaaccgagtcacctgtggggctgtccaagtgacctggaagagggactccttgcctctccctatggcctgctggcccacctccctggaccccgttccaccctcacccttttcctttcccatgaaccctggagggtggtccccaccagctctttggaagtgagcagatgctgcggctggctttctgtcagcaggccggcctggcagtgggacaatcgccagagggtggggctggcagaacaccatctccagcctcagctttgacctgtctcatttcccatattccttcacacccagcttctggaaggcatggggtggctgggatttaaggacttctgggggaccaagacatcctcaagaaaacaggggcatccagggctccctggatgaatagaatgcaattcattcagaagctcagaagctaagaataagcctttgaaatacctcattgcatttccctttgggcttcggcttggggagatggatcaagctcagagactggcagtgagagcccagaaggacctgtataaaatgaatctggagctttacattttctgcctctgccttcctcccagctcagcaaggaagtatttgggcaccctaccctttacctggggtctaaccaaaaatggatgggatgaggatgagaggctggagataattgttttatgggatttgggtgtgggactagggtacaatgaagggccaagagcatctcagacatagagttaaaactcaaacctcttatgtgcactttaaagatagactttaggggctggcacaaatctgatcagagacacatatccatacacaggtgaaacacatacagactcaacagcaatcatgcagttccagagacacatgaacctgacacaatctctcttatccttgaggccacagcttggaggagcctagaggcctcaggggaaagtcccaatcctgagggaccctcccaaacatttccatggtgctccagtccactgatcttgggtctggggtgatccaaataccaccccagctccagctgtcttctaccactagaagacccaagagaagcagaagtcgctcgcactggtcagtcggagggcaagatcagatcctggaggactttcctggcctgcccgccagccctgctcttgttgtggagaaggaagcagatgtgatcacatcaccccgtcattgggcaccgctgactccagcatggaggacaccagggagcagggcctgggcctgtttccccagctgtgatcttgcccagaacctctcttggcttcataaacagctgtgaaccctcccctgaaggattaacagcaatgatgggcagtcgtggagttgggggggttgggggtgggattgtgtcctctaaggggacgggttcatctgagtaaacataaaccccaacttgtgccattctttataaaatgattttaaaggcaaaaaaa

SEQ ID NO: 5114 - protein, 541 aa, Homo sapien
PLGPAPCPPGQPGQPGRHQGSCPMDRAPQRQHRASRELLAAKKTHTSQIEVIPCKICGDKSSGIHYGVITCEGCKGFFRRSQRCNAAYSCTRQQNCPIDRTSRNRCQHCRLQKCLALGMSRDAVKFGRMSKKQRDSLHAEVQKQLQQRQQQQQEPVVKTPPAGAQGADTLTYTLGLPDGQLPLGSSPDLPEASACPPGLLKASGSGPSYSNNLAKAGLNGASCHLEYSPERGKAEGRESFYSTGSQLTPDRCGLRFEEHRHPGLGELGQGPDSYGSPSFRSTPEAPYASLTEIEHLVQSVCKSYRETCQLRLEDLLRQRSNIFSREEVTGYQRKSMWEMWERCAHHLTEAIQYVVEFAKRLSGFMELCQNDQIVLLKAGAMEVVLVRMCRAYNADNRTVFFEGKYGGMELFRALGCSELISSIFDFSHSLSALHFSEDEIALYTALVLINAHRPGLQEKRKVEQLQYNLELAFHHHLCKTHRQSILAKLPPKGKLRSLCSQHVERLQIFQHLHPIVVQAAFPPLYKELFSTETESPVGLSK

SEQ ID NO: 5115 - DNA, 1830 bp, Homo sapien
ggggagttgaaacctaattttgtggcgtagcagctatgcagcttgaaatccaagtagcactaaattttattatttcgtatttgtacaataagcttcccaggagacgtgtcaacatttttggtgaagaacttgaaagacttcttaagaagaaatatgaagggcactggtatcctgaaaagccatacaaaggatcggggtttagatgtatacacataggggagaaagtggacccagtgattgaacaagcatccaaagagagtggtttggacattgatgatgttcgtggcaatctgccacaggatcttagtgtttggatcgacccatttgaggtttcttaccaaattggtgaaaagggaccagtgaaggtgctttacgtggatgataataatgaaaatggatgtgagttggataaggagatcaaaaacagctttaacccagaggcccaggtttttatgcccataagtgacccagcctcatcagtgtccagctctccatcgcctccttttggtcactctgctgctgtaagccctaccttcatgccccggtccactcagcctttaacctttaccactgccacttttgctgccaccaagttcggctctaccaaaatgaagaatagtggccgtagcaacaaggttgcacgtacttctcccatcaacctcggcttgaatgtgaatgacctcttgaagcagaaagccatctcttcctcaatgcactctctgtatgggcttggcttgggtagccagcagcagccacagcaacagcagcagccagcccagccgccaccgccaccaccaccaccacagcagcaacaacagcagaaaacctctgctctttctcctaatgccaaggaatttatttttcctaatatgcagggtcaaggtagtagtaccaatggaatgttcccaggtgacagcccccttaacctcagtcctctccagtacagtaatgcctttgatgtgtttgcagcctatggaggcctcaatgagaagtcttttgtagatggcttgaattttagcttaaataacatgcagtattctaaccagcaattccagcctgttatggctaactaaaaaaaagaaaatgtatcgtacaagttaaaatgcacgggcccaagggggattttttttttcacctccttgagaatttttttttttaagcttatagtaaggatacattcaagcttggttaaaaaaataataataaaacatgcatcatttttcatttgccaaccaagcacaaagttattttatactgactgtatattttaaagtatactctcagatatggcctcttacagtatttaagatatagcaaggacatggctgatttttttttataaaaattggcactaataagtgggtttattggtcttttctaattgtataatttaatttagtacaaagtttgtaaaatatcagaggatatatatatattgtttctacgacatggtattgcatttatatctttttactacagtgatctgtgacagcagcagcttcatgttgtattttttttactgaaattgtaaaatatccatcttaaagacatcaactattctaaaaattgtgtacaggatattcctttagtggtggaattaaaatgtacgaatacttgctttttcaaaaaaatgtattttctgttaaaagtttaaagatttttgctatatattatggaagaaaaatgtaatcgtaaatattaattttgtacctatattgtgcaatacttgaaaaaaacggtataaaagtattttgagtcagtgtcttacatgttaagagggactgaaatagtttatattaagtttgtattaaaattctttaaaattaaaaa

SEQ ID NO: 5116 - protein, 345 aa, Homo sapien
MQLEIQVALNFIISYLYNKLPRRRVNIFGEELERLLKKKYEGHWYPEKPYKGSGFRCIHIGEKVDPVIEQASKESGLDIDDVRGNLPQDLSVWIDPFEVSYQIGEKGPVKVLYVDDNNENGCELDKEIKNSFNPEAQVFMPISDPASSVSSSPSPPFGHSAAVSPTFMPRSTQPLTFTTATFAATKFGSTKMKNSGRSNKVARTSPINLGLNVNDLLKQKAISSSMHSLYGLGLGSQQQPQQQQQPAQPPPPPPPPQQQQQQKTSALSPNAKEFIFPNMQGQGSSTNGMFPGDSPLNLSPLQYSNAFDVFAAYGGLNEKSFVDGLNFSLNNMQYSNQQFQPVMAN

SEQ ID NO: 5117 - DNA, 2210 bp, Homo sapien
ggttttaagtgatattaagagtattggcttatatttaagaagtcaaaagataccactttatgaggaatgccagcttttggtgagaaaaggatttgattttcagagaaaacagtatggcaaactaaagaagtttactactgtaaatcctgagttttataatgaaccaaaaaccaaactttatcttaagctaagtcggaaggaaagatcttcagcttatagcaaaaatgatctttgggtggtttcaaaaaccctagactttgagctggatacttttatcgcatgtagtgctttctttggaccatcatctatcaatgagatagaaatactgcctttgaaaggctatttcccttctaattggcccactaacatggttgtccatgcgttattggtttgtaatgctagcacagaactgactactttgaaaaacattcaggactactttaatccagctactctacctctaacacagtacctgttaacaacgtcttcgccaactatagttagtaacaaaagagtcagtaagagaaaatttatcccaccagccttcacaaatgtcagtacaaaatttgaactactcagcctaggagcaacattgaagttagctagtgagttgattcaggtacacaagttaaacaaggatcaagctacagctctaattcaaatagctcaaatgatggcatcacatgaaagcattgaagaagtgaaggaactgcaaactcataccttccctatcacaatcatacatggtgtgtttggagcaggaaagagttacttgctggcagtggtgattttgttctttgtacagctgtttgaaaagagtgaagctcccaccattggaaatgcaaggccgtggaaacttctgatttcttcttctactaatgtggctgttgacagagtacttcttgggcttctcagtcttggatttgaaaactttatcagagttgggagtgttaggaagattgccaaaccaattttaccttatagcttgcatgctggctcagaaaatgaaagtgaacagttaaaagaactacatgcactaatgaaagaagacctgactcctacggaaagagtctatgtgagaaaaagcattgagcagcataaactggggaccaatagaaccctgctgaagcaggtttgagtgtgaaaagctgattcttgttggggatcccaaacagctacctcctactattcagggttctgatgcagctcatgaaaatggattggaacaaactctttttgatcgactttgcttaatgggtcacaagccaattctattgagaactcaataccgttgtcatcctgcaatcagtgctattgctaatgatctgttttacaaaggagccctcatgaatggtgtaacagaaatagagcggagccctttattggaatggctaccaaccctgtgtttttataatgttaaaggactagaacagatagaaagagataacagctttcataatgtggcagaagctacgtttacactcaagctgattcaatcactgattgcaagtggaatagcaggctctatgattggtgtgataacattatacaaatcccagatgtacaagctttgtcatttactcagtgctgtggactttcaccatcctgatattaaaactgtgcaggtgtccacagtagatgcttttcagggagctgaaaaggagatcattattctgtcctgtgtaaggacaagacaagtaggattcattgattcagaaaaaagaatgaatgttgcattgactagaggaaagaggcatttgttgattgtgggaaatttagcctgtttgaggaaaaatcaactttggggacgagtgatccaacactgcgaaggaagggaagatggattgcaacatgcaaaccagtatgaaccacagctgaaccatctccttaaagattattttgaaaaacaagtggaagaaaaacagaagaaaaagagtgaaaaagagaaatctaaagataaatctcattcataaaaagacatggtgtaaatattttgtatttatgtaaattcagactcattttacatgatatattttttatatttttattactctaaaccctcttattaaaaatatgatatttaaataacatagtaaacacatgtaaaaattttgttcttcaaaaaagtgtacaaaaggtagtataaaatcctactaataaaaataagcttttttctaagaaaaaaaaaaaaaaaaaaaaaaaaaaaaaaa

SEQ ID NO: 5118 - protein, 239 aa, Homo sapien
MGHKPILLRTQYRCHPAISAIANDLFYKGALMNGVTEIERSPLLEWLPTLCFYNVKGLEQIERDNSFHNVAEATFTLKLIQSLIASGIAGSMIGVITLYKSQMYKLCHLLSAVDFHHPDIKTVQVSTVDAFQGAEKEIIILSCVRTRQVGFIDSEKRMNVALTRGKRHLLIVGNLACLRKNQLWGRVIQHCEGREDGLQHANQYEPQLNHLLKDYFEKQVEEKQKKKSEKEKSKDKSHS

SEQ ID NO: 5119 - DNA, 2938 bp, Homo sapien
  Unsure 1299-1507: Unknown base
  Unsure 2016-2062: Unknown base
cgggcgatcagaagcaggtcacacagcctgtttcctgttttcaaacggggaacttagaaagtggcagcccctcggcttgttgccggagctgagaaccaagagctcgaaggggccatatgacactcctcccggacccctggacacacacagccctggagactggagccttggagcatggcaagtccagagcaccctgggagccctggctgcatgggacccataacccagtgcacggcaaggacccagcaggaagcaccagccactggccccgacctcccgcacccaggacctgacgggcacttagacacacacagtggcctgagctccaactccagcatgaccacgcgggagcttcagcagtactggcagaaccagaaatgccgctggaagcacgtcaaactgctctttgagatcgcttcagctcgcatcgaggagagaaaagtctctaagtttgtggtgtaccaaatcatcgtcatccagactgggagctttgacaacaacaaggccgtcctggaacggcgctattccgacttcgcgaagctccagaaagcgctgctgaagacgttcagggaggagatcgaagacgtggagtttcccaggaagcacctgactgggaacttcgctgaggagatgatctgtgagcgtcggcgcgccctgcaggagtacctgggcctgctctacgccatccgctgcgtgcgccgctcccgggagttcctggacttcctcacgcggccggagctgcgcgaggctttcggctgcctgcgggccggccagtacccgcgcgccctggagctgctgctgcgcgtgctgccgctgcaggagaagctcaccgcccactgccctgcggccgccgtcccggccctgtgcgccgtgctgctgtgccaccgcgacctcgaccgccccgccgaggccttcgcggccggagagagggccctgcagcgcctgcaggcccgggagggccatcgctactatgcgcctctgctggacgccatggtccgcctggcctacgcgctgggcaaggacttcgtgactctgcaggagaggctggaggagagccagctccggaggcccacgccccgaggcatcaccctgaaggagctcactgtgcgagaatacctgcactgagccggcctgggaccccgcagggacgctggagatttggggtcaccatggctcacagtgggctgtttggggttcttttttttatatttattccttatactattattcagttattctggaggacagtcttgcatctgtcacaccatgactgaagtgcaggtggcgtcacattatgtnnnnnnnnnnnnnnnnnnnnnnnnnnnnnnnnnnnnnnnnnnnnnnnnnnnnnnnnnnnnnnnnnnnnnnnnnnnnnnnnnnnnnnnnnnnnnnnnnnnnnnnnnnnnnnnnnnnnnnnnnnnnnnnnnnnnnnnnnnnnnnnnnnnnnnnnnnnnnnnnnnnnnnnnnnnnnnnnnnnnnnnnnnnnnnnnnnnnnnnnnnnnnnnnncacacagtgtgagccaccacccctggcctggggttcatttttaatgggaaaagccactgggggctctaactcgctgggtgactttggacaagcccctcctctggtcctcaatttctccatctgtattggacagaggtgctcctgggaccccttggaagcctctgcttgtgtcccacgtcctcttgatgccagggccacttcatctccaaaacacaaaaccaactgccaaaaccgtccagagcagtgtccaccccaccagtgtctttgtgggaagctggagaagaagtttacctcacacattctagacaaaacttagtccatttccttgaagacagttctctccagctgctccaaggcttttctctctgttccttccaccttggaattgctttaaaatatttccatccattatcctaatactatcttagtattctagcccttcccccttaccatgtagacctgacaaagcaaaacaaaagctcacctattgccctcaagaacagcctctnnnnnnnnnnnnnnnnnnnnnnnnnnnnnnnnnnnnnnnnnnnnnnncacggtgggagttgtatgccatccttttgaagggtgggaggaccctggaccagaaagcaataatggcataagattctgtgataccaggcatttttggcaagggaagttgccaacaatttttctggctgggatggcatagcacattgtctaggggtggattttcattcataaggcagctgttccctgaatggcttccctgggttatgtagaaacagcctggggaggaggtgatacaacatacttaatggggcctctgggcagaaaacagactgaatcctcaacactgccccttttgagggtctgtgatcctggaacttctctgatggactgggatgcccttaactgaggtctgctgtctggaaaggacaccacaggcccagaatgaaggggcatctggaccaatgacctagattcaacacagggcttggagctggtggtacaggctggttttggcccaatgtgtgttggaggctggaagcccctgaagacctaaactgcctggatgagcttattagggtgaattaatgagtctgtaatttgggaaccttaatgtgagacaccacttaaggagaggaacttggcccagcaagtgatcactctagaagtggacagctatgcactagactgcaccagaatctgttcaacagcgacaccttgtggtaaaaactgtagacgccccatcaggctggatgggaaactagaaacagactgtctcatctttggacagatatccctcaaatctcccaatctactccagggaaaagacacttcaagtgagagatattggacttcttgaaaatctaggcctatggaaaattaaagtgttaaatggaaaaattaaagagctatgagtctatttgtaatgatgaaacagaa

SEQ ID NO: 5120 - protein, 262 aa, Homo sapien [sequence omitted]

SEQ ID NO: 5121 - DNA, 863 bp, Homo sapien
ggctgcagagcaggaaaggcccatccgttccaccaaggattcaaagaccacattgttctttcaggaaagctgtagcaaggacaccctgtagccaccaggaaggagtccctgacaccgacctcaaccccacaagaccctgctgccactgaccacagccacccccggagaaggcctggtcccccacaactgtgaactgtcttgcccaagcctgctctgaacacagccattgggccaccacctgatgggcagaggcgggacagtggagaagcctggaacccaagtgggcctgtgacaggaactaagacttaaaaaattaggtgcttacctgggacagtaagttctgtctggcacaagcaggtaaccaggatggctaacaggctttgatagctgctcgtgaactaaaacagcagggtgtgtgcaggttcctcctctacggtcaggcagcaggctctgaaggctgatcctacaccgtcccagtgactccccttgacagagtgcccccaccccctaatagccaacagggttagcatggccagcacagatcgctgcttctcctccctgcagacttagccaaggaactccaagatgcatgactgggacaagaaaaggtgagactccacatggaaatgccttgccctaaaccttgaatgactgtgagatgcgatctgggagtgcatctgtcaagtctttgtgttttcttcactaacctcagaatactgggctctattttatcaagcgctgcagtttatgcctctgtcccgtcaatgctcagcttctgcaacaggacaccaaacttgatgcagaaagccaaataggtcaattatgcaaatctcctggtgccatattaaatttcttgacaatgg

SEQ ID NO: 5122 - protein, 48 aa, Homo sapien
LQSRKGPSVPPRIQRPHCSFRKAVARTPCSHQEGVPDTDLNPTRPCCH

SEQ ID NO: 5123 - DNA, 770 bp, Homo sapien
gttaacttgctgtatacctcagtgtaatgtccgttcaaggagtattaaatgaggatttccctgcgaggacatttactgtattgctacttaaattatggaagacaatatatcttcaactttaataaaacctattcagaaaattaccaattcagaattcggagttcttatccaggtgctctaactaacttcagggaaattggaacaataagttatgttacatgcacactcaaattctttattttctccactttaagcaggaaagggtaaaaactgttttggtactcaagcccagccttacatactgtgtttctctctctgtctgcatgcatattaaagtggaaaaattgtatttatatcttagttattaccatagtacctatgaaccttatcaaaattgcttatttgactggtgttacagctgctattaatctaagtctattgtttttctattttagtagataatttagttttaaaatacgtagggtttgagagcagatatatttatttaatctgttttctctagtaactattgctgaagggttaggcattcagtattcctatttgtcctaattttgaagttaaaaattttggttacagatagatagagggagaaaagttcaaaatgagtgagagagaactttatgcaggttgagataatgcctaaaataatgagctggccagactgtggaggtactctttgtattttgtaacattgactttgggtaaatgctttttcactgttaataaatatatatcctgtatacaaaaat

SEQ ID NO: 5124 - protein, 72 aa, Homo sapien
MRISLRGHLLYCYLNYGRQYIFNFNKTYSENYQFRIRSSYPGALTNFREIGTISYVTCTLKFFIFSTLSRKG

SEQ ID NO: 5125 - DNA, 814 bp, Homo sapien
gcatgagccgccgtgcctggctgatgctggagcttttatgtgacatggtgactcttaaaactggggagggacgtagagatgagagtttcacacaccagcccataggtgggatgtcaagacccatcggaagtgtcgctggcctaagagaagagcacttatttctcaccatggctgatctagaattgttccctgattctgaaagaagtttacactacactggtaagcagtactattagactactgactgtggccttctgtgcatatggaataatgatttctcagatttgtaggcttgaatgtgaatgttattttatcagtaatcagaataaattgcttatattcaggagttattttaaatatttaaatgaaatttattttaggcaccaagcaccacataaactcataataactatttgcaatgcattagcatcactcacggggtaatgaaaacataccttagctgctgtaaaagcaaagtcttccgtgtccgggtgggctgaaagtttttaataaaattttagctaaacatttgtttaagtgaatactaaggatggagcaatagtgttattttcctcaggaactgaagtctcatgctgaagtattttctccttaaaattaaatttttaaaatcagggaaggggaagggactgatgcaaagcagtccgttcatttctcagactgcgagcatccctactaacctcatcaccctcactctggtgatattactcctgggtctccacagaacaaaaggaacgcacctcgtttacaaagaaagtcctgattgatatagaacagaaatcttcctacttcagtt

SEQ ID NO: 5126 - protein, 77 aa, Homo sapien [sequence omitted]

SEQ ID NO: 5127 - DNA, 2879 bp, Homo sapien
  Unsure 1606-1623: Unknown base
  Unsure 2174-2248: Unknown base
gaggcttttcagcctcatttgaggtacagttacatatcttttgccttttgcccccgtgcatagctatctacagccaatcacagatcacagagtcactggactatagagctggaaggaagctcagagacaatgccaagggggcagaaaatttatcagaagccagtcccagtgcgtttcctccatttccttctgcaggaagactattttgggctgcctgaacattgtatcaaacctgctacctatactatggtctacctttcctccagtggaattacaaaggcactaactgaaatgccttctagaaacagagaaaacgaaactgtacttatttactcttgatacacagattatttataaaacagattgaagtaacctgttaactggcaaaaagagaatgagatcggatttaaatgtatggcagtaagtcctattgatccctccagttatctcagtatgactgcagtatattcattcactaaaaccactcactagataccaactacacatctggcactgcagatgtaaaggtcagtcacacatgttctgactttacagagttcacagtagcagtggaggatgatatatgtggaaacaaaaaaggcattgattctattcagagcactgttagggctcaaaggagagaggggtctttccacctaagaaatgaggaatagggtcatcatagaagtgaccttaagtcttaaaaattaagaaggggattccaagctgcttcagacagagacacatcgagctaaaacacagaggtatgaaagagcacagggactttaggaattgcacagttcattctaacaggaacaaaaggctcaaggggggcaagaaatgaggctgtatggaaagagattcaatgtaagcactttataaaatagattaatttctgattcaatgaagcatttcttgatcattgtgtacaaggcactacatgcatcatggaaaattcattaggatgcattgccagcacttgcagaactgatattattcagcctcaagctttccagtggccaaagggaaatgctgactgcttttcatatatttgagtcaaagattttttatatggtcaatgaagactaatataagggcagtgggattttcacagatgcatgccatgttgtcgagagcctcttagattttctcaactgtgagaaagaaaaacgaaaatgttgaagacgttgagtctggagaggggatactaatcactgtccagttgggcactggtgggaatggggaaatggcacaggaatgcaagcctctccaccctaccccccgaactccagccatacactcatcgtttcacaaaatataaatgagttagcattaaatgtttcagagtaaataattccttttcccgaaatgcatgaagatagagtaacagacttctcacactgtatttttagggtatggagaatttagaaggttaaagaattactgcttcaatttttcagttaaaaaaaaatcaggaagctctgttcattcaggctatgcaccatgtgcacagtcaagaattagcagaaaccctctgcatttacaaacactttgtgctataaaaaagtaatttttaaaaagccacgtgtgtgtgtgtcgtatatcnnnnnnnnnnnnnnnnnntctaacacgccaaggtttttgatacttttttacaaaaactacaagagaaaacaaatatacctgtccaaaccatatacttttaaaagagcatttttttttccatacaagctgttgttaatttgggggtaaagtgctgatttgcaaacttcatcaaattgttcccaagtggattctccttgtttgtctccccctaccaaccccaaagttaccatatttgatgtaagaatcaggcatgttagaatgttgtgtcacactaactgattctgctctttttgtcttgtcattcaagttccgttagcttctgtacgcggtgccctttgcagtctggtgtctcttccagaggcgagggggctgaggatggggtgctgcatctcactagctatactggcatcatcttggtaaacattcattcccatgccattggggttgcttttgccaaggtcatccaggacctcctcgattataaatctggtaaacattttcagtcttgctcttccttgacctgaaagctttacaaaaagtaccaatgcccaggtccagcgctggagatnnnnnnnnnnnnnnnnnnnnnnnnnnnnnnnnnnnnnnnnnnnnnnnnnnnnnnnnnnnnnnnnnnnnnnnnnnncagagaattactgctcggtaagtgggatgactggggagtgggagatcaaatactctaacgtctcccagcacctattctagagatcagtggggcagaaaggtagaaataaaaggtggaaagggatgaaatgggtaagtgtgggtgaattagttccaggaaaacggcaatctccactgtggattcagggaaggcgtcactgaggagggctttcttaacagttcaggtcagtggaagccaacttgaggcacacatcgtgcgcggcatcctccggggaggtcgggtcatttcaccccattttactgccgagatgacctaggtccagagacggtaaagagcggtgtacgactcacacaagtcgggggtcctgtgaaccgaggttgagcctggcgggccttcggcccgaggtctttaagcgaagtcaccagacccggggttcaaagcccagaggtaggcaggcggctggctctccgcctcaggcctggagagaacccaggggtatgaacctcaacctcgctcccgcgtccagctggaggggcggagctggctggccccgcctccgggttaaacaaagttctttacagactaggcgtgaggggatgttgcagtcttgttgccacttccgggcgaagag

SEQ ID NO: 5128 - protein, 71 aa, Homo sapien [sequence omitted]

SEQ ID NO: 5129 - DNA, 1196 bp, Homo sapien
  Unsure 129-421: Unknown base
gcataagctatttttatcctcatctatactgattgatttaaattttccgggcctgcagatgaatttggaaaagggcataatcaactgatgttgctgtagcaaatttggacttaagaaactacagacagnnnnnnnnnnnnnnnnnnnnnnnnnnnnnnnnnnnnnnnnnnnnnnnnnnnnnnnnnnnnnnnnnnnnnnnnnnnnnnnnnnnnnnnnnnnnnnnnnnnnnnnnnnnnnnnnnnnnnnnnnnnnnnnnnnnnnnnnnnnnnnnnnnnnnnnnnnnnnnnnnnnnnnnnnnnnnnnnnnnnnnnnnnnnnnnnnnnnnnnnnnnnnnnnnnnnnnnnnnnnnnnnnnnnnnnnnnnnnnnnnnnnnnnnnnnnnnnnnnnnnnnnnnnnnnnnnnnnnnnnnnnnnnnnnnnnncaggctgtgtttaatctttagaacccttacactaaaattttcagaaattatgtatgtcatttgtaaaatataagttttgtaatcctagataattgcttcacattgaaattttttagctattctgtgtaaagaatagctattcttttggcctaatttctgagaaattagaccgaaaaatctcctcaagtattgtaacagttgaaaatacttatattcaactaccaagttttgtttcattttgattttttgttataaaacatttttaagttatttgagaagtaattattagtaaaattgtatcttgataaatcatttcctcatcctgccattcccttttataaaacactgagtttttttattccttaagtcacatatcccagaaatgttttggttgtgaatcatttgccagcgagccaagggagaggcagggattcccttgaaatgtactcttacacttttttattttatttttaatgtacatttgtgtgcaccagaatggaatgtgctctttttaaagagctggacagtggttgcttcagacttctgaataccagaaagacttgccttttaatttttaaatattactttttacatcataaaatgtgttatcttatccatgtatttgaataacatcatatataaaggtagttttttgcttgtgcttagtgaagcctccttttttaacatacatttgatatgctttatgttctttttcttgatttttagtactgagaatttataagccaagaagtaactgacaatatgtttagcagga

SEQ ID NO: 5130 - protein, 28 aa, Homo sapien
HKLFLSSSILIDLNFPGLQMNLEKGIIN

SEQ ID NO: 5131 - DNA, 5142 bp, Homo sapien
  Unsure 3712-3747: Unknown base
  Unsure 4297-4326: Unknown base
gtgctgccgtgacactcggccctccagtgttgcggagaggcaagagcagcgaccgcggcacctgtccgcccggagctgggacgcgggcgcccgggcggccggacgaagcgaggagggaccgccgaggtgcgcgtctgtgcggctcagcctggcgggggacgcggggagaatgtggactgggtagagatgaacgagacttttctcagatgttggatatttgcttggaaaaacgtgtgggtacgaccttggctgcccccaagtgtaactccagcactgtgaggtttcagggattggcagaggggaccaaggggaccatgaaaatggacatggaggatgcggatatgactctgtggacagaggctgagtttgaagagaagtgtacatacattgtgaacgaccacccctgggattctggtgctgatggcggtacttcggttcaggcggaggcatccttaccaaggaatctgcttttcaagtatgccaccaacagtgaagaggttattggagtgatgagtaaagaatacataccaaagggcacacgttttggacccctaataggtgaaatctacaccaatgacacagttcctaagaacgccaacaggaaatatttttggaggatctattccagaggggagcttcaccacttcattgacggctttaatgaagagaaaagcaactggatgcgctatgtgaatccagcacactctccccgggagcaaaacctggctgcgtgtcagaacgggatgaacatctacttctacaccattaagcccatccctgccaaccaggaacttcttgtgtggtattgtcgggactttgcagaaaggcttcactacccttatcccggagagctgacaatgatgaatctcacacaaacacagagcagtctaaagcaaccgagcactgagaaaaatgaactctgcccaaagaatgtcccaaagagagagtacagcgtgaaagaaatcctaaaattggactccacccctccaaggaaaggacctctaccgttctaacatttcacccctcacatcagaaaaggacctcgatgactttagaagacgtgggagccccgaaatgcccttctaccctcgggtcgtttaccccatccgggcccctctgccagaagactttttgaaagcttccctggcctacgggatcgagagacccacgtacatcactcgctcccccattccatcctccaccactccaagcccctctgcaagaagcagccccgaccaaagcctcaagagctccagccctcacagcagccctgggaatacggtgtcccctgtgggccccggctctcaagagcaccgggactcctacgcttacttgaacgcgtcctacggcacggaaggtttgggctcctaccctggctacgcacccctgccccacctcccgccagctttcatcccctcgtacaacgctcactaccccaagttcctcttgcccccctacggcatgaattgtaatggcctgagcgctgtgagcagcatgaatggcatcaacaactttggcctcttcccgaggctgtgccctgtctacagcaatctcctcggtgggggcagcctgccccaccccatgctcaaccccacttctctcccgagctcgctgccctcagatggagcccggaggttgctccagccggagcatcccagggaggtgcttgtcccggcgccccacagtgccttctcctttaccggggccgccgccagcatgaaggacaaggcctgtagccccacaagcgggtctcccacggcgggaacagccgccacggcagaacatgtggtgcagcccaaagctacctcagcagcgatggcagcccccagcagcgacgaagccatgaatctcattaaaaacaaaagaaacatgaccggctacaagacccttccctacccgctgaagaagcagaacggcaagatcaagtacgaatgcaacgtttgcgccaagactttcggccagctctccaatctgaaggtccacctgagagtgcacagtggagaacggcctttcaaatgtcagacttgcaacaagggctttactcagctcgcccacctgcagaaacactacctggtacacacgggagaaaagccacatgaatgccaggtctgccacaagagatttagcagcaccagcaatctcaagacccacctgcgactccattctggagagaaaccataccaatgcaaggtgtgccctgccaagttcacccagtttgtgcacctgaaactgcacaagcgtctgcacacccgggagcggccccacaagtgctcccagtgccacaagaactacatccatctctgtagcctcaaggttcacctgaaagggaactgcgctgcggccccggcgcctgggctgcccttggaagatctgacccgaatcaatgaagaaatcgagaagtttgacatcagtgacaatgctgaccggctcgaggacgtggaggatgacatcagtgtgatctctgtagtggagaaggaaattctggccgtggtcagaaaagagaaagaagaaactggcctgaaagtgtctttgcaaagaaacatggggaatggactcctctcctcagggtgcagcctttatgagtcatcagatctacccctcatgaagttgcctcccagcaacccactacctctggtacctgtaaaggtcaaacaagaaacagttgaaccaatggatccttaagattttcagaaaacacttattttgtttcttaagttatgacttggtgagtcagggtgcctgtaggaagtggcttgtacataatcccagctctgcaaagctctctcgacagcaaatggtttcccctcacctctggaattaaagaaggaactccaaagttactgaaatctcagggcatgaacaaggcaaaggccatatatatatatatatatatatatatatatctgtatacatattatatatacttatttacacctgtgtctatatatttgcccctgtgtattttgaatatttgtgtggacatgtttgcatagccttcccattactaagactattacctagtcataattattttttcaatgataatccttcataatttattatacaatttatcattcagaaagcaataattaaaaaagtttacaatgactggaaagattccttgtaatttgagtataaatgtatttttgtcttgtggccattctttgtagataatttctgcacatctgtataagtacctaagatttagttaaacaaatatatgacttcagtcaacctctctctctaataatggtttgaaaatgaggtttgggtaattgccaatgttggacagttgatgtgttcattcctgggatcctatcatttgaacagcattgtacataacttgggggtatgtgtgcaggattacccaagaataacttaagtagaagaaacaagaaagggaatcttgtatatttttgttgatagttcatgtttttcccccagccacaattttaccggaagggtgacaggaaggctttaccaacctgtctctccctccaaaagagcagaatcctcccaccgccctgccctccccaccgagtcctgtggccattcagagcggccacatgacttttgcatccattgtattatcagaaaatgtgaagaagaaaaaaatgccatgttttaaaaccactgcgaaaatttccccaaagcataggtggctttgtgtgtgtgcgatttgggggcttgagtctgggtggtgttttgttgnnnnnnnnnnnnnnnnnnnnnnnnnnnnnnnnnnnnaatgtcaaaattgcacaaacatggtgctctaccaggaaggattcgaggtagataggctcaggccacactttaaaaacaaacacacaaacaacaaaaaacgggtattctagtcatcttggggtaaaagcgggtaatgaacattcctatccccaacacatcaattgtattttttctgtaaaactcagattttcctcagtatttgtgtttttacattttatggttaatttaatggaagatgaaagggcattgcaaagttgttcaacaacagttacctcattgagtgtgtccagtagtgcaggaaatgatgtcttatctaatgatttgcttctctagaggagaaaccgagtaaatgtgctccagcaagatagactttgtgttattctatcttttattctgctaagcccaaagattacatgttggtgttcaaagtgtagcaaaaaatgatgtatatttataaatctatttataccactatatcatatgtatatatatttataaccacttaaattgtgagccaagccatgtaaaagatctactttttctaagggcnnnnnnnnnnnnnnnnnnnnnnnnnnnnnnctcctttctgagactttgcttaatacttggtgacctcacaatcacgtcggtatgattgggcacccttgcctactgtaagagaccctaaaaccttggtgcagtggtggggaccacaaaacaaccagggaggaagagatacatcattttttagtattaaggaccatctaagacagctctattttttttttgccactttatgattatgtggtcacacccaagtcacagaaataaaaaactgactttaccgctgcaatttttctgttttcctccttactaaatactgatacattactccaatctattttataattatatttgacattttgttcacatcaactaatgttcacctgtagaagagaacaaatttcgaataatccagggaaacccaagagccttactggtcttctgtaacttccaagactgacagctttttatgtatcagtgtttgataaacacagtccttaactgaaggtaaaccaaagcatcacgttgacattagaccaaatacttttgattcccaactactcgtttgttctttttctccttttgtgctttcccatagtgagaatttttataaagacttcttgcttctctcaccatccatccttctcttttctgcctcttacatgtgaatgttgagcccacaatcaacagtggttttattttttcctctactcaaagttaaaactgaccaaagttactggctttttactttgctagaacaacaaactatcttatgtttacatactggtttacaatgttatttatgtgcaaattgtcaaaatgtaaattaaatataaatgttcatgctttacc

SEQ ID NO: 5132 - protein, 893 aa, Homo sapien [sequence omitted]

SEQ ID NO: 5133 - DNA, 2987 bp, Homo sapien
  Unsure 2082-2163: Unknown base
  Unsure 2349-2478: Unknown base
aaatcgccactcagcaccttttccagaagtcttcccttagcaaaccgtttgtttttcattgcatgtgtggtatattagtttgactgattttgttctcaaaaagattttgttttcactaagtgagaataataactcttaggttgggtttttttctgttctaagaataattaatttgacatagtatgtaatctcttgagttccatagttatggtcttgatttattttactattttgaaaaggaatgttacatgaaaaaaatggctgttttaccttttctgttttctttttctttagatgaaaggttgtatcaaagttcttaaggaccaacctcctaatagtgtggaaggtcttctaaatgctctcaggtacacaacaaaacatttgaatgatgagactacctccaagcaaattaaatccatgctgcaataacaattctggaataagcacctgctgtagacagaagacagtattctgcaatgactgagaatgcagttttttagtgattgcaattactatctcatttattcttgcttttatttctttcctctgttcctcttccctcttttttaatcatgttcttaagacttcttttctgtgccaaaatcagtaaagttacactctgaagggatatcatcctttcaaacgggccatctaaggcagctaattatgcattgcattggggtctctactgagaaaaattctgtgacttgaactaaatatttttaaatgtggattttttttgaaactaatatttaatattgcttctcctgcatggcaaaactgcctattctgctatttaaaaaccctcaatgactttattttctactgccgcctttttcatgtgcaaccaaaatgaaaatgtttaaattaactgtgttgtacaaatggtacccaacacaaactttttttaaattagtaatacttttgtttaaagttttaagtttgcattttgactttttttgtaaggatgtatgttgtgtgtttaacctttattaactaacgttaaaagctgtgatgtgtgcgtagaatattacgtatgcatgttcatgtctaaagaatggctgttgatgataaaataaaaatcagctttcatttttctaagtgtggcttggtttactgatgttttgtttttaggcttctgaagttttccccatgtatgtttttatggaatgcatatatacattacatgattttttcttcttttaggggagagccgggtcttttcattagaattttgatcattgtctatgtatatacttttaattgcctttaaaattttgctaagtatattaagaccagtgatcttttcattaactggacttttattcttgatttactcttgtatggatgtagtaatggaaggaaaaccacatccttgcttgattctccatttccaggggagcgggtagcaacatgaaggcagagtagccctttaatcatgggaagagagtgattataagagggacttcccaggagaaaagcagaggccatgatctcactagtggtagaaaactaacaggtttcagtttaagatcataaaacctaaatcatgaaatctaaatctcatggttggaacaaactacttaaaggttgtctagttcaaccatgccagtgttttaaatatttaggaatatccgaggtataatacaattaaaatgtttaaccatggaagagaatcacagaggcttccatcagacccttctggattaatagggccagatcatggcacacacagcttctcaagatcacatccctgctgatctctctggccctcctgatcactgctcccccacttcacaccctgtcctgcagccaggccctactgcttgctgttcacaaattgttccatgtgatgtcacttccttagctctggtctggctggtccctgaacctgacattcccttcctccccttgtgaccctctaatgaacgccaactttcatctttgaagggttagcttctattacctccttcatgaagccttctggataacattggccatatccttctaggcatcttctaagaatagtgtaataggctgaatagtggcccccaggagatacattcactgggaatctccacnnnnnnnnnnnnnnnnnnnnnnnnnnnnnnnnnnnnnnnnnnnnnnnnnnnnnnnnnnnnnnnnnnnnnnnnnnnnnnnnnnaattcaatgactagctcttacaaaacaacgggaaatagacacacagagctgaaggccatgggaacatggacgcagagattagagcaatgcatctatgagccaaagaaccctgagaattggaggaagtcactagaagctagggaaaacaggcatgtcacagattctccctcagagtctcgagaaggnnnnnnnnnnnnnnnnnnnnnnnnnnnnnnnnnnnnnnnnnnnnnnnnnnnnnnnnnnnnnnnnnnnnnnnnnnnnnnnnnnnnnnnnnnnnnnnnnnnnnnnnnnnnnnnnnnnnnnnnnnnnnnnnnntgtatctcgtaaaacacctctgatacttacctgcgcttgtggctgtgttttctgatactatgagagccgtagtatctggataccggagagtctgcgaacttgagagaagggccgtgtctgattttccttcagtgtcccaaggaaggatcttgcacagtacccagatttggagaggtgccaagtgaatgcttcggtggactgaatgaatacaaatcaaaaataatgatgcagcgggaatggatgcagtaagattgctgtggcctatgcagttcacacagttcacactctgcatgttgaggagtaagtggacagatctcttaagcccaggggctagcaaaccggtctgtgggccaatttactcaccgtctgtttttgtacagcttgtgagctaaaaatggtttttaaaaaggttgaatacaatcaaaagaataatattttgtggcatgagaaaagcatatgaaattcaaattttagtgttcataaataaaattttattggaacctaaaaaa

SEQ ID NO: 5134 - protein, 106 aa, Homo sapien
  unsure 61: unknown amino acid
  unsure 62: unknown amino acid
  unsure 63: unknown amino acid
  unsure 64: unknown amino acid
  unsure 65: unknown amino acid
  unsure 66: unknown amino acid
  unsure 67: unknown amino acid
  unsure 68: unknown amino acid
  unsure 69: unknown amino acid
  unsure 70: unknown amino acid
  unsure 71: unknown amino acid
  unsure 72: unknown amino acid
  unsure 73: unknown amino acid
  unsure 74: unknown amino acid
  unsure 75: unknown amino acid
  unsure 76: unknown amino acid
  unsure 77: unknown amino acid
  unsure 78: unknown amino acid
  unsure 79: unknown amino acid
  unsure 80: unknown amino acid
  unsure 81: unknown amino acid
  unsure 82: unknown amino acid
  unsure 83: unknown amino acid
  unsure 84: unknown amino acid
  unsure 85: unknown amino acid
  unsure 86: unknown amino acid
  unsure 87: unknown amino acid
  unsure 88: unknown amino acid
  unsure 89: unknown amino acid
  unsure 90: unknown amino acid
  unsure 91: unknown amino acid
  unsure 92: unknown amino acid
  unsure 93: unknown amino acid
  unsure 94: unknown amino acid
  unsure 95: unknown amino acid
  unsure 96: unknown amino acid
  unsure 97: unknown amino acid
  unsure 98: unknown amino acid
  unsure 99: unknown amino acid
  unsure 100: unknown amino acid
  unsure 101: unknown amino acid
  unsure 102: unknown amino acid
  unsure 103: unknown amino acid
MTSSYKTTGNRHTELKAMGTWTQRLEQCIYEPKNPENWRKSLEARENRHVTDSPSESREGXXXXXXXXXXXXXXXXXXXXXXXXXXXXXXXXXXXXXXXXXXXCIS

SEQ ID NO: 5135 - DNA, 983 bp, Homo sapien
gccgcattcccggtgtcgacttactagctgcaagcctctgcctgccttcctgcgcgccgttccccgctagtcgctgctgctggcgcgcactcgccgggtttttcctcccacggcctcgagatggtggtgaatgtggcacggaggagccgggccttccaacccggtgggcccgagctccgaaaggccccctcggcagtgagaggggcgggagcccgcgggggccgcgcccttctctcgcttcggactgcgcaacgctgcgctctgggctgacaggcggataaaacggtcccatcaagactgagaaaaagcacaccagctattggcacagcgtgggcagtggggcctacaggatgactgacttagtctacagagatcccggcgtacttaagcaggtagtaatgatggacagatgaagactcttaagatgacagaaggtgatttttctggtgatcgaggacttccggggtaatgacagtgatgaaatgcaggggacctggttgcccccaagtttcctggcagtgtgtgatactgaggaggtgagcttgtttctggagctgtgctttaaggtaaagttgatcagcttaatcctcctgatccctttcccatcggatctgaacactggtcttggtggtcgtaaaaggaggaaaagtaatagtgaagctggcctaaatgttgtaatctggtatatggcatgtgggctagtttcagacaggtttcagagatggttggatctctgaaattgtaaaatgaagtataatcttaggctaagggaaggatgcgtgtgaagctctggagattcatgttacatgtaaagctgtcctcatttgtgactatggacctatggagttgggacaatctctatgggaagcagaaggcaaggaccccggtcattttaggtagaaacaacagcatgctaatgcaaaaaattatgcagtgtgctactgaacttcagaggtgatcaataaaagaagaataaaaagact

SEQ ID NO: 5136 - protein, 92 aa, Homo sapien
RIPGVDLLAASLCLPSCAPFPASRCCWRALAGFFLPRPRDGGECGTEEPGLPTRWARAPKGPLGSERGGSPRGPRPSLASDCATLRSGLTGG

SEQ ID NO: 5137 - DNA, 2138 bp, Homo sapien
aatcaaaggcagagctctcagagctgggaaggaggctctagatggcggctgtgccttagagagagcgcgctctgctccctgcctttgcctcactttacgcaactttccctaactttcgggcagcctcagggggcccccgtagccccctgcctttcctagggacttactggggtcgattcgaacctttttttgggagaaaagcagcttttaggagctttcttttcgtgccttgttggaaagaagcagccgtactgagagcccaggtcgttgttttttccagcttagaagccatggcgcacctccatttttgtgcgctctcctaatgaggttttttttctttcggacctgttttagtattaattattgctttatttttttgaccagttaacatatttgagggttattttatttatttttcgttttttaacggaggattttgcctttatttttaattatttgggatctgatatttttctactagtagataggactcttggtttggacatactacatggatcagtaaatacctgggcacaggacttcaaagcaaacacagattccccctcccccttaatatttaagaattaaaagatgatgagaaataaggacaaaagccaagaggaggacagttcgctacacagcaatgcatcgaggtatgagctatcaactttcttcctttttgtctttttttttgggggagaaacctcagcttacaattgtttaccttgacagacatggattgctgtctgttttattgtgtttttctaatttggattcgttttttaaagcatgaccttgagattgctaatatgccacaccctaattttttggtagcaatttatgaaagttgagttgtgacttaaggcctcttacagcagtcaaaaggtaaggtacctttattcaaaggggcctttactgtaatgtacagtttttctgtcagtaaatttcagtttttaggtttttgtactgcagaaaaatgaccttgtcggtttagccattgctgcattgcaccattttacatacaaggcaaattttttctttgaagaatccaggatatctaaacttgtaactgagggccatagagaagccttgtagtagtaaattatagtaaatagacatatcagaaagttatatgaatgaaaaaatgtacatttaaaaacaaaatcacttaaaggaccctttgactgatgcctctcagtttatatttttatgtgactttatatttcttttgatacacttgacattttaggaaattttgatgtgatttatcaaaacctttacttgatggttagagttcctgcatttatgaaatcaaatctgtaataacagaaatcctggaatactcttaatatatacttctattttgtgtttgttactgtgattaatatttgcagttgtatattttacatttaaattattttaaggtttgcatttgtatgcttaagacattgatttcctgttggtagatgtattttatcctcacaatttagatgtagctgctttaaatttattgatgtatttcgacagagtcgtctggaatgctttatcttctgaagcttaaaaatgtactgtttgtgcaaatcatgatctgtttcacattccttggagtaccttgttagtgatgaagtaataaagcctctaagatgtttttgttgtatgacctctgtatattaatttttaaaagtacatatgaatgcattttttgatgtgttctttatgcattttcatattataaattttaaatcatgcagtttaacaaggatgtgattcattatgtggttttccttcccaatttttacttttctaatttttataaataatacacttttctattaggctagtgaatttgaaagttttgaacatgatgtgttactaatatgctgaattctatttattttatttgactgaaagcatattgagccttgctttagaaaataagttaccaaatttttttgcattgagttgtcacccagtttgtagtgctgtcttaattgaattgcccatgtaaattactagattaaattgaggacagaaaagttttttactcatcctaagctgtttttttctggaaagtaatgacaatttgaagaaatgagaacctccagatatatttggcaaattattaaagattcagcact

SEQ ID NO: 5138 - protein, 52 aa, Homo sapien
NQRQSSQSWEGGSRWRLCLRESALCSLPLPHFTQLSLTFGQPQGAPVAPCLS

SEQ ID NO: 5139 - DNA, 3579 bp, Homo sapien
gagaccatatggactgcaaagcctaaaatctatctggacccttacagtaaaacaatgaccctgggttttcatggcaccccaatgcctttttggtgacttgcaggaatacagattcctatattcccgtttgtttttttttttttctccttagcttaaggttcgtattcccatttgcttctgagaaagttaggaaaattttgttttatgttgcagatgctctcacaacataattgtgctggagatagatacacttagtgaaattttcctacagaactaaaaacgcaaattgcatcactcctaaaaaaaagaaatttagagtatgaattgagttggttgagagtagaattaaaaagatttctagcactttgagcatgttttaagaaatttgatccttacatttaaaattatgtaaatgacatctttcactggcatttgctcacatttaagtcaatctacagctgttacttactaagctaagaaataagaagatccctatggttctgaatctctcataatattctgaagtaatttatatcaattgaattttcattaatcattttaggaaatattatgttttattttgtggcattatatgacaatgactttctcaacaatagctcagggaatacgcaaacagccagctcttttatgtaagaaagccattttctaatccccacgctttcctgagtgttacgtattttatttctttgaaaagagagggccttgagtaaatgctttcgtttgctttccttacatatttagaaatccaagaagggcccttgtcttagtctatttctgtcacagagaaattgttcattccaaaatatccaccttaagggaagctagtgaccgagatatggagaaaaacataggcattcatgacctttgtgtttccgtttgactttcaacatctgtaaccaaaaggtcacaaatgaaatatttagtagaaagtgcaatatcaatttattaggagtacctaaaattataactctaaataatatacagcaatattattgctctattattacagcaatcaataatataatatagccactaggatacactcgctgtagaactcagaacaaaagatatcaatcttctgccagtccgcatcattatgtgtagcagagactttactggaatgagtgaggggaaagataacaaaatgtagattaggattccacattctcccctgcccatcttcttgattgctcagtttgaagacgatcattgatggacaaatactttagaaatgaatgaagtcaatagctaatgtttctcccagaaactaaacaacatagtttaggggatattaggcctacattctaatcacattgtaaggaagtgattttctaattttgaagcttcccaggagcagccccctccaggaacaattttccctgtgaactttcactgagaaactattatatgccatggaggagtcaaagatgaattaagtccaatgctatcctccaggagtgagctttgtagttggagagaaaagccaaccttatagatacaacctgtacatatataacctatgctgcatttaggcagatgataagccctaggaatggaaagagggaaaagctccctttcgccaggaatgatgaaggaaagctttatggaaacacaggctgtatgtgaaagatgggtgaatctttgcaggtagggaagaagtagggggcatgtctggctgagaaccggcctgatcatagagtggaaaaatgaaaggcagaggtgaaggaagaatactaaatgtgaaaggctgaaatacacagggaagtgttgccagtgtgcaacagaatctcatctcgtgcaaaattgaattagacttccttactccttccttactctgggtaggtccatgtgcagcctttcctcagagcatctagcctgacatacttggctcatctgctgtgcttctaagccaaataaaaatcatcaaacacatcgaagatatttttgggagtcaccaggttaaagcaaagcctcagtcactgaaagcaaaaactgaattggccaggtctccactgacaaaacagagtaaatgatagtatgacagataatttcaagttttccaagactccaatttctgaaaaatgtctcatgactccaaaaaatcacgtacttcctaaaatgttgccagtggaggaccgaatcaaggttattgctgacctcattttttcaaccttttcagttatttgacctgaataggcaatcccccaggatttctgattgaattctacctgaaagtttagattttaaaagacaacctgtaggaagctaagtctcaggcaacaaaatttaaaaccatcagaacttgtttctccaaacatcaacctgctcctgtcaagtcctttttcatctctcccttttgtccctttacatactgttttgtaagttccttttgatatcatttattgcaggcagtatttttacatccatcttcaagaaacttgggagacatttagacatttagtatgtgtacttttagttgtcttgcctctttatttcagataatgcctgtgattagtgaatggcggcattattcctgaagacaaatgaaggaagatagggagcaagattgactgtcatttgaatgatggaagagaagtagaattactgtgaggttacaaaaatcgtaagttagcagacattgagaaaggaaaacttcctacttgggcttttcaggcttatgtgacattatctggatgtgttttctagtctttcctaaaggagaaatttttattcctgggttgctgaaagctttctggactaaaaggatataagcagctcaatagcagcatagaggattagattaatggaacagcactgcatacaggaaagctacatctccaatagtttaggctgcaagtcagtagccaaacacaagagcatgtaagatttggaggacaaagtataaatattttaagtttacacaaccaagattataggctaccttcccaacttctaatttgaagagcactgaaaatggagctgtgaacacttcatttttaaaacctgacaatatggtgctattgactacttaatacaaagatatattacaatatttttaggtaaatgtattaagtctggcctgggcataaatgtacatacagaaaatgtttgtagagaattcatcaaaatcatgcccatttgctgttgtagagctacagtattcttcaatggtggtgactgaccagtgagtttctacttcttacagatgggacacaacagtcatgggctgtctcagctgcccaaagcctgaggcagaccacatgagagctgtggcttcttcttggattcaggttggataacccaattcagtaattaaatatgtaaattttggggggggttggggggtgttttctaggaacttgaagagtacgtgacattataaaaaatgggtgttggaagactaattgtagaaatttgacctgagggccaatgttacttggtgtaagttcactcagacagacatgtcagaacatgcccaaagaagcctatatcttgctgctgggaaatgtaaagcagttggcatgtagaatacgataataaatcatttaagaaaccacc

SEQ ID NO: 5140 - protein, 31 aa, Homo sapien [sequence omitted]

SEQ ID NO: 5141 - DNA, 1483 bp, Homo sapien
ggctcctccttgagggagagagctgaggaggtggcattcttgcttccctgactcacccaaaggaagatttcacagccccttggctgggtggggagttatgctgggaagtcttccaggccccctgggggtgggaagatgctcaatgttcaaaggagatggaacgaggaaaacagttaagcaacgatggactccagggggaaaaccggagaagaagaaactgtaattccagtccgtccacatggcccagcagtgaacgacaattgcatggtcagagagagcaaaagcaccacgccgactgaaagcagctcgaatgtggtggggcagtgggagataatgccctcatctaccaaaacaagatctgccaccttcgcagaccactaaacctcattcctccagccagctccccacccccatgaaggccaactgaccagagagcagggctcccgagggtcgggtcgggtcgggtcgggttgggtcgggtgggtgcctcttaccctgaggctctgccctggactcggagtccacttgctgtcaaagcatgcgactcttctttctgatacttgacatatttcttttcccgttcaattcatggtttctgcccaaacggagccacgtgaggacgtctttggggatgtgtctccaagaaaagtgtgggctgccttcctcaccctggatgcctgtgggctgccttcctcaccctggatgcctgtgggctgccttcctcaccctggatgcctgtgggcagccttcctcaccctggatgcctgtgggctgccttcctcaccctggatgcctgtgggcagccttcctcaccctggatgcctgtgggcagccttcctcaccctggatgcctgtgacttggtttccatgggggcttcctaagctcagggaccccaagcctccatcaaatctaatgacccgccttgtctctgaacacacctgtgttgtccccgagcccctcaccaaccccctctgcaacccggcccacgcatttcccatcctgaagggtccagctcataggccggcccatgtgttccctttacccctgctttgtccctacctggtggggagctgtcccttctgggccctagtgtggcacttcacacacaaatgtgtcctgtgggtggtatctgggcctccccctgcagtgaggggatgaccaatgtgcagagctcactgggcctggatatgggctcgggtggcacagaacagagagaaagtgctccgtaaaagtgagctgcgatgcggaggtgggcaagctcttccctggagggggaagagctctcaacccagagggatctgaccaggaaggttcaccccccctccacccaggaagcccctgcagacagtatgtgttttaggctttgctggccaaatggtctctgccgtgactactcagctctgccattgtggctgcagagtgaccatagaccttctgaaagtgaatgagtatgactgtgttccaataaaactttattgacag

SEQ ID NO: 5142 - protein, 206 aa, Homo sapien [sequence omitted]

SEQ ID NO: 5143 - DNA, 755 bp, Homo sapien
catcaccagtgtgtggagcctgccacacccacccgctgccaaaccacggcctttacctgtgtcttccggtgtttcccgtgcgacccatcctgtgggagtgcctcgtgggctgccccagagttcaccccacactcagcagcaccaatggtgaagatgacaagatcgaagactttccaggcatatctgccctcctgccaccggacctacagctgcattcactgcagagctcacttggccaatcatgatgaactaatttccaagtcattccaaggaagtcaaggacgagcttacctctttaactcagtagttaatgtgggctgtgggcctgcagaagagcgagtgttgctaacaggactgcatgcagtcgcagacatttactgtgaaaactgcaaaaccactctgggctggaaatacgaacatgcttttgaaagcagccagaaatataaagaaggcaaatacatcattgaactagcacacatgatcaaggacaatggctgggactgattggacagcatctacccaacccagtgtccacgtgaacgccattcaaccgaacattcttcccaagcgtgagagagtgactgacacttggttccatccatttaggggccttgccatccggggcatcctcccaccctgacgccatctttctggtgaccggcctctaaatcgctgtctctctgtctctttgctttgtatctgtttgtgagttgatcctggcttctctctctgttctagtttttggctgaaaacaa

SEQ ID NO: 5144 - protein, 119 aa, Homo sapien
MVKMTRSKTFQAYLPSCHRTYSCIHCRAHLANHDELISKSFQGSQGRAYLFNSVVNVGCGPAEERVLLTGLHAVADIYCENCKTTLGWKYEHAFESSQKYKEGKYIIELAHMIKDNGWD

SEQ ID NO: 5145 - DNA, 1799 bp, Homo sapien
gggcatggttctcaagtatttgttcaattagcttggggaagaaatgccaaatccactttgaggatgagtcttacgacacagatccacccacatgtgctcttatctggaatttgggacaaagcaatgcacaggccctcattcctgatgtggcgccctccagacatggctgcccaggaaggacggccactttagaagtgggacgtatcaccagtaagcttgaatgattaggatcgcaggtggctactgcattctgccgttcgtgaccgtgttctagcctgtagaccacccggctaccttcattcaccagtttttatccttcaccttttccagtatcgtgttagccactagttcttgagttttttggctatgatgtgtacgtttatgtatgtcattcatggactttcaactagaaaaggtaatgataaggttttctgaagaccatttgtaaattgtccatttaaccatttttcagcttgctttgaaacaaaagtcacacctactatttttctatgaattagggaatgagggggagatcattcagttttacttttctttttgttgaaattttgtacccggattgcagttggcacttttcctaaaacagaattgtttcccacttaggtgtcagaatgtacctttgaacttccctaagaagcagcaggatctttttaactctctctggtctgtttagactttgaagtcccttctgtagaaaagtctcataactgagaaggctctgttttgggccgggtgggtctgctggcctccactcactgtgctgtttcctttgagtggcacacttgggaagctccggggcatgtgaaggagctgcaaacatgagaactaatgaaccaaggcggctgccaccaggaaggaacagaacgcaggcattcaaccatgacgtctgcacagtgttagtaacatgtcattgtggtttcgttctcactgtggtaaaatttatttctgagcacttaaactgtgttgcatacccctaatttttttttttttctgtatcttccttgccctcaaataccctgaggtgataaactgttccagttgtagccaactaccactgctaggcctcaatgtaaattcagttgaaatttgcaattctatcagcaatttaatgtattgaattcagatcatcatttgtcattttaaccgacaaccacccaataaatttactctgcagttctgaactcagcattgtgcccattttttactgcaagatggaccctgtatgccaggagacatgttattatcaacaattgggaattttttgaatttccttttaggtaatattgattcactgtaattttctaagtgatcaaaacccatgagattttgttatttggcttggctttcattctctgcctgcccattaaagaatattctattcctaacacataaaacattttacagtcaagcagtgcaaattacagtgcttttctattttttttttgagagccttgaataaattgaagaaaactttaaaccaaaattagagacgagtcatttaagcttttctgaatggaaagtattaatattttcatttttctagtataatataataaaatgaatttttttaaaaaagctactaagtacccatcaactttttcatattgtgaaatgaaccaggatcttaacagatactatcatcgctgtccttttttggctgtttaatatctagttcatgtaacaaatttacaagagataagtctcatggttttttttttcttttaataggcttttctgcaattttttggaaattgagttattacttggatttaaccctgata

SEQ ID NO: 5146 - protein, 73 aa, Homo sapien [sequence omitted]

SEQ ID NO: 5147 - DNA, 1602 bp, Homo sapien
gacttaggctgtgacccacagaaggacgccagaaagtactcaagacattcacggtgccccggtcagcactcgccatgacgaagacttctacatgcatataccacttccttgttctgagctggtatactttcctcaattattacatctcacaggaaggaaaagacgaggtgaaacccaaaatcttggcaaatggtgcaaggtggaaatatatgacgctgcttaatctgctcttgcagaccattttctacggggtcacctgcctggatgatgtgctgaaaagaaccaaagggggaaaagacattaagttcctaactgccttcagagacctgcttttcaccactctggcttttcctgtatccacgtttgtatttttggcattctggatcctctttctctacaatcgagatctcatttaccccaaggtcctagatactgtcatccccgtgtggctgaatcatgcaatgcacactttcatattccccatcacattggctgaagtcgtcctcaggcctcactcctatccatcaaagaagacaggactcaccttgctggctgctgccagcattgcttacatcagccgcatcctatggctctactttgagacgggtacctgggtgtatcctgtgtttgccaaactcagcctcttgggtctagcagctttcttctctctcagctacgtcttcatcgccagcatctacctacttggagagaagctcaaccactggaaatggggtgacatgaggcagccacggaagaagaggaagtaattgcacaccattttccaagaaccaagaaagaagaaaacacaagagatttttctcatcttttttttttttttttctggtggagggaggtggtggaggaacatagcaaagtaggagggacagagagtgatacttaaatttaataagaggttcgtgaaggtagcttaacttgagaactcttggttttttgaaaggttgactgcacatgccaaaaacaactcctgctatctcagaattaattatctttgaccttcgtggaggatggtctctggttaaaatctgaccaaagaaactcacataaacttggtgttagagaacatctagagagagagagaggaacttagagtcatttaaactcttcagtttacagagaaggatgctgaggacctagatgagaagttacctgcaaaaggcaaaagggttacttagtgtcagaaccaaggcaatgacttctctctcccagatctcctagctactggtcctgggccatttttttttttttaaataatcccaacttttctttaaaagacaagcatttcagtaagctagttattttcatgggttgctcatccatttttttcagtgatctaaaaatgtagggagatggctactactgaagttgtctgtctacttgggataatagcaaattaattgaagacaatgggaaagtaagttataaaaaatactgggaaatctgtttctcttctgagcaagcattcagggcaggtataaacatcaaacatagtgacattgtcaaaacctcttccatttgaacattgattaattcatcaaataaatggtatagtaacaaaaaaaaaaaaaaaaaaaaaaaaaaaaa

SEQ ID NO: 5148 - protein, 230 aa, Homo sapien
MTKTSTCIYHFLVLSWYTFLNYYISQEGKDEVKPKILANGARWKYMTLLNLLLQTIFYGVTCLDDVLKRTKGGKDIKFLTAFRDLLFTTLAFPVSTFVFLAFWILFLYNRDLIYPKVLDTVIPVWLNHAMHTFIFPITLAEVVLRPHSYPSKKTGLTLLAAASIAYISRILWLYFETGTWVYPVFAKLSLLGLAAFFSLSYVFIASIYLLGEKLNHWKWGDMRQPRKKRK

SEQ ID NO: 5149 - DNA, 680 bp, Homo sapien
atgggtgtatgttttcacatctctcttaaaaacaattagtctgacaaatcaaatcaaatcatttatgtttatttacgtagaacctcttgcaatcctgtttggagagtgcaacttacgatcttagtttaattgatcaattaggagacctctgaataaagactaactccccaatacatccataagaatttttctatgagcctgtcatttagatgtgataagcaatcaatttcatgaagactgtttcagtcttgtagaaattgagttgccatcacatagaggatttcttgtcctctgcattgtttaaaggacaactacaaatcatgctggataagagtactcattcaatcttttaggattcaatgaagtagcattttaaatatgtaagttattttatatattgtctgtcttttaaaattggactttgcttcttgaaaaaagtttgtcaaatcaccaaaccatatgactgtccattcattgtagcctatgttttctattattaagaaataattcatactgagagtaaaagaaaaagaatgtattttgtgtgcaaaggatgaatgtattaaaaactttttatttgtaacaattttttaaaaaaactaaatggaaattgctttcccatgtacttgtatataaataaacatttcctgttgcccacatttggaaaaacaaataaaagg

SEQ ID NO: 5150 - protein, 40 aa, Homo sapien
WVYVFTSLLKTISLTNQIKSFMFIYVEPLAILFGECNLRS

SEQ ID NO: 5151 - DNA, 774 bp, Homo sapien
tttgtctcctggtattcctcagttctttatttggtggttaaattatacatattgctttagagagcaggtaggtggccatgtgttcagcagtgtgtccttaagaaaataccatctttctaagccactggaatttttactttactatttttaacattaatggatgtcaggtcatcaacctcaagtctttacatatccatgtatattccatatatattgtttatataggcccaagtttctccttaattgggatctatatactaccagcacaacatcaaaaacatgtaattgaatacatcagagctatatatgtaaggaaatgactggtgaccccattatcatcattgttgaattcatgttaagtagaccctctaggggaccataaggcaattgagcacataacgaaaaatgatgcaataagaatgtatgcactctctttgccaaatgcatgtgcttttgtgtaacgtggatgtaaacagaattgcagtgctgccgaaattcttgatcttggctaagagagtatttttccccttgtaattatgactctgagataaaattgccattttgaaatttccaaagtaacaactttttttattttatgaataaacttgggattgcaatttctctgatctgacaatcaataactttaacaaagatctaaataagtgtttcaaggaaagttttcctaagcaaatgtaatattacctcatttgggcatcattactctgttaattctatatcaaaggaaataaacttgctacttgcactaaatgaaaa

SEQ ID NO: 5152 - protein, 49 aa, Homo sapien
LSPGIPQFFIWWLNYTYCFREQVGGHVFSSVSLRKYHLSKPLEFLLYYF

SEQ ID NO: 5153 - DNA, 329 bp, Homo sapien
  Unsure 11: Unknown base
  Unsure 112: Unknown base
  Unsure 190: Unknown base
  Unsure 211: Unknown base
  Unsure 320: Unknown base
attccaaattntttaatttaacaagtcaacaccttatcattaagcacttgagatcttgatacatattcaagttacacatctaaaaggtttccactttgcaagcaaacatggnaatgcagagacctcctatttatgaaatcatgtaaaatggttcttcagacacctctatgtcccactgatgctcaaggantcaacatttttcaagggggtnttcaaggcaaatgacaaccatcttatacatgcagttaaacatttttgcttttccaatgatttgcagggtaaatatgtgtgtgagggctgatggggttctggggcggggntcccaaggg

SEQ ID NO: 5154 - DNA, 386 bp, Homo sapien
aatcagagcacaagaagtaccagtccaccaactcacattttctatattaataattcttaactaaaagaagttccatattcgacagcattttagttttttaatagtacttattagcatcaaccatcttgataatcaccaagggaaaaattaaaaatacctagactgcaataaacctttaaattggattttcagtgagaatttagaagcaatcactacctttctcgtttcatttgtgtaaccatgcagcataggcactgtgttacatcatctttacgctttggtatttgaacttattacagaattttttctctaaattggatgtttctttatatgaccttggaaactgaagtgatcttagcattaaacaaaaatgctttttgaagcaa

SEQ ID NO: 5155 - protein, 16 aa, Homo sapien
MTLETEVILALNKNAF

SEQ ID NO: 5156 - DNA, 3035 bp, Homo sapien
  Unsure 828-883: Unknown base
gctcagcacgggggtcatccggtgaagggacacagagaacaggcaggaggaaaggcaggagccagtccgtgcaggcacactcagcgctaagccaaaggccgcccatgctgagctcatctggccccatcttagagagccgccaaacattcctccagacgtccacctcagtgcacgagctggcccagaggctctcgggcagccggctctccttgcacgcctcggccacgtccctgcactctcagcccccgcccgtcaccaccaccggccacctgagtgtccgtgagcgggccgaggcgctcatcaggtccagcctgggctcctccaccagctccaccctgagcttcctcttcggcaagaggagcttttccagcgcgctcgtcatttccggactctctgctgcggaggggggcaataccagtgacacccagtcatccagcagcgtcaacatcgtgatgggcccctcagccagggctgccagccaggccactcggcacctctccgagccatgtgagccccctgatgccaccgagcaggggcagcttcatgaccgatgtctggctgaggctgtggcggacactctcggggttgtctgcaggagagcaagccaggaggacatgggcctggacgacacggcctcgcagcaaagtgtgtcagacgagcagtgacgggcgtgcggccgggcggggaggctggctcccccacacctcccacctgcattgctctccctcgtgctccccaaatcaccacaaccaaccaataccgcgatccatgagggactcctcctgtggaaaaggagagctgttccagaacacagaactgatctcaggnnnnnnnnnnnnnnnnnnnnnnnnnnnnnnnnnnnnnnnnnnnnnnnnnnnnnnnntcacatgatggggaaacaaaaaaaagcaacaaagaagccacaccacacctccctggccaggcacagcgctgcccagagcggcacaccgcggacagcaccacacatgttccagaatctgaaatctcaaaagccattcactaacttaaaacaactcaacagagccatgaaacaaatgccctgatgaaaataagacaactgcatgttacatcatcggcactttatacattactgttaccatgaaaaagaaatgaacagcagcacgtctgataccatcagctgggcagatgcattaaggttaaatctaagtgtcaagaaaaccctatttctttataatatttatgcagctgttaagcgtaacatggtggcagcttcacaacaagaaccgtgatcatgcatgcagtcatgtctccagtattctgtgaaaagccaggatacgttaggatgtgagtttagaaactgagtccattcggtgcatggaaatccaccgcggagtcacacaatgctcctcactgtagtccaggcgattggtgggccgccagcaccctgcgggcttcacagggacgcgtgcttgttctccaagccccgcaacccttactgtgcacacaacatcgcacacacctttgtttttgaaattaaaatgtttatagttattgctgcgtccagtgttttgagttatactgaagcttctcatttctacaagtatatcttttatggtgagaacgacatttgggtaaattctgagacaacttttcccatcttcaagaccccaggaacctgtatccttgctggggtagaggtcccaaaatgcagtccatagagtatcactggcctggtgaaccatcccttttcaaaagacaatagttagaaggaaatactcaattttaaacagtcacacaaatttcttcaaagtatttaggatttggaaatttgaggagagggttgggggaagggtattgtagagaatctcttgccccttggaaagtaaatggtaatgcttttctaatttttttttttgtaaactaagaatcagcaattaataaaagcaagtgtactctataatcacagacagaaggttcttattttcaggtcagcactccctagaggtgcaaactttatttaatttaaatgcagttgtttgtctaatgggaagctgatagggccttgctgcagttctctaaggtggccaaattaaacttggctggcagctcctgtaatcctcttgggcaactttacagccaagccccaagggctaaatggcaggcctggagctgtgagtgtggcctccccacggagggtgactccttgagttcagtgaggaaaaccacggtgcctggcagtggtcagccaggagtatgactggccactccttaggcatccagaagtaggaaacacagaaagcattccacaaaacggggaatctccccaaagagctagaaacccaggctggaaggaaatggcagcgcaggcaagagagcaagagcaccctgggtgctcctccatcccgtttctctggggaggttcatgaggtgcttcttcaacagttattctgttcattgcttatcacagttcacgagttctcgtggcatcttttgtggggaggagggaggatgaaagtgacacagtgtatctacaacactaaggtcacattaatcagataggaatgcagtgacgctctgcaccgtctatgagagcgggcatctcgagtgtgcataccgaggcacagatgtgcacacacatccgcaggcaactgcacccacagagaaaaggtggcagtattggagtcaccccaggattcttgggggctgtttgaccagccatcaacagtgcagccatacttctttttcttttttatcgtggtacacaacttttatatttacaactcatgaacttgttaatctggtccttcatctagtcagctatgtatcagaaaggacttcctgcaaaatgttatattctaagcccccatttagaggaggcatccctaaactgacatttcttgctagagttgttcaaatattctgccagtatatagctaaagagttattttccagttcaagagttatttgggggctcctcacccgccacatgcccgacttgtccacagttagagagaaggcacactgctgcttataccagtgggtttgtagccaat

SEQ ID NO: 5157 - protein, 220 aa, Homo sapien
SARGSSGEGTQRTGRRKGRSQSVQAHSALSQRPPMLSSSGPILESRQTFLQTSTSVHELAQRLSGSRLSLHASATSLHSQPPPVTTTGHLSVRERAEALIRSSLGSSTSSTLSFLFGKRSFSSALVISGLSAAEGGNTSDTQSSSSVNIVMGPSARAASQATRHLSEPCEPPDATEQGQLHDRCLAEAVADTLGVVCRRASQEDMGLDDTASQQSVSDEQ

SEQ ID NO: 5158 - DNA, 1858 bp, Homo sapien
ggcacgaggcgccgtccagggctagagcaagcgcggccccgcggcccggagccatgctgaggagctgcgccgcgcgcctccgcacgctgggggctctgtgccggccgccagtaggccggcgcctgccgggaagcgagccgcgacccgagctgaggtcattttcttctgaggaagtcattcttaaggactgttctgtccccaaccccagctggaacaaggacctaagactgctctttgaccagtttatgaagaaatgtgaagatggctcctggaaacgtttgccttcatataaacgtacacctactgaatggattcaagacttcaaaacccattttcttgcctggttaatggccgggcgctgtggctcacgcctataatcccagcactttgggaggccaaggcaggcggatccctgagttcgggagttcaagaccagcctgaccaacacggagaaaccccgtctctactaaaaatacagaattagtcaggcgtggtggtgggcgcctgtaatcccagctactcaggaggctgaggcaggagaatcgcttgaacccgggaggcggaggttgcgacccaaagcttatgaaagaagaacaaatgtcacaggcccagctcttcaccagaagctttgatgatggcctgggctttgaatacgtgatgttctacaatgacattgagaaaaggatggtttgcttatttcaaggaggcccttacctggaaggaccacctggattcattcatggaggtgccattgcaaccatgattgatgctactgttggtatgtgtgcaatgatggctgggggaatcgtcatgactgccaatctcaacatcaattataaaagacctatccctctttgttctgttgttatgataaatagccaacttgataaagttgaaggaaggaaattttttgtttcctgtaatgttcagagtgttgatgagaagaccctatactcagaggcgacaagcttatttataaagctgaatcctgctaaaagtctgacataaagagctgctggtgaactccatctcattctcgcccctccagaagaagcagttgtcccccaaatactctgctccctcactgctgaatccctgtagggagaagcctgccaacagtgaccttccgaaacagccttctgaatacaaagaggattcagtttccatcttctcaactttttaacacagaaacacttcctgcgagcatatcgacaactctcgggccaggcgctgtggctcacacctataatcccagcactttaggaggccgaggcaggcggattgcctgagctcaggagttcaagatcagtctgggcaacacgatgaaactccgtctctactaaaatacaaaaaattatccaggcatggtggcgtacgcctgtagtcccagctactcaggaggctgaggcaggagaattgcttgaacccaggaggaagaggttgcagtgagccaagatcatgccacatcactccaacctgggcaacagaacaagaacccatctcaaacaaacaaacaaacaaacaaaaaaaaactcttgtctccttaggatatgttacctgctccactgcagactagagaaataaatgtgtattgaaccttttactgcaaacttgaaaatgctagaaaaccaagcatgaagaataaatacatggcgggaaacacacaggcatgtgcatatgcatatacattgtaagttagtaagttagaaagctagctttgttgtatctgaacacatgaatcttttttggtcagtgtaggaagcacagccagatcctataggaatgaatacctcaaatctgttgtctgagattctagagattaaaccactgtgccatttttaaaaaaaaaaaaaaaaaa

SEQ ID NO: 5159 - protein, 107 aa, Homo sapien [sequence omitted]

SEQ ID NO: 5160 - DNA, 245 bp, Homo sapien
  Unsure 28: Unknown base
  Unsure 132: Unknown base
  Unsure 225: Unknown base
caacactctcctgaaatctagcaatatnagcaggatacctagctaaatattacgtattgtttccttggcctctcttaatagtgccatttatatttttaatttaccagagttaggctcattaagatagtgttngctttgaaatcaatgtttctgtggaaactaattttaacttttacagatattgattacgggcttgtgaaaaggcaagtaaaggaggaatgctgngctatctgggcattaaaaca

SEQ ID NO: 5161 - DNA, 2082 bp, Homo sapien
  Unsure 10: Unknown base
  Unsure 28: Unknown base
  Unsure 37: Unknown base
tggggggggnaatgggtgtctggctcanggattgccnaatctggaaattctccataacttgctagcttgttttttttttttttttttacacccccccgccccacccccggacttgcacaatgttcaatgatctcagcagagttcttcatgtgaaacgttgatcacctttgaagcctgcatcattcacatattttttcttcttcttccccttcagttcatgaactggtgttcattttctgtgtgtgtgtgtgttttattttgtttggatttttttttttaattttacttttagagcttgctgtgttgcccaccttttttccaacctccaccctcactccttctcaacccatctcttccgagatgaaagaaaaaaaaaagcaaagtttttttttcttctcctgagttcttcatgtgagattgagcttgcaaaggaaaaaaaaatgtgaaatgttatagacttgcagcgtgccgagttccatcgggttttttttttagcattgttatgctaaaatagagaaaaaaatgctcatgaaccttccacaatcaagcctgcatcaaccttctgggtgtgacttgtgagttttggccttgtgatgccaaatctgagagtttagtctgccattaaaaaaactcattctcatctcatgcattattatgcttgctactttgtcttagcaacaatgaactataactgtttcaaagactttatggaaaagagacattatattaataaaaaaaaaaagcctgcatgctggacatgtatggtataattattttttcctttttttttccttttggcttggaaatggacgttcgaagacttatagcatggcattcatacttttgttttattgcctcatgacttttttgagtttagaacaaaacagtgcaaccgtagagccttcttcccatgaaattttgcatctgctccaaaactgctttgagttactcagaacttcaacctcccaatgcactgaaggcattccttgtgcaaagataccagaatgggttacacatttaacctggcaaacattgaagaactcttratgttttctttttaataagaatgacgccccactttggggactaaaattgtgctattgccgagaagcagtctaaaatttattttttaaaaagagaaactgccccattatttttggtttgttttatttttattttatattttttggcttttggtcattgtcaaatgtggaatgctctgggtttctagtatataatttaattctagtttttataatctgttagcccagttaaaatgtatgctacagataaaggaatgttatagataaatttgaaagagttaggtctgtttagctgtagattttttaaacgattgatgcactaaattgtttactattgtgatgttaaggggggtagagtttgcaaggggactgtttaaaaaaagtagcttatacagcatgtgcttgcaacttaaatataagttgggtatgtgtagtctttgctataccactgactgtattgaaaaccaaagtattaagaggggaaacgcccctgtttatatctgtaggggtattttacattcaaaaatgtatgtttttttttcttttcaaaattaaagtatttgggactgaattgcactaagatataacctgcaagcatataatacaaaaaaaaattgcaaaactgtttagaacgctaataaaatttatgcagttataaaaatggcattactgcacagttttaagatgatgcagatttttttacagttgtattgtggtgcagaactggattttctgtaacttaaaaaaaaatccacagttttaaaggcaataatcagtaaatgttattttcagggactgacatcctgtctttaaaaagaaatgaaaagtaaatcttaccacaataaatataaaaaaatcttgtcagttacttttcttttacatattttgctgtgcaaaattgttttatatcttgagttactaactaaccacgcgtgttgttcctatgtgcttttctttcattttcaattctggttatatcaagaaaagaataatctacaataataaacggcatttttttttgaaaaaaaaaaaaaaaaaa

SEQ ID NO: 5162 - protein, 72 aa, Homo sapien [sequence omitted]

SEQ ID NO: 5163 - DNA, 2204 bp, Homo sapien; identical to SEQ ID NO: 3735

SEQ ID NO: 5164 - protein, 212 aa, Homo sapien [sequence omitted]

SEQ ID NO: 5165 - DNA, 2939 bp, Homo sapien
  Unsure 2500: Unknown base
gcctaggaacattttttaaggactcagctgtggcttttagggcttggttcataccatgggggaaaaaaaagtcctaggagaaagcgacgtggctcattagtgttgcctcttcagtgctcaagccgcctggtggattcctatgacacagggggcctggaaagaaagggaaagtggatttaaaatatatatatacgtaacccaagccccataacccctaactggacaaatgaggtctgtttctttgggcctgaggctgtgcatataaagtcttattttgggactttacaaacttgtcctaactatcttgtggatagtgggctgtgacaatctggaatagagaacgttcacacttcgctcctttaaagaagcgaccccagatctgcaagggagtagattctgctatcttggcctcacagcccttcctgttgattacaaagcccgtggaagaaaacagaacacaccctcctcagttccgtctaaatgtgtttcttctgcttcaattacaccagttctggggcaaagacactgatgaaacaacacccatacctgaaaagaataaatgtgtgactttcaaatcccctttcgcagtgaaagaaacagcaaacacttaagattcagcatctgttctccagttgcactgaggaatgcactgtctcgcagcaccagctctgcagagcccttgccccagactctttgcggttttatttatatgtatttccatatttcattcctgtgtgtcactgctgcattggtgtggcagcaagtgaccaaatgctacaggtcttactatggacaccaggtcaggtgcaaccacacaaaacaaagccagttccatgagctgcctatgatatgcattgcggaagtaacattttacccagggtgtgccattgcagtgatataaatatatttttttcttagactaaatatgagctgactatctcttttgatgtgtgtacataggtgtgagtgtgtstgtatgcgtgcctgtctgtgtgcgggtgtgtgtatgtgcrtagcctcatgcttaggactacccatgaatgttgtggaatgctacacctggagagttctggttttccaccagtttcaagatgaagaactacatgatacagtggacctggagaccatccccttggaaagacaacccagagatgttcagcatcctgtatctacacgcatcctgtatctacacgtgtattttgtagctgtcacactaaccttaataagaattctacagctttggacagaggcattttcaccttaatggygaagtaatttaaaatataaatccattcaggtgacaacccatcatcaaaattacaaattttctgattgaactcatctgaatcatcagttccttgatggagagagagaaggagatggaatgtgtctggtaaccccaaatggagtacaagtagcctttgttttcctgcataaatggacttgttgaatgcgaacgaatatatgcaattcatatacttttggagatgaacgtagatatgtgtgtcagctttgagatggtgtgyccyggattaatactttgtctccccaatatcacagaaaaatacatgcccagtgactcttgaggttaaggtagttgggatgaaatggcctcaggcaatttcacattccctaattacctggaaagttctacagtaattaatatgcagctaactcctgttgccctcacaagagcatcagccttctagaatcggagctccggagtgtgaagattcagtattgatatgatatgtataccaaactccagccaacttactgccatttttcataatctgagtggctgccttgcttatcctaagctgtggttgcagaaaccgtggccatttatataagctataacatcaaatcagggaaaaatgaggaaaaaaaatagattctgaaccatttattgttgaataagtagagaaaatcatcaataaatatttattacattctgacagggtgtgtggcattgtgttctatgccagagtgacaaagttgattcacccctttttggggaccttaatatattttttaagggatgtgcctatgcattgatgcctgaaaaatatgtataaagaaatgaggttgactcttctgagcagttcatcttttccagaggtaagggtaggaggccaacttcaggatctgggtctragcccgtgggsaagccctggccgagtgagctccaatgctaactcatgtgccgatctctagagcagtgggaaactaccccgctgcaccaaatcaagtagcttcaccttgtgtatgcaggccccaagttattttttagcaatcttacgagtgaaatgttctggtgggttgaaaaacgttcttattttaaagaaaggttgtgctcgctacactgctggtgtgtgcrttctgagacctcttgtattccaatctgtgaagggatatgtgtattaatccgtacacccgtatagcctcaatatttgtctgaagacacttaaattctgacccataaggaaagttcctagangccaatattttcacttatttaacattctccaaacaacatcaagcattgatacacactgaagagtgcgtttattttttgtatcactctaagtatgttggaatatgcaaggactgtggttcaaattagaatgtataaggcatattataatttagttcatactgaaaaagaaattaacagaacattgttcggttcacacgttccaaaatttgagtgatttctggagttagacatagattttctattttgttttaatttgtcaaggtatttttcttcccttcatgaactttaggtacacataacttatgtcatttatttatggtcttttatacctagtttgtaaaattgtaaaatagcaaactaaatgcaaagagtttgcatttgaaaataataaagtagttaccgtatacaaccctgcaaaaaaaaaaaaaaaaaactcgag

SEQ ID NO: 5166 - DNA, 752 bp, Homo sapien
  Unsure 19: Unknown base
ttcgaatttaatacgactnctatagggaatttggccctcgggccaagaattcggcacgaggaaggagatcaggcagaggagagaagagtcagtgtgaactaggctggtggctctgtccggtagggagacggaaagggtgccgcccatcatagaagtaccagaacttgagctggactttgctgatttagcttatggaagaggaaccagaaatttgtccttgaataatgtttcccgtgttgggctggatcttgatagcagttgttatcatcattcttctgatttttacatctgtcacccgatgcctatctccagttagttttctgcagctgaaattctggaaaatctatttggaacaggagcagcagatccttaaaagtaaagccacagagcatgcaactgaattggcaaaagagaatattaaatgtttctttgagggctcgcatccaaaagaatataacactccaagcatgaaagagtggcagcaaatttcatcactgtatactttcaatccgaagggccagtactacagcatgttgcacaaatatgtcaacagaaaagagaagactcacagtatcaggtctactgaaggagatacggtgattcctgttcttggctttgtagattcatctggtataaacagcactcctgagttatgaccttttgaatgagtagaaaaaaaaattgttttgaattattgctttattaaaaaataaacattggtatttttttgagtaaaaaaaaaaaaaaaaaaa

SEQ ID NO: 5167 - DNA, 10013 bp, Homo sapien
  Unsure 125-285: Unknown base
  Unsure 773: Unknown base
  Unsure 798-889: Unknown base
  Unsure 8795-8815: Unknown base
ccggaggacaagacttttgcctttcttgcatctctctatctttagcacacaatacactgtctcataacatcccaagtgcccaattattattattattttaaaggcagagtctccatcacccaggnnnnnnnnnnnnnnnnnnnnnnnnnnnnnnnnnnnnnnnnnnnnnnnnnnnnnnnnnnnnnnnnnnnnnnnnnnnnnnnnnnnnnnnnnnnnnnnnnnnnnnnnnnnnnnnnnnnnnnnnnnnnnnnnnnnnnnnnnnnnnnnnnnnnnnnnnnnnnnnnncccaattattatttgttgcattaatatagaataagcttcaaacatcattatggccaagagaaccactgattttctgccctgatgcatttcccatttcagcaagagaccactaagttatgcaggctccataccttggagtcatccttgattcctctcttttctttatagcccacattcaattggtccatttgtcagctctacttccaaaatatatcctaagtatgactacttttcatcatttccattgctacagtcctacccgagctaccaaactcccacctgtggaccaatatagaagtttaacttgtctccatccatgcagacaccagagtgatatgtctaagacaaaatgaaaatttcatcattccatttaaataaaactctaaaatgacttcttattgcaaacagaataaaatccaaattctttgctatggccaaaattgcttatttacatgtttactgttcctctttttccattagaaacatcntgaatagtaaccagtatataataannnnnnnnnnnnnnnnnnnnnnnnnnnnnnnnnnnnnnnnnnnnnnnnnnnnnnnnnnnnnnnnnnnnnnnnnnnnnnnnnnnnnnnnnnnngttggctatttggcgatgagaggtggtgaacagtgaccatactggtatacaacactatgggacctggcatttttgctgcatgtccagcccacccccactaataatgtaggaagctgtctggtccattggaaacactaatctgatctcagaagtggctgatcgtggcaggatgtgtcgacgatgatgatggcaagaaagcaagatgtccgaattcccacctacaacatcagtgtggtgggattatctgggaccgagaaggaaaagggccagtgtgggattggaaagtcttgtttgtgcaaccgcttcgtgcgcccgagtgctgacgagtttcacttggaccatacctccgtcctcagcaccagtgactttggagggcgagtggtcaataatgaccactttctctactggggagaagttagccgctccctggaggattgtgtggaatgtaagatgcacattgtggagcagactgaatttattgatgatcagacttttcaacctcatcgaagcacggccctgcagccctatatcaagagagctgctgcgaccaagcttgcatcagctgaaaaactcatgtacttttgcactgaccagctggggctggagcaggactttgagcagaaacaaatgccagacggaaagctgctggttgatggttttcttcttggtattgatgttagcaggggcatgaataggaactttgatgaccagctcaagtttgtctccaatctctacaatcagcttgcaaaaacaaaaaaagcccatagtggtggtcctgactaagtgtgacgaaggtgttgagcggtacattagagatgcacatacttttgccttaagcaaaaagaacctccaggttgtggagacctcagcgagatccaatgtaaacgtggacttggctttcagcaccttagtgcaactcattgataaaagtcggggaaagacaaaaatcattccttattttgaagctctcaagcagcagagtcagcagatagctacagcaaaagacaagtatgagtggctggtgagtcgcattgtgaaaaaccacaatgagaactggctgagtgtcagccgaaagatgcaggcctctccagaataccaggactatgtctacctggaagggactcagaaagccaagaagctgtttctacagcacatccaccgcctcaagcatgagcatatcgagcgtaggagaaagctgtacctggcagccctgccattagcttttgaagctcttatacctaatctagatgaaatagaccacctaagctgcataaaagccaaaaagctcttagaaaccaagccagaattcttgaagtggtttgttgtgcttgaagagaccccatgggatgccaccagtcacattgacaacatggaaaacgaacggattccctttgatttaatggataccgtccctgcagaggcactatacgaggcccacttagagaagctgaggaacgaaaggaaaagagttgagatgcgaagggcgtttaaagaaaacctggagacttctcctttcataactcccggaaagccttgggaagaggcccgtagttttattatgaatgaggatttctaccagtggctggaggaatctgtatacacggatatttatggcaaacaccaaaagcaaattatagataaagcaaaggaagaatttcaggagttgcttttggaatattcagaattgttttatgaactggagctggatgctaagcccagcaaggagaagatgggtgttattcaggatgttctgggagaggaacagcgatttaaagcattacaaaagctccaagcagagcgtgatgcccttattctgaaacacattcattttgtgtaccacccaacaaaggagacatgccccagctgcccagcttgtgtggacgctaagattgagcacttgattagttctcggtttatccggccgtctgaccggaatcagaaaaattcactctctgaccctaacattgatagaatcaacttggttatattgggcaaagacggccttgcccgagagttggccaatgagattcgagctctttgtacaaatgatgacaagtatgtgatagatggtaaaatgtatgagctttccctgaggccaatagaggggaatgtcaggcttcctgtgaactctttccagacgccaacatttcagccccacggctgtctctgcctttacaattcaaaggaatcgctatcctatgtagtggaaagtatagagaagagtagagagtccacgctgggccggcgggataatcatttagtccatctcccccttacattaattttggttaacaagagaggagacaccagtggagagactctgcatagcttaatacagcaaggtcaacaaattgctagcaaacttcagtgtgtctttctcgaccctgcttctgctggcattggttacggacgcaacattaatgaaaagcaaatcagtcaagttttgaagggactcctggactctaagcgtaacttaaacctggtcagttctactgctagcatcaaagatttggctgatgttgatctgcgaattgttatgtgtctgatgtgtggagatccttttagtgcagatgacatactttttcctgtccttcagtcccaaacctgtaaatcttcccattgtggaagcaacaactctgttttacttgaactaccaatcggactgcacaagaagcggattgaactgtctgttctttcataccattcctcctttagcatcagaaagagccggttggttcatgggtacattgttttttattcagccaaacgtaaggcctctttggctatgttacgtgcctttctttgtgaagtgcaggatattatccctattcagcttgtagcactcactgatggcgctgtagatgtcctggacaatgacttaagtagggaacagctaactgagggggaggagattgctcaagaaattgacggaaggttcacaagcatcccctgtagccaaccccagcataaacttgagatctttcacccattttttaaagatgtggtggaaaaaaagaacataatcgaggctactcatatgtacgataatgctgccgaggcctgtagcaccaccgaagaggtgtttaactccccccgggcaggatcaccgctctgcaactcaaacctgcaggattcagaagaagatatcgagccatcttacagcctgtttcgagaagacacatcactgccttctctgtccaaagaccattctaagctctctatggaactggagggaaatgatgggctgtctttcattatgagcaattttgagagtaaactgaacaacaaagtacctccgccagtcaaaccaaagcctcctgtccattttgaaattacaaagggggatctatcttatttagaccaaggccatagggatggacagaggaagtctgtgtcttctagcccctggctgcctcaggatgggtttgatccttctgactatgctgaacccatggatgctgtggtgaagccaaggaatgaagaagaaaacatatactccgtgccccatgacagcacccaaggcaaaatcatcaccattcggaatatcaacaaagcccagtccaacggcagcgggaatggttctgacagtgaaatggacaccagctctctagagcgagggcgcaaggtttccatcgtgagcaagccagtgctgtacaggacgagatgcacccggctggggcggtttgctagttaccggaccagcttcagcgtggggagtgatgatgagctggggcccatccggaagaaagaggaggatcaggcatcccagggttataaaggggacaatgctgtcattccatacgaaacagacgaagacccgcggaggaggaatattcttcgcagcctaaggaggaacactaagaaaccaaagcccaaaccccggccatccatcacaaaggcaacctgggagagtaactattttggggtgcccttaacaactgtcgtgactccagagaagccgatccccatttttattgaaagatgtattgagtacattgaagccacaggactgagcacggaaggcatctaccgggtcagcgggaacaagtctgagatggagagtctgcagagacagtttgatcaagaccacaacctggacctggcagagaaagactttacggtgaataccgtggctggtgccatgaagagctttttctcagaactgcctgaccccctggtcccgtataacatgcagatcgacttggtggaagcacacaaaatcaacgaccgggagcagaagttgcatgcccttaaggaggtattaaagaaatttccaaaggaaaaccacgaagtcttcaagtatgtcatctctcacctaaacaaggtcagccacaacaacaaggtgaatctcatgaccagcgagaacctctccatctgcttctggcccaccttgatgagacctgatttcagcactatggacgccctcacagccacgcgcacctaccagacaatcattgaactctttatccagcagtgccccttcttcttctacaatcggcccatcaccgagccccccggcgccaggcccagctccccctctgccgtggcttccaccgtccccttcctcacttccacgcctgtcacaagtcagccgtcgcccccacagtcgcctccacccaccccccagtccccaatgcagccactgcttccctcccagcttcaagccgaacacacgctgtgagccaccaagacctggggcgacaggagaaccggtcctctctctgacggggtggcatttggccttgaacaaaaccaagtccactggggacagaggcaggggcaagtggctctccccattaccttctcaagacctcagtgggagcaccagccaatggtaccatcggctgggctgccaggtaccctgggcctggcgctgcagacctgagctggcttggacccatttgaggactgaactaggcaggcaatggctccagtgccctccctctgttccctggaccaccaccccacgtagctgctcacaccagcctccgggtgcctccctctgcttgtacagagcccatggtcgggacagtgccctggcctttgccggggaggaggatgctctgagattcagggtggggctggcaacccctgaagagaacacttcctgttggtctgtctcttcccaccttccatctgcacacacccccaaggtaagggtacagcccggctggcggcctccttgggaacgtgtaggccacggctctgccaccactaggtacctgctgagggcgctggctctgcagatcagaacaacggaggatagctttgtgcctggacccagagagtgtgggactccccgcttcatccccaccgtcccactccacagccttcccgaaacattccctggcaaacaaaggaacactaggagaaaaaatggaaaaacccttccagtaattaaaaaggaagaaaccacagaaagaaaactacagacctcaagattccactctgtgcccgcctctgccgggagggagggaggcacacaggtggagctgaccctcgtctttgtggcagcaaaaccaggatgcctggagctgtggcctgagggcctgctggggtcccactcacccacttaggtctagtcgctagatcccccgttttcccaagaagagggttcgagcccttggtggggacagctggggagatggcagtgcaggctggaacctgggctgccccagaacacagtccattacgatagaaacactaattgagcatgtgcgtggggtgggggtgtgtgtgcacatgtgagtgtgagtgtgtgtgggcgcttggtggggggttggggacagctggaaggtgccaggtgcacttggggttggggttggtgtgttgggtgttgaagtggaatcgtttcatcccagccatggaggccaccagcaggagtgttcatggggatgtgggcgaggtggggcactttgaaggaatggcggtctgctggtgccctcgaaggggcatccttcctggtcttcgctgacccagaggcgctgtgcctgcatatcatccaccaccaccctagcccagccttcccactgccccaggaaaagctcttctcctggccacctctgccccccagcacctcaaacttgcatggctgggctgtggcctctgcggccaggaagcctgacactaggcaccccccaggcgagagctagtggggtgcagagggccccatgccagacagcccttggggctcgttgcactttaagaaataggatctgtggtgtattccagggggcctgatggacacctttcccgggcgtctgcagctgccctgcccgtgcccgcctgcagtggttggagacgggagtggcccttcggctcccgagctccctctggggacggctggctcactgtctccagttctcaatggccaacgaaggtgcttggaaacacctaaccttgcaagttttaccgccttttgaggaacacaaatcggagaacaaacccagggttcaggcgtgttttctgtgaatgttggatgatgaatttttgtctcttctggtggagctgtgcctggccctgtaggcccagggttggctggaaggtgacatctgtgtttcgttttagctgaggttggcagaaacgttcccaaactcccccagccctggaccccagcagatgaggaaacggccccatttactgaccccgcccccttttcgaggttatgctcacctggtcagctcctcacgtaattgggggtgagggaaagcatggtggtgccctgggccgtccctgtgtgaacgcaggcaaaagcagcccagtccccctcactgcttgagctaacactgccacctcttttgtgtgagcacaaaagccacgtcccaagccacctggcccgattccacagatgtatgtgcggccagtgacttccccaggagtgtggagggggtggtgaggaggagcacctgggctctctacccctctcctcacagaagtacctgaaactaggtctggggcactcccaatgcagcgccttgtcagccaaggtgggcaggcagggactgtggcagcttatgtccaaagggagcccccatgcacaggaagccacagggttcctcttgtttcccccgctaacttcagcctctcatctgctgctccgggctgagggactagaggacatctcggtcgtttgaggggcatggccagtcgtggcaggccggccttcagcgtccggtcagggaagcgtgcagcccaaatgggcacttgcatgggagccacagaggagcgtccctggggattgttgggaccatgctgcccccactcccgcttttgttggggctctaagttctggaaggtgtgtgcacagagggtgctcatgggactcgcatgcagctctcagcactgggtgggagggcgttggcttgtccagaatggggacgtggggcagccacccctgcccagcgagagcgcagacaccgtgtgaggggacagcagcccttggtgcaaagccagagactgatcctggctctgacggctgaagagggaagacccaaggctgggtggcgtggctcgtgaatccacttagaattcttggcttgtgtcgcatactgggtgtcacggcacacatttactctgcattgtccccgtctttcccatcgcctagcgtttggggaggaacagggagagagcttcggggcgtctgtctccgtgctctcctgcctccaccgccttggttttgcttcctgctggaggcagggcacctgctgcgacccagattcttctgcaggatgtgtctgtctttgtcacggtggacagagggtgacatcataggagcagctcgctggccagaaggggatgggggcatccctgtgcctcactcagctcctgctgctcttagggaaaggaggcctgggtcaagccagcatccccttggtaaagacccccgcaggccaccaggcattctggnnnnnnnnnnnnnnnnnnnnnacacacacacacaaaacttcacagcaggccagctgcagtgacttgtcatcaagagtcacctcagctgcgcccccctcccatcctttcctatgagaagccactgctttgggggcgccggctagaaaaagtagggtgcggtggccaggagggcccctgccgcgcggggggctgggtctggttgagtcgctgctttcccgagggcagcgcagggatccggggaagctgcggcagggagcgggcgccggcttcgtggctctgaggtgtaacgggggtgggctccctccctcggaggacatcgtctgtgtccaggtcagaaagtggcccaggaagggggcagtttctgtcgcgggtccggtgggggcgcggccgcggtgcggtcggtgcagcgtggccaatgcgcggcgcgcgcgggggacagagcaggaggcggtctgtcacctcggccactgctgacctgggctggcctcccccagccctcccgtggcggagccggcagcgatgctacaggcctaagttattgtttgcataaaaagaatcatgttccctgtgtacatttaagaaaaaaacaaaaaaacggaaatgtcagaattgtatggaaataaaacttgtttgaaaatttggaatagtgctgctgccagcttatttttctggtacttgtattttcacatgttaaatgatctttatatatgttgaattaacaaatattttgagtttctgagaaaaaacaaaacatattaatggtattgaaatgtgttagtagtctggctgtgtgcccaaaattctgtttcgcagcaaaagtgaagacctgtatgtaaagaaagtataacaattatttctttgtattttaggggctttaaccggaacatcgtctagctggtgttaggaatgtttgcttaatttccagacttttttttaaaaacacatcgtgggttttttgaggctccaacctgattagtgcatggtcagccctcaatgaaggctgaggcatctctgactgaggtgtttttgtttggttttgttttttaaaatcatgtatttgctacaaagtattgtacttgtctcaatgggaatggtgtaaaaaacaaaaggccttatgtgatctgtatcatagttaataaatgaatcttgtaaaaaaccaaaaaaatctatgtcggtgcggggaagaggtatgaaatgcaggattcgatatcagcttatc

SEQ ID NO: 5168 - protein, 1624 aa, Homo sapien [sequence omitted]

SEQ ID NO: 5169 - DNA, 1607 bp, Homo sapien
aagctttcctctttgcattttggcatttgaaaactccgaagagcggtttttgttttttatttaaagaagatgatacatatgtgtacccgattcaaaactagagaatagaatttaaaacataattttcaaagtcttcaaatatgcctaaaggtaacaatgtcatcttttaattgccaatttctctaccactttcaaaaaattacttccaaggatttaatgagctccttcctttcaacagaaaatggactattttcctttcagatttactatatgctgtcactccagctttataaccgcatgtgcatacacaaacatttctttctctcttgcaggtggcacaaaccaggaaggggaaatctgtggtttaaattctttatgcctcatcctctgagtgctgaaggcttgctgtaggctgtatgctgttaatgctaatcgtgataggggtttttgcctccaactgactcctacatattagcattaacagtgtatgatgcctgttactagcattcacatggaacaaattgctgccgtgggaggatgacaaagaagcatgagtcaccctgctggataaacttagacttcaggctttatcatttttcaatctgttaatcataatctggtcactgggatgttcaaccttaaactaagttttgaaagtaaggttatttaaaagatttatcagtagtatcctaaatgcaaacattttcatttaaatgtcaagcccatgtttgtttttatcattaacagaaaatatattcatgtcattcttaattgcaggttttggcttgttcattataatgttcataaacacctttgattcaactgttagaaatgtgggctaaacacaaatttctataatatttttgtagttaaaaattagaaggactactaacctccagttatatcatggattgtctggcaacgttttttaaaagatttagaaactggtactttcccccaggtaacgattttctgttcaggcaacttcagtttaaaattaatacttttatttgactcttaaagggaaactgaaaggctatgaagctgaatttttttaatgaaatatttttaacagttagcagggtaaataacatctgacagctaatgagatattttttccatacaagataaaaagatttaatcaaaaaatttcatatttgaaatgaagtcccaaatctaggttcaagttcaatagcttagccacataatacggttgtgcgagcagagaatctacctttccacttctaagcctgtttcttcctccatatggggataatactttacaaggttgttgtgaggcttagatgagatagagaattattccataagataatcaagtgctacattaatgttatagttagattaatccaagaactagtcaccctactttattagagaagagaaaagctaatgatttgatttgcagaatatttaaggtttggatttctatgcagtttttctaaataaccatcacttacaaatatgtaaccaaacgtaattgttagtatatttaatgtaaacttgttttaacaactcttctcaacattttgtccaggttattcactgtaaccaaataaatctcatgagtctttagttgatttaaaaaa

SEQ ID NO: 5170 - protein, 64 aa, Homo sapien
MSSFLSTENGLFSFQIYYMLSLQLYNRMCIHKHFFLSCRWHKPGRGNLWFKFFMPHPLSAEGLL

SEQ ID NO: 5171 - DNA, 2024 bp, Homo sapien
gcccgtgagttttttaccatgctgctctgaccagtttgagtggcaattaccaatagatttgttttctttattctatggagatgtttttaccactgacactgttttctgattatagtctgcttcatagaaaatagcctgcataatcaaacaaggagttactttgaaattaaagtatgcctggctattaaaaatgcagattttaggtgggtaaacatcaggtaggtctgggtgggtcatgttctaggcctagaaaaatacactattagacaagttctaaagaaggcaaggagataaaggcatcaggtggtaacttctaattgaatattatatgttgatcatacataatatatactatgcctggaaattatgactgaaaagcacctattcggttagtgctcctattcatgagaacatatctccaatactaaatgagataagcctgttctaaaatcttatagccagtattttaagaaacttgattatacttaccaaaggaacattgtttgttttctcttgttttaaatatggagaggtttaatcctttacataacaaaggaattaattttagcaaaatgattcattccaaccttcttataagaaatatctaggagagtcaagtaagaaaaataacgaatctaagtgataaacattcaagaaattctctaaataagagatttatttataattttaatatctcagggttctttttaggtttccaggggaaaagagcaggataacagtgtggagactgctaagttgagaatttaaaacaaatgagaacataagatttttaaaattgcattgtgaatgtaaaatttttatcaatcctttgctctcttttagacatattgagaaaatgttaaatagaaaaaattaagtattttaataagatgtttcagatctttgagtatgaaaaacataacaaaaaagcctaatttcaaaaaactatttgagatcaagggacaatggtgtgaccaatatgaagggtcaagactgaaatgtattgtctttactatcaagaactctactttcagttgtttctcagacagttaatttcagcttcatagagatttctgagcaaattaagaaacactgttttcctgggtttgttttgggtatatgtcattatagttatgttatttcttgttgaaatttataattgtaggttttttgtattgttttagtatttaatggtgtataatgtgttattacattatatgtagttataccaaaatattgcctgaagataaatcatgacaaggtcccctgtttattcctgtgttacagacgcatggaattgctcctgtagatttgaatttttgtttcatttttttctgtcccacccttcactctctctgtttcagaacatttttggtagaagtgctatccagaagtgaacttgtcaaaaggcaagtagcatgaaagaagacagaagaagcaaaaggctaatacagtggataatttctgagcacttgaagtttcttcaaatgtgcaagactgtgtgtcttcctattagatgtataaattggatatttcatgcctaattaaatgttgcgttggattgcagtgcctatcatacagcgattggagtaaattgaggcctaatcctgaacacatatagagcatattgttagatatttttcctgtgacatttgaagttattattctcccatttcctttttctttttttgtttataatcatatgtccctaagattgttttccttttttggaccaaaaaaaagaaaaaaaaaatcttagcttttcatcctcccagtgtattctgcattgtccttaccctagatcagccccttctgtgtaacagtttttctcacaatgtagcaacttttatccacccttcaggaccttcactggggactagttcattcattttcaaatagctatttcaacctttaacatctactggtcttagtcttttacacagaagccagagtgactgggtctgggcaagactctggtggtggtatcaccactcgtaaccttactggattggtttcagcaaatt

SEQ ID NO: 5172 - protein, 35 aa, Homo sapien
PVSFLPCCSDQFEWQLPIDLFSLFYGDVFTTDTVF

SEQ ID NO: 5173 - DNA, 579 bp, Homo sapien
  Unsure 80-119: Unknown base
ggtgaaatggggatggaaaagggttatataaaaacaaataatggtaacaataatgatgaagattggagtactccatctcnnnnnnnnnnnnnnnnnnnnnnnnnnnnnnnnnnnnnnnncatgttcattatagttcattacagttacatagtccgaaggtcttacaactaatcactggtagcaataaatgcttcaggcccacatgatgctgattagttctcagttttcattcagttcacaatataaccaccattcctgccctccctgccaagggtcataaatggtgactgcctaacaacaaaatttgcagtctcatctcattttcatccagacttctggaactcaaagattaacttttgactaaccctggaatatctcttatctcacttatagcttcaggcatgtatttatatgtattcttgatagcaataccataatcaatgtgtattcctgatagtaatgctacaataaatccaaacatttcaactctgttagaatagaggtaattgtgtggtttgtgtatgggactataacagtaatattaattcccaaaatttctcctactaggaacagtgggta

SEQ ID NO: 5174 - protein, 56 aa, Homo sapien
  unsure 27: unknown amino acid
  unsure 28: unknown amino acid
  unsure 29: unknown amino acid
  unsure 30: unknown amino acid
  unsure 31: unknown amino acid
  unsure 32: unknown amino acid
  unsure 33: unknown amino acid
  unsure 34: unknown amino acid
  unsure 35: unknown amino acid
  unsure 36: unknown amino acid
  unsure 37: unknown amino acid
  unsure 38: unknown amino acid
  unsure 39: unknown amino acid
  unsure 40: unknown amino acid
GEMGMEKGYIKTNNGNNNDEDWSTPSXXXXXXXXXXXXXXMFIIVHYSYIVRRSYN

SEQ ID NO: 5175 - DNA, 635 bp, Homo sapien
ctaggagtgaaattgctggataatatgtttaactatttgaggactgatagactactttgtaaagtggccaacatgagtaagttttcatcacatttataaaatgttagtgtacttacattagcttgcaaagcatttaataagcagcaagagttaaaccacgttggtccaagtgaactgaaagcagacttctgtgttacatgtgtatgagttactgaacatgttccataatacaggagtgtgagcacactaacaggtaagtgcaggaaaacaagaagaaatattttcagagtatagtcaaaagtacactgagcatgggagaattgttttgacattttgctcaaaactatttctgaagaaaattcaacatttctttcacggaaagttttaggaacaggtaaatacaattatataaagtactggtagaatatgttcgttcagatgaccttgaagtgttttttcagacttatctgaacttgagatctgaactgaatttttattagaaactgttaaagcctctggcattgaaggttagttcataattggtgagttctgaatcacttcatttcctgcagtggttcctgagagaatcttagttcaaaggactgcccccgccaacccctgccccgccaaaaaaa

SEQ ID NO: 5176 - protein, 32 aa, Homo sapien
LGVKLLDNMFNYLRTDRLLCKVANMSKFSSHL

SEQ ID NO: 5177 - DNA, 2994 bp, Homo sapien
ggcctccgccgccgcctcgggaggtgaggacgaggaggaagcgagcagcccagacagcggccacctcaaggatggaatccgacgtggtaggcccagagcagatactgtccgcgatttaataaatgaaggagagcattcatccagcagaatccgttgtaacatctgtaatagggtgtttccacgggagaaatcgctccaggctcacaaaaggactcatacaggtgagaggccctatctgtgtgactatccagactgtggaaaagcctttgttcaaagtggacagctcaaaacacatcagcgtcttcacaccggagagaaacctttgtttgttcagaaaatggctgcctgagcagattcacccatgcaaaccgccactgtccgaagcacccctacgccaggctgaagagagaggagcccacggacacactcagcaaacatcaggctgccgacaacaaggccgcggccgagtggctggcgaggtattgggaaatgagagagcagcgcacccccactttgaaaggcaagctggttcagaaggctgatcaggagcagcaggaccctctggaataccttcagtctgatgaagaggacgacgagaagagaggggcccagcgccggctgcaggagcagcgggagcgcctgcatggagccctcgcgctcatagagcttgccaacctgactggggcgccactccgacagtagcttggacactgactcttccactgtacaaaagtactgcccagcatacttaaaaagtagatccttgggcataagctaagcaccttatttgcttatcataggctgctattctgtagaaatttatgaagaatgttattgccccagaatatggggtgagagagaactgcacttttttaatatggaaatgaattcatcgtaaagtttaaaatattttgtaaatatggactgcacagtacagggtagaaaactacatattgtgggaagctagattttgcaagtttaatgcattcattggaagcagttctcacaggaagcactttctgaataagacacttgtttgaaaaacagaatggtacaaatagccaaagaagattaaaacagattatttataagatcatttttaacaatatatattagtatgtttaacaatactgtaaacactgaagcaagcaagaaagtataaaatatgtaagatagataattttaattgcaaaatactgtgcccactaaggctagagaaatgggaggctattttggaagatgttctaagtaatggacttagaagaaaatagatatttgaggctcttggtaagatgcacaatagttcagaatttttgaaattggagcaaaatcagtcttattctatctggggctttacaactcagtataatgtttaagtttgaaaagcacttgtcatccctagcatgttaacttgggaacttttgcacatttcatatttctcatttgctgaaattgagtgattaatcttgcaaagtctaggtaacatagtaattggtaattttaaaaatacatattaagggccctgtaatgagatttggcacttggatttttactaaagggacacctgcagggttgttttgtagtgaaatgttttagatcttttgttagcaaacactacattttaattgtactgcttgtttagaattattagcaaatggaagcctccatatttatattttcagtgcataaagccaccttcttgctttacttcagagtaacatgccaagctattttgtgttcactaaatttagctatcagttaaacactgcagaaaatattagctactcaaataagtaggcttctgaaatagttttaactgcaagtgtgttaacttgtgtggtggtttgaagccatttttccaaataaagttattaaacaccactttatgtactgaagcatgaacagaaaaatcaagagctgagcagaccacctcctttatgtaggcaaaacttccatcattttggcttttgttctaaacagaactaaatgacatgcatagcatggtaacttacagatcgcttaattggagtaaaactcagagtaatagagggaaatatgggctcttcagtgcctttttagcttttttgagttgaagacgttcctacagatgtagtttaaacattacaaagtaggcttctttatccaaaaatcccaatgtgtcatagtacacagatagtttaaaatatgtagccacggggaaggggaggcatgtaaatgtcttgaagaggagaaaaagtatgaaagaagatacgatagttacgaataatgtgtatgatgaggacatactttaaaaatgtaattcctctgtacagtaaattacaaatctttagggatttttttgtaataagagaatttatatttgtaatggtctaagaatttttttgtaatgtggtatatagaattttaatttggagcacttataagctggtaagagagactatagcatctgaattatcttggtttatgtttcagcatttcctctagaatttttgctctcaaatatgtgatttaatgaactaaaaacaacactcatcagtcttgggaaatttgaactttgatcaacttaactaaagaaggaagggtagtaagaatttttcaaatacaaatatttgccaattcacagatgataacatttaaggccttcaaaagtaagggtttttccttgtttctccagtcagcttttgtcaactctaatagttttttcataaacattttttatttgtataattgcaacagtttaagaaattatcacaactatttagaaacatttaaaatgttctttttgatataagctatatacttggaaaaatacattggtatctaaaatttgaggtgtgttaagactgctttttgttttaaaaaatggtttacattcaaatttttgaagtgttttatgcttcatatggctaagttgtagtttggcagagttaacagcataagaataaacatgctgtaattttaaaagatgctttgaataaaaatttattttaattt

SEQ ID NO: 5178 - protein, 139 aa, Homo sapien
MKESIHPAESVVTSVIGCFHGRNRSRLTKGLIQVRGPICVTIQTVEKPLFKVDSSKHISVFTPERNLCLFRKWLPEQIHPCKPPLSEAPLRQAEERGAHGHTQQTSGCRQQGRGRVAGEVLGNERAAHPHFERQAGSEG

SEQ ID NO: 5179 - DNA, 1549 bp, Homo sapien
aggcgcgcggcgggcaggcctgggagggggcgggtccgcgcgggcttcggaggagcccgccctgccagaggagagggaggtcacggcgtaaaggtgcagctgccgccaccgccgcttctgcaaggtctcagggacgggctgcagccatgtcctattgccggcaggaaggctttgcccaggatggttccttctggaatgtctattcccctccttccctccctgaagctctttgtcagggacaaaggtaggatccctccccttccgtcttctccactggatgcctgtgtcgtattcatctgtgaccaccaggtactaccacagagctggagctgaggaagggaaggatcgaatcatatttgtaaccaaagaagatcatgaaactccaagcagtgcagaattggtggctgatgaccccaacgatccatacgaggagcatggattgatactgccaaatggaaacattaactggaactgcccatgccttgggggaatggccagcggtccctgtggagaacagtttaagtcagccttttcctgcttccactatagcacggaggagatcaaggggtcagactgtgtagaccagttccgggccatgcaggaatgcatgcagaaatacccagacctctatccccaagaggatgaggatgaggaagaggaaagagagaagaagccagcagaacaagcagaagaaacagctcccattgaggccactgcaaccaaagaagaggagggatcaagttaatgaaggccacaaggcactgggcaccagtccttttggagtggaccttttgcaaaaggccttgtcatcaccttccaagaaagtttccttctgttgtcctgtgcattataatatacaaaataacttattttgatgatcagaggtcttgaggtcttgacatcttgacatatacactgaaaaaaatgggggttgtatgtatgtgtgtcctacccaaacctgtggccgccacttttgaattctcagattgccctgaattttgccacttttaaataatgtgctgaataagctcagcaactaaaaaccattacccaagaacgtttcttgtgagtgagctgatttattctgattcattatattccttttggtagattttataccccttggggaaataatacaacaaaaacatctcttaaaaatgctgggatggggccatatctactagcagaggccagatggtcagatatgatttctgcaaacccatcttgaccttgagtatgtgaaggggtactgtactttattcctgatacattttggtttccatgtaggtgttgagctcctggttttctgtgtttggatgatgaagatttggacccttccattcataatccctttctaagtgaagggagaggctggcttggctgttccttgttattccgaaagccctggtttggggcccatgttcacactggctctcagtctagtcaggtgcaatgttcttgagaggtggggacctaattattaccagagtagcagcaagagaggaaacgttgtgaattaagtattcaattaaaaggaaacatgatttct

SEQ ID NO: 5180 - protein, 155 aa, Homo sapien
MPVSYSSVTTRYYHRAGAEEGKDRIIFVTKEDHETPSSAELVADDPNDPYEEHGLILPNGNINWNCPCLGGMASGPCGEQFKSAFSCFHYSTEEIKGSDCVDQFRAMQECMQKYPDLYPQEDEDEEEEREKKPAEQAEETAPIEATATKEEEGSS

SEQ ID NO: 5181 - DNA, 3318 bp, Homo sapien
tgtgttggtacccgggaattcggccattatggccgggggtcactgaagagtcatggtgggggcccgggcctaccgctgctgccgctgtcgaagagcggcagagaaagcttcaggagtaccttgcagccaagggaaaactgaagagccaaaacaccaagccttatctaaaatccaagaataattgccagaatcaaccaccttctaaatctactattagacccaaaaatgatgttaccaaccatgttgttttgcctgtcaaacctaaaaggtccatcagcattaaactccagcccagaccacctaatactgcagggtcccagaagccgaagttggagccaccaaaacttctgggcaaaaggctgacttcagaatgtgtttcttctaacccatactctaagccttctagcaagagttttcaacagtgtgaagctggatcgtccacaacaggagaactgtcaagaaaacctgtggggtcacttaatatagagcaattgaaaactacaaagcagcagttaacagatcaaggaaatggtaaatgtatagactttatgaataatatccatgttgaaaacgaatctttggataactttctaaaagaaacaaacaaagagaacttgctcgatatcttaacagaacctgagaggaagccagatcctaaattatataccagaagtaagccaaagactgactcttataatcaaaccaagaacagtttagttcctaaacaagccttgggcaaaagttcagttaatagtgctgttctgaaagatagggttaataaacaatttgttggagaaacacaaagcaggactttcccagtaaaatcacagcaactctctagaggagcagatcttgcaagaccaggagtaaaaccctcaaggacggttccctctcactttattcggacccttagtaaagttcagtcatcaaagaaaccagtagtcaagaacatcaaagatataaaggttaataggagtcaatatgaaagaccaaatgaaactaagatacggtcataccctgttactgaacagagagtgaagcacaccaaacccagaacataccccagtttgcttcagggtgaatataacaacagacatccaaacatcaagcaagatcagaagtccagccaagtttgtatacctcagacatcatgtgtactgcaaaagtcaaaagccgtaagccagaggcctaatttgacagttggcagatttaattcagccattccaagcacccctagcataagaccaaatggaaccagtggtaataaacataacaataatggctttcagcaaaaagcacagactttggactccaagttgaaaaaggctgttccccagaaccattttctgaacaagacagctcccaaaactcaagctgatgtcacaaccgtaaatgggacccaaacaaacccaaatattaaaaagaaggcaacagcagaggatcgaaggaaacaactagaagaatggcagaaatctaagggaaaaacctataaacggcctcctatggaacttaaaacaaaaagaaaagtaataaaggaaatgaatatttcattctggaagagcattgaaaaagaagaggaagaaaagaaagcacaactcgaactgtccagtaaaattaacaacactctgacagaatgtctgaacctcatcgaagggggtgtaccttctaatgaaatacttaacatattgtccagcattcctgaagctgaaaaatttgctaaattctggatctgcaaagcaaagttgttggcaagtaaaggcacctttgatgttattgggctatatgaagaggccattaaaaatggggcaacaccaatacaagagttgcggaaagttgttcttaatatcttgcaagactcaaacagaaccacagaagggattacttctgactcttcagttgctgaaactagtataacatcagtggaagagctggccaagaagatggaatctgtgaagtcttgtctttctccaaaagagagggaacaagtcacggcgacaccccgaatagccaaggcagaacagcataattatcctggtatcaaattacagattggtccaatccctagaataaatgggatgccggaagtgcaagacatgaaatttatcactcctgtacggcgttcgtcgaggattgagcgagcagtgtcccgctacccagaaatgctgcaggaacacgatttagtagtggcttctcttgatgaactgttagaagtggaagaaacaaaatgttttatattccgtagaaatgaggcgctgccctgtaacattggggtttcaaacccctgaatcataatttcttgatgctttttttaaaaaaggtgtttcagaaccaacataagacaagaaatattcttgtccaagtgacctggaaaaaaagagaggcatcatggatgcagattatggacgctcaggacttaagtaattcactgggcttactctcaaattttctctccccatgggaaaatctttgctttatgtgtttaagaccagtttgccagttttacagtatacataaatttcaaacttttgaatatttaccctacaactatgataaatatttatactttattgatctactttaatcccaacatagttttttatatcagaaggttggtcccacaatataatgggacttttctttctgcatccaccttagcagagggcaagttctttcatcgtggaagatctgaactttgacgctagcttgacaggctgaatggaccttgacagatggccaagtcaaaacccctcattttacagatgagtttatgctagctgtgcctttgctcagagatcataaatttatgtgtgatctttgactttcatcacagtatccttgtaaatgagagagaattcttgttttttctatgccaggtctcctcagatgaaacacaatcctgaattggcgtggtcgtctagcttttatattcaaacctagttttgcatttgttactcagaaacacttcaagtaacaaaaggggggcaggggagaggggtggggagtggacacttgcttcttcagttctttgctcagctagggtatagctggcctgagaaggcagtgcaagccccagagactgttgtaggttgctttttcttcctcctgggcaactatttgtggaaaggttttaccttagtcattatgtaaatataattgtgtagaaaaacctagtcaacacattttaaattttagctttcttaatatttaagtattatcttaaaacaacattaaatttctattagttcctgcttgtttatcttatttattatagaaaaccatgataatggctttgcatagagaattaggagtttgtctaag

SEQ ID NO: 5182 - protein, 760 aa, Homo sapien
CWYPGIRPLWPGVTEESWWGPGPTAAAAVEERQRKLQEYLAAKGKLKSQNTKPYLKSKNNCQNQPPSKSTIRPKNDVTNHVVLPVKPKRSISIKLQPRPPNTAGSQKPKLEPPKLLGKRLTSECVSSNPYSKPSSKSFQQCEAGSSTTGELSRKPVGSLNIEQLKTTKQQLTDQGNGKCIDFMNNIHVENESLDNFLKETNKENLLDILTEPERKPDPKLYTRSKPKTDSYNQTKNSLVPKQALGKSSVNSAVLKDRVNKQFVGETQSRTFPVKSQQLSRGADLARPGVKPSRTVPSHFIRTLSKVQSSKKPVVKNIKDIKVNRSQYERPNETKIRSYPVTEQRVKHTKPRTYPSLLQGEYNNRHPNIKQDQKSSQVCIPQTSCVLQKSKAVSQRPNLTVGRFNSAIPSTPSIRPNGTSGNKHNNNGFQQKAQTLDSKLKKAVPQNHFLNKTAPKTQADVTTVNGTQTNPNIKKKATAEDRRKQLEEWQKSKGKTYKRPPMELKTKRKVIKEMNISFWKSIEKEEEEKKAQLELSSKINNTLTECLNLIEGGVPSNEILNILSSIPEAEKFAKFWICKAKLLASKGTFDVIGLYEEAIKNGATPIQELRKVVLNILQDSNRTTEGITSDSSVAETSITSVEELAKKMESVKSCLSPKEREQVTATPRIAKAEQHNYPGIKLQIGPIPRINGMPEVQDMKFITPVRRSSRIERAVSRYPEMLQEHDLVVASLDELLEVEETKCFIFRRNEALPCNIGVSNP

SEQ ID NO: 5183 - DNA, 1761 bp, Homo sapien
atggctttagagatccacatgtcagaccccatgtgcctcatcgagaactttaatgagcagctgaaggttaatcaggaagctttggagatcctgtctgccattacgcaacctgtagttgtggtagcgattgtgggcctctatcgcactggcaaatcctacctgatgaacaagctggctgggaagaacaagggcttctctgttgcatctacggtgcagtctcacaccaagggaatttggatatggtgtgtgcctcatcccaactggccaaatcacacattagttctgcttgacaccgagggcctgggagatgtagagaaggctgacaacaagaatgatatccagatctttgcactggcactcttactgagcagcacctttgtgtacaatactgtgaacaaaattgatcagggtgctatcgacctactgcacaatgtgacagaactgacagatctgctcaaggcaagaaactcacccgaccttgacagggttgaagatcctgctgactctgcgagcttcttcccagacttagtgtggactctgagagatttctgcttaggcctggaaatagatgggcaacttgtcacaccagatgaatacctggagaattccctaaggccaaagcaaggtagtgatcaaagagttcaaaatttcaatttgcctcgtctgtgtatacagaagttctttccaaaaaagaaatgctttatctttgacttacctgctcaccaaaaaaagcttgcccaacttgaaacactgcctgatgatgagctagagcctgaatttgtgcaacaagtgacagaattctgttcctacatctttagccattctatgaccaagactcttccaggtggcatcatggtcaatggatctcgtctaaagaacctggtgctgacctatgtcaatgccatcagcagtggggatctgccttgcatagagaatgcagtcctggccttggctcagagagagaactcagctgcagtgcaaaaggccattgcccactatgaccagcaaatgggccagaaagtgcagctgcccatggaaaccctccaggagctgctggacctgcacaggaccagtgagagggaggccattgaagtcttcatgaaaaactctttcaaggatgtagaccaaagtttccagaaagaattggagactctactagatgcaaaacagaatgacatttgtaaacggaacctggaagcatcctcggattattgctcggctttacttaaggatatttttggtcctctagaagaagcagtgaagcagggaatttattctaagccaggaggccataatctcttcattcagaaaacagaagaactgaaggcaaagtactatcgggagcctcggaaaggaatacaggctgaagaagttctgcagaaatatttaaagtccaaggagtctgtgagtcatgcaatattacagactgaccaggctctcacagagacggaaaaaaagaagaaagaggcacaagtgaaagcagaagctgaaaaggctgaagcgcaaaggttggcggcgattcaaaggcagaacgagcaaatgatgcaggagagggagagactccatcaggaacaagtgagacaaatggagatagccaaacaaaattggctggcagagcaacagaaaatgcaggaacaacagatgcaggaacaggctgcacagctcagcacaacattccaagctcaaaatagaagccttctcagtgagctccagcacgcccagaggactgttaataacgatgatccatgtgttttactctaa

SEQ ID NO: 5184 - protein, 586 aa, Homo sapien
MALEIHMSDPMCLIENFNEQLKVNQEALEILSAITQPVVVVAIVGLYRTGKSYLMNKLAGKNKGFSVASTVQSHTKGIWIWCVPHPNWPNHTLVLLDTEGLGDVEKADNKNDIQIFALALLLSSTFVYNTVNKIDQGAIDLLHNVTELTDLLKARNSPDLDRVEDPADSASFFPDLVWTLRDFCLGLEIDGQLVTPDEYLENSLRPKQGSDQRVQNFNLPRLCIQKFFPKKKCFIFDLPAHQKKLAQLETLPDDELEPEFVQQVTEFCSYIFSHSMTKTLPGGIMVNGSRLKNLVLTYVNAISSGDLPCIENAVLALAQRENSAAVQKAIAHYDQQMGQKVQLPMETLQELLDLHRTSEREAIEVFMKNSFKDVDQSFQKELETLLDAKQNDICKRNLEASSDYCSALLKDIFGPLEEAVKQGIYSKPGGHNLFIQKTEELKAKYYREPRKGIQAEEVLQKYLKSKESVSHAILQTDQALTETEKKKKEAQVKAEAEKAEAQRLAAIQRQNEQMMQERERLHQEQVRQMEIAKQNWLAEQQKMQEQQMQEQAAQLSTTFQAQNRSLLSELQHAQRTVNNDDPCVLL

SEQ ID NO: 5185 - DNA, 5482 bp, Homo sapien
cgggcagcgcagcccgcagaggcgctgcggcccgtgcagccccggaggcccctcgcggagaaggcggcggcggaggagaggccgagttaccgcccgccgcccgcgcccccccaaccccgccgccgccgccgccgccgccactgccccccctccccgcggcgccgcatcttgaatggaaacatggcggtgccggctcggacctgcggcgcctctcggcccggcccagcgcggactgcgcgcccctggcccggctgcggcccccaccctggccccggcacccggcgcccgacgtccgggcccccgcgcccgctgtggctgctgctgccgcttctaccgctgctcgccgcccccggcgcctctgcctacagcttcccccagcagcacacgatgcagcactgggcccggcgtctggagcaggaggtcgacggcgtgatgcggatttttggaggcgtccagcagctccgtgagatttacaaggacaaccggaacctgttcgaggtacaggagaatgagcctcagaagttggtggagaaggtggcaggggacattgagagccttctggacaggaaggtgcaggccctgaagagactggctgatgctgcagagaacttccagaaagcacaccgctggcaggacaacatcaaggaggaagacatcgtgtactatgacgccaaggctgacgctgagctggacgaccctgagagtgaggatgtggaaagggggtctaaggccagcaccctaaggctggacttcatcgaggacccaaacttcaagaacaaggtcaactattcatacgcggctgtacagatccctacggacatctacaaaggctccactgtcatcctcaatgagctcaactggacagaggccctggagaatgtgttcatggaaaaccgcagacaagaccccacactgctgtggcaggtcttcggcagcgccacaggagtcactcgctactacccggccaccccgtggcgagcccccaagaagatcgacctgtacgatgtccgaaggagaccctggtatatccagggggcctcgtcacccaaagacatggtcatcatcgtggatgtgagtggcagtgtgagcggcctgaccctgaagctgatgaagacatctgtctgcgagatgctggacacgctgtctgatgatgactatgtgaatgtggcctcgttcaacgagaaggcacagcctgtgtcatgcttcacacacctggtgcaggccaatgtgcgcaacaagaaggtgttcaaggaagctgtgcagggcatggtggccaagggcaccacaggctacaaggccggctttgagtatgcctttgaccagctgcagaactccaacatcactcgggccaactgcaacaagatgatcatgatgttcacggatggtggtgaggaccgcgtgcaggacgtctttgagaagtacaattggccaaaccggacggtgcgcgtgtttactttctccgtggggcagcataactatgacgtcacaccgctgcagtggatggcctgtgccaacaaaggctactattttgagatcccttccatcggagccatccgcatcaacacacaggaatatctagatgtgttgggcaggcccatggtgctggcaggcaaggaggccaagcaggttcagtggaccaacgtgtatgaggatgcactgggactggggttggtggtaacagggaccctccctgttttcaacctgacacaggatggccctggggaaaagaagaaccagctgatcctgggcgtgatgggcattgacgtggctctgaatgacatcaagaggctgacccccaactacacgcttggagccaacggctatgtgtttgccattgacctgaacggctacgtgttgctgcaccccaatctcaagccccagaccaccaacttccgggagcctgtgactctggacttcctggatgcggagctagaggatgagaacaaggaagagatccgtcggagcatgattgatggcaacaagggccacaagcagatcagaacgttggtcaagtccctggatgagaggtacatagatgaggtgacacggaactacacctgggtgcctataaggagcactaactacagcctggggctggtgctcccaccctacagcaccttctacctccaagccaatctcagtgaccagatcctgcaggtcaagtattttgagttcctgctccccagcagctttgagtctgaaggacacgttttcattgctcccagagagtactgcaaggacctgaatgcctcagacaacaacaccgagttcctgaaaaactttattgagctcatggagaaagtgactccagactccaagcagtgcaacaacttccttctgcacaacctgatcttggacacgggcatcacgcagcagctggtagagcgtgtgtggagggaccaggatctcaacacgtacagcctactggccgtgttcgctgccacagacggtggcatcacccgagtcttccccaacaaggcagctgaggactggacagagaaccctgagcccttcaatgccagcttctaccgccgcagcctggataaccacggttatgtcttcaagcccccacaccaggatgccctgttaaggccgctggagctggagaatgacactgtgggcatcctcgtcagcacagctgtggagctcagcctaggcaggcgcacactgaggccagcagtggtgggcgtcaagctggacctagaggcttgggctgagaagttcaaggtgctagccagcaaccgtacccaccaagaccagcctcagaagtgcggccccaacagccactgtgagatggactgcgaggttaacaatgaggacttactctgtgtcctcattgatgatggaggattcctggtgctgtcaaaccagaaccatcagtgggaccaggtgggcaggttcttcagtgaggtggatgccaacctgatgctggcactctacaataactccttctacacccgcaaggagtcctatgactatcaggcagcctgtgcccctcagccccctggcaacctgggtgctgcaccccggggtgtctttgtgcccaccgttgcagatttccttaacctggcctggtggacctctgctgccgcctggtccctgttccagcagcttctctacggcctcatctaccacagctggttccaagcagaccccgcggaggccgaggggagccccgagacgcgcgagagcagctgcgtcatgaaacagacccagtactacttcggctcggtaaacgcctcctacaacgccatcatcgactgcggaaactgctccaggctgttccacgcgcagagactgaccaacaccaatcttctctttgtggtggccgagaagccgctgtgcagccagtgcgaggctggccggctgctgcagaaggagacgcactgcccagcggacggcccggagcagtgtgagctagtgcagagaccgcgataccggagaggcccgcacatctgcttcgactacaacgcgacagaagatacctcagactgtggccgcggggcctccttcccgccgtcgctgggcgtcctggtctccctgcaactgctgctcctcctgggcctgccgccccggccgcagcctcaagtcctcgtccacgcctctcgccgcctctgagcaccctgccccaccccacctccactcccacctcacccggcctcttcgcctttcccaccctcctgccccacactccccgccttagagcctcgtccctccctcactgaaggacctgagctggccaggccctgagagtctggtctgcgccttgggatggggagtcccaaagcgggacgccgcaggtgtttggcacccaaatcacatctcacctccgaactgttcaagtgtccccagacccttcttgcctgctgggctccccccagtgggatgggacagggaggccacacgcactggtgccaaaaccaggcctctgctgccgcccttcctggaggctgcctatgttgggggggaccctgcctcagctgacccggcctctctgccccacccaagcccaaacttggtttctgtgagaatagtggaggaaggtgagatggccagtttgaagcctgtgcctcccagcttaaatcctagcaggagagaggctctggggcagcccccatgggctcctgcccctttcaggcctacagccacatccccaagcccaccaggtgtcaggatagtcacagtgataccagttcagacactaccccatatacacctggaacattgaggatggaaactggactcacattcgacataccccactgggcacacgcacaaacacacacactatggggtggggtgggtgtaggggcttacaaagccttacacagggcgaggggttggtgggagggttggcacctgcacactccatctcctgctcaccacctgcctctaatctgagctgcagcctggctggtcctcccatttctaaagctgaatgtcaaacagtgccaaatgctggggcagggggtgaagaaccctctgtcccacccctagccaccagtgtcctccaagtgccccctcacctctccaggtgctcattgtaaccatttctcactagtgtcaggcccccagtgggaccacatgccactgcctgcacctttcggcagaggaacccccaccagacatcaccctttgccttagcaggggtgactttgtctctcctggctgggccatccttccgccaatctggcccttacacactcaggcctgtgcccactccctatctccttcccacccctacacacacactccctgcttgcaggaggccaaactgtccctcccttgctgaacacacacacacacacacacacacaggtggggactgggcacagctcttcacaccattcattctggtcatttcccccaaaggcatcccagcctgggggccagtggggaactgagggcaaggggatatagtgatggggctcagatggactgggaggagggggagggtgatgcattaattaatggcttcgttaattaatgtcatgttgcttgtcgctttctcagtgtgtgtgtgtggtccatgcccactgctggtgccagggtgggtgtccatgtgcacccggcctggatgccagctgtgtccttcgggggcgtgcgtgtaactgtagtgtagtcaggtgctcaatggagaatataaacatatacagaaaaatatatattttaagtttaaaaaacagaaaaacagacaaaacaatccccatcaggtagctgtctaacccccagctgggtctaatccttctcattacccacccgacctggctgcccctcaccttgggctgggggactggggggccatttccttttctctgccctttttttgttgttctattttgtacagacaagttggaaaaacaacagcgacaaaaaagtcaagaaactttgtaaaatatcgtgtgtgtgattccttgtaaaatattttcaaatggtttattacagaagatcagttattaaataatgttcatattttcacttc

SEQ ID NO: 5186 - protein, 1145 aa, Homo sapien
MAVPARTCGASRPGPARTARPWPGCGPHPGPGTRRPTSGPPRPLWLLLPLLPLLAAPGASAYSFPQQHTMQHWARRLEQEVDGVMRIFGGVQQLREIYKDNRNLFEVQENEPQKLVEKVAGDIESLLDRKVQALKRLADAAENFQKAHRWQDNIKEEDIVYYDAKADAELDDPESEDVERGSKASTLRLDFIEDPNFKNKVNYSYAAVQIPTDIYKGSTVILNELNWTEALENVFMENRRQDPTLLWQVFGSATGVTRYYPATPWRAPKKIDLYDVRRRPWYIQGASSPKDMVIIVDVSGSVSGLTLKLMKTSVCEMLDTLSDDDYVNVASFNEKAQPVSCFTHLVQANVRNKKVFKEAVQGMVAKGTTGYKAGFEYAFDQLQNSNITRANCNKMIMMFTDGGEDRVQDVFEKYNWPNRTVRVFTFSVGQHNYDVTPLQWMACANKGYYFEIPSIGAIRINTQEYLDVLGRPMVLAGKEAKQVQWTNVYEDALGLGLVVTGTLPVFNLTQDGPGEKKNQLILGVMGIDVALNDIKRLTPNYTLGANGYVFAIDLNGYVLLHPNLKPQTTNFREPVTLDFLDAELEDENKEEIRRSMIDGNKGHKQIRTLVKSLDERYIDEVTRNYTWVPIRSTNYSLGLVLPPYSTFYLQANLSDQILQVKYFEFLLPSSFESEGHVFIAPREYCKDLNASDNNTEFLKNFIELMEKVTPDSKQCNNFLLHNLILDTGITQQLVERVWRDQDLNTYSLLAVFAATDGGITRVFPNKAAEDWTENPEPFNASFYRRSLDNHGYVFKPPHQDALLRPLELENDTVGILVSTAVELSLGRRTLRPAVVGVKLDLEAWAEKFKVLASNRTHQDQPQKCGPNSHCEMDCEVNNEDLLCVLIDDGGFLVLSNQNHQWDQVGRFFSEVDANLMLALYNNSFYTRKESYDYQAACAPQPPGNLGAAPRGVFVPTVADFLNLAWWTSAAAWSLFQQLLYGLIYHSWFQADPAEAEGSPETRESSCVMKQTQYYFGSVNASYNAIIDCGNCSRLFHAQRLTNTNLLFVVAEKPLCSQCEAGRLLQKETHCPADGPEQCELVQRPRYRRGPHICFDYNATEDTSDCGRGASFPPSLGVLVSLQLLLLLGLPPRPQPQVLVHASRRL

SEQ ID NO: 5187 - DNA, 4210 bp, Homo sapien
cgcctttgcaaggttgctggacagatggaactggaagggcagccgtctgccgcccacgaacaccttctcaagcactttgagtgaccacggcttgcaagctggtggctggccccccgagtcccgggctctgaggcacggccgtcgacttaagcgttgcatcctgttacctggagaccctctgagctctcacctgctacttctgccgctgcttctgcacagggatctttctctttgactgctttgctgagcacatggctggaaacaggatgagcagaatccaccagatcacaattaaagtatcctaagagcccgggcgaggacccctccaggatgcaggtcccgaacagcaccggcccggacaacgcgacgctgcagatgctgcggaacccggcgatcgcggtggccctgcccgtggtgtactcgctggtggcggcggtcagcatcccgggcaacctcttctctctgtgggtgctgtgccggcgcatggggcccagatccccgtcggtcatcttcatgatcaacctgagcgtcacggacctgatgctggccagcgtgttgcctttccaaatctactaccattgcaaccgccaccactgggtattcggggtgctgctttgcaacgtggtgaccgtggccttttacgcaaacatgtattccagcatcctcaccatgacctgtatcagcgtggagcgcttccctgggggtcctgtacccgctcagctccaagcgctggcgccgccgtcgttacgcggtggccgcgtgtgcagggacctggctgctgctcctgaccgccctgtccccgctggcgcgcaccgatctcacctacccggtgcacgccctgggcatcatcacctgcttcgacgtcctcaagtggacgatgctccccagcgtggccatgtgggccgtgttcctcttcaccatcttcatcctgctgttcctcatcccgttcgtgatcaccgtggcttgttacacggccaccatcctcaagctgttgcgcacggaggaggcgcacggccgggagcagcggaggcgcgcggtgggcctggccgcggtggtcttgctggcctttgtcacctgcttcgcccccaacaacttcgtgctcctggcgcacatcgtgagccgcctgttctacggcaagagctactaccacgtgtacaagctcacgctgtgtctcagctgcctcaacaactgtctggacccgttgtttattactttgcgtcccgggaattccagctgcgcctgcgggaatatttgggctgcgccgggtgcccagagacaccctggacacgcgccgcgagagcctcttctccgccaggaccacgtccgtgcgctccgaggccggtgcgcaccctgaagggatggagggagccaccaggcccggcctccagaggcaggagagtgtgttctgagtcccgggggcgcagcttggagagccgggggcgcagcttggagatccaggggcgcatggagaggccacggtgccagaggttcagggagaacagctgcgttgctcccaggcactgcagaggcccggtggggaagggtctccaggctttattcctcccaggcactgcagaggcaccggtgaggaagggtctccaggcttcactcagggtagagaaacaagcaaagcccagcagcgcacagggtgcttgttatcctgcagagggtgcctctgcctctctgtgtcaggggacagcttgtgtcaccacgcccggctaatttttgtatacttaaatagtagagctgggctgtcacccccgagctccttagacactcctcacacctgtccatacccgagggtggatattcaaccagccccaccgcctacccgactcggtttctggatatcctccgtgggcgaactgcgagccccattcccagctcttctccctgctgacatcgtcccttagttgtggttctggccttctccattctcctccaggggttctggtctccgtagcccggtgcacgccgaaatttctgtttatttcactcaggggcactgtggttgctgtggttggaattcttctttcagaggagcgcctggggctcctgcaagtcagctactctccgtgcccacttccccccacacacacacaccccaccctgttgctgaccaaggtgatttttggcacatttgttctggcctggcttggtgggaccccacccctattctgcttctgtgagtccctgatagagaaggaggtcccatcaggcccctggaacacactcaggcttccgtgactcaggacaaggaccacgggaggcccaggtgcggaaaggaggctccgtgagatggggtccagcccatcccaacacaagggtgcagcttgattcgggagttccccacctcctgcccattctccgcgtccttttaccccatggagagcctcagccatggcaagtccatctggagtccaggaagcaggcaactggcctgacccatgagaccgtttggagaccaagcagcagatgcaggtgtggaccccaggaacctacaggggtgtcagccgctgagccccctccctgctgtgtgggtggtgagcaggctgggtctttgtctgtcttcttctacacggcatgtgcctgcaccagccccaacacctgagctggtttagcgcaaagaagagctctgactctccaggggtgctgggacatcacgtggaattggatcccaggctctcttgggcgagaaagaccattctggaggtgggagtgggagagctgcctgtctgcccacgggctctgcgtctccgcagtgggtggccttggatgcccggcccctccctttctgtgcactggggacgctgatggaggctgaagctgctgttcggaggccctctattggtgcctctctcctgccgtcatcactatggcaggaaaacagagatggtttagtaatgaattatcattcccaaacccgtgtccacctggaacatcaggatgggaccatgtttgaaaatcgggtctttccaaatgtaattaagtaaggcgaggccatactgcatttacaatgggcccaatccagtgtccctatgagagacggaagaggagacacagacacaaagcaggaggccacataaagacagaggcagagactgaagtgatgctgccccaagcccagggatgcctggagtccccaggagctgggagaggcaggaaggagcctcccctagagtctctggagggaactggatacaattgcagagtgcactaaacagttgccccagaaagacatgtcttgttttaaagcccagaacctgaaattattatagattttattcggtaataaggaactttgcatgtgtaattacttaaggatatgaagatgagattgtgctggattattaagcaccctaaatgccatgacaggtgtccttccaagagacagaagaggagacacagacacagagcaggaggacacgtggagacagaggcagactggagtgatgcggccacaagcccagggacacctggagcccccaggagctgggagaggcaggaaggatcctcccctagagcctccagggggaactggaggatgcgtaagagacccagaacttccacagaaggaggaaaattaacctcctgcttctctagactgttccaaagctgaaccctagaaagcaaagctgatacagaagcatccaggctgcaggagtacaggtcgcaagtgctgagcgtgggccttgggtgtgtctcatgggggaaaaaaaactgtgaaaaacctcagagtagcatcttcacagtaacgcacggacgatccctaaactgccttgtaaacaaaaatgagagcttgagtcagaggaagccgagacaatatccttcctcgacaacgtgcgagaaccctgacgtcccccagcaaaggaagacgttgcaagcaggcaaaatgcgtcgatttttttttttgtcagtatgatgatttttgcagccacttggctatggagagcagccgacaccccctcttacagccgtggatgtttcctggaagctgactcagtctgttcactggttgagctttgagtgaaaagataacacaggtctattgactcacacacatgttttaagatggaaaactttacttctgttcttggcaggacatggagagagggagggattccaaaaagtctcagcctccatcaaggcgtggcagctcatgccggtaatctcagcgacttggggaggcatcagagcgggaggactgatt

SEQ ID NO: 5188 - protein, 402 aa, Homo sapien
MINLSVTDLMLASVLPFQIYYHCNRHHWVFGVLLCNVVTVAFYANMYSSILTMTCISVERFPGGPVPAQLQALAPPSLRGGRVCRDLAAAPDRPVPAGAHRSHLPGARPGHHHLLRRPQVDDAPQRGHVGRVPLHHLHPAVPHPVRDHRGLLHGHHPQAVAHGGGARPGAAEARGGPGRGGLAGLCHLLRPQQLRAPGAHREPPVLRQELLPRVQAHAVSQLPQQLSGPVVYYFASREFQLRLREYLGCAGCPETPWTRAARASSPPGPRPCAPRPVRTLKGWREPPGPASRGRRVCSESRGRSLESRGRSLEIQGRMERPRCQRFRENSCVAPRHCRGPVGKGLQALFLPGTAEAPVRKGLQASLRVEKQAKPSSAQGACYPAEGASASLCQGTACVTTPG

SEQ ID NO: 5189 - DNA, 780 bp, Homo sapien
agatgatgcaagtatgaatgggtacggggggagcttaaaacctgccaacactgagacttgatgccaggggccatgcacccgctctgccacctgctaggtctgtgcaatggtcagagcagaggtgtgtgatgagttcagctcccaagcacatccacacttaggaagtgttctgtgtgtttttaaataatccttaccatgtaaagattgtattacatttgtatacaaatttttttgcattttacttttgtaatatttggggttttatagatttttattttatggccaagtatacttttgtaaggaaatgttgaagtcttgagtatttttattcttttaaaaaactatagttagtgtcaactgtgagcactgataaatattattcatgtgtggttttccttctttttaatccagactttttaagaaactgttttggcatagagctttacttaaaatgctgcttcattttacacattgtgaatactgaagattctaaaaaataaagatgcatttaaaatctctgtgctgttccattgtagaaatggtaatgtgcattgctttgccaaagtggtaattaaatgtttaatggtttagaactcctagttcacaacagggcttctcgtcatcacttgcagcgtgtgagcttccaaataagccgccatttctttggaaaacgcacgcacttaggcatggcgatctcctgttccgttaggaaatacggttatgttgacattatggttactgtgcttgtggttttgcaataaaccatgtattgaaagcaaa

SEQ ID NO: 5190 - protein, 19 aa, Homo sapien
MLTLWLLCLWFCNKPCIES

SEQ ID NO: 5191 - DNA, 7444 bp, Homo sapien
gctggctgcggaaggggagggggggggagaaggcgattggatgcggcggcggcggcggatcccggagagccccggagtgagcggagtagcgagtcggcaacccggaggggtagaaatatttctgtcatggctcattcaaagactaggaccaatgatggaaaaattacatatccgcctggggtcaaggaaatatcagataaaatatctaaagaggagatggtgagacgattaaagatggttgtgaaaacttttatggatatggaccaggactctgaagaagaaaaggagctttatttaaacctagctttacatcttgcttcagatttttttctcaagcatcctgataaagatgttcgcttactggtagcctgctgccttgctgatattttcaggatttatgctcctgaagctccttacacatcccctgataaactaaaggatatatttatgtttataacaagacagttgaaggggctagaggatacaaagagcccacaattcaataggtatttttatttacttgagaacattgcttgggtcaagtcatataacatatgctttgagttagaagatagcaatgaaattttcacccagctatacagaaccttattttcagttataaacaatggccacaatcagaaagtccatatgcacatggtagaccttatgagctctattatttgtgaaggtgatacagtgtctcaggagcttttggatacggttttagtaaatctggtacctgctcataagaatttaaacaagcaagcatatgatttggcaaaggctttactgaagaggacagctcaagctattgagccatatattaccaatttttttaatcaggttctgatgcttgggaaaacatctatcagcgatttgtcagagcatgtctttgacttaattttggagctctacaatattgatagtcatttgctgctctctgttttaccccagcttgaatttaaattaaagagcaatgataatgaggagcgcctacaagttgttaaactactggcaaaaatgtttggggcaaaggattcagaattggcttctcaaaacaagccactttggcagtgctacttgggcaggtttaatgatatccatgtaccaatccgcctggaatgtgtgaaatttgctagccattgtctcatgaaccatcctgatttagcaaaagacttaacagagtatcttaaagtgaggtcacatgaccctgaggaagctattagacatgatgttattgtgtcaatagttacagctgctaaaaaggatattcttctggtcaatgatcacttacttaattttgtgagagagagaacattagacaaacgatggagagtacgcaaagaagccatgatgggacttgcccaaatttataagaaatatgctttacagtcagcagctggaaaagatgctgcaaaacagatagcatggatcaaagacaaattgctacatatatattatcaaaatagtattgatgatcgactacttgttgaacggatctttgctcaatacatggttcctcacaatttagaaactacagaacggatgaaatgcttatattacttgtatgccacactggatttaaatgctgtgaaagcattgaatgaaatgtggaaatgtcaaaatctgctccgacatcaagtaaaggatttgcttgacttgattaagcaacccaaaacagatgccagtgtcaaggccatattttcaaaagtgatggttattacaagaaatttacctgatcctggtaaggctcaggatttcatgaagaaattcacacaggtgttagaagatgatgagaaaataagaaagcagttagaagtacttgttagtccaacatgctcctgcaagcaggctgaaggttgtgtgcgtgaaataactaagaagttgggcaaccccaaacagcctacaaatcctttcctggaaatgatcaagtttctcttggagaggatagcacctgtgcacatagataccgaatctatcagtgctcttattaaacaagtgaacaaatcaatagatggaacagcagatgatgaagatgagggtgttccaactgatcaagccatcagagcaggtcttgaactgcttaaggtactctcatttacacatcccatctcatttcattctgctgaaacatttgaatcattactggcttgtctgaaaatggatgatgaaaaagtagcagaagctgcactacaaattttcaaaaacacaggaagcaaaattgaagaggattttccacacatcagatcagccttgcttcctgttttacatcacaaatctaaaaaaggacccccccgtcaagccaaatatgccattcattgtatccatgcgatattttctagtaaagagacccagtttgcacagatatttgagcctctgcataagagcctagatccaagcaacctggaacatctcataacaccattggttactattggtcatattgctctccttgcacctgatcaatttgctgctcctttgaaatctttggtagctactttcattgtgaaagatcttctcatgaatgatcggcttccagggaaaaagacaactaaactttgggttccagatgaagaagtatctcctgagacaatggtcaaaattcaggctattaaaatgatggttcgatggctacttggaatgaaaaataatcacagtaaatcaggaacttctaccttaagattgctaacaacaatattgcatagtgatggagacttgacagaacaggggaaaattagtaaaccagatatgtcacgtctgagacttgctgctgggagtgctattgtgaagctggcacaagaaccctgttaccatgaaatcatcacattagaacaatatcagctatgtgcattagctatcaacgatgaatgctatcaagtaagacaagtgtttgcccagaaacttcacaaaggcctttcccgtttacggcttccacttgagtatatggcaatctgtgccctttgtgcaaaagatcctgtaaaggagagaagagctcatgctaggcaatgtttggtgaaaaatataaatgtaaggcgggagtatctgaagcagcatgcagctgttagtgaaaaattattgtctcttctaccagagtatgttgttccatatacaattcaccttttggcacatgacccagattatgtcaaagtacaggatattgaacaacttaaagatgttaaagaatgtctttggtttgttctggaaatattaatggctaaaaatgaaaataacagtcacgcttttatcagaaagatggtagaaaatattaaacaaacaaaagatgcccaaggaccagatgatgcaaaaatgaatgaaaaactgtacactgtgtgtgatgttgccatgaatatcatcatgtcaaagagtactacatacagtttggaatctcctaaagacccggtactaccagctcgtttcttcactcaacctgacaagaatttcagtaacaccaaaaattatctgcctcctgaaatgaaatcatttttcactcctggaaaacctaaaacaaccaatgttctaggagctgttaacaagccactttcatcagcaggcaagcaatctcagaccaaatcatcacgaatggaaactgtaagcaatgcaagcagcagctcaaatccaagctctcctggaagaataaaggggaggcttgatagttctgaaatggatcacagtgaaaatgaagattacacaatgtcttcacctttgccggggaaaaaaagtgacaagagagacgactctgatcttgtaaggtctgaattggagaagcctagaggcaggaaaaaaacgcccgtcacagaacaggaggagaaattaggtatggatgacttgactaagttggtacaggaacagaaacctaaaggcagtcagcgaagtcggaaaagaggccatacggcttcagaatctgatgaacagcagtggcctgaggaaaagaggctcaaagaagatatattagaaaatgaagatgaacagaatagtccgccaaaaaagggtaaaagaggccgaccaccaaaacctcttggtggaggtacaccaaaagaagagccaacaatgaaaacttctaaaaaaggaagcaaaaaaaaatctggacctccagcaccagaggaggaggaagaagaagaaagacaaagtggaaatacggaacagaagtccaaaagcaaacagcaccgagtgtcaaggagagcacagcagagagcagaatctcctgaatctagtgcaattgaatccacacagtccacaccacagaaaggacgaggaagaccatcaaaaacgccatcaccatcacaaccaaaaaaaaatgtccgtgtaggacgctccaaacaagcagctactaaggaaaatgattcaagtgaagaagtagatgtgtttcagggtagctctcctgtcgatgatattccacaggaagaaacagaggaggaggaagtttctacagtaaatgtacggcggcgaagtgctaaaagggaacggcgatgaacaaatgtaattaataactttctctgtgaaagctttggaaaaatcttttttttttttttttttttttggtcaagcttgaggctgaataaagcctttgatgcacaaaatgggactgctgaagagtggacagttggaccttactttggtgaccccatacatttgtggtcacatgctttagccatacacatggtaacattgactatggagtcttgtgaaagtgtaatgtgcgatggctatgtagacataaagaagaaacttgtaaatatcttttttcttttttttaatgtttctgatttctgaagtgcttgtatagcttttatctgcggctttaaactgacagtacccgactgtttattggatctattgatttgaaaagaatttgttaggatagatcttaagcagtaatctgtcagtgtttgtatttgtattctctgcaattttactgtgaaaaaaaatttgttttcaacaattggtgtcattttcttgatgtcactatttgttggagagttaaatggtctcttccctttgtgtatcttacctagtgtttactcctgggcacccttaatcttcagaggtgctaaattgtctgccattacaccagaaggatgcctctgataggaggacaaccatgcaaattgtgaaatagtcctgaagttcttggattactttacacctcagtattgatttgtcccagaattttctggcctttcatggcaatgaaaattttaagaagaaagatttaaagtattttaattttaaagagtgtgttataaaataatgtactgaattctttatcccattttatcatcctttcagtttttattaatctactgtatcaataaaattctgtaatttgaatgagtttttaatagtctagaatgttattgtgtatagatatttcctcttgaacgttatgttcagaaaatgcaaattacactataatataaaacctgatatatacacattagaaatattccagttctccgtaacagtgtaaagttaatcagaaagaaaaaattttattgatgcagtgtgtctttataaagctgttcttgaaagccaagtgttttgtattttatagtgagttgcatgtttttgaaaaaaagtgctgaaaatgggatgtgctgttttctgtaaattcatatttagccatagtatatgatagattgccccataacatagtttttcatcaagagtttattattgtactttattttggagccaaaaaattgattctggggggtgggggcagcgtagaagtggtatatccaagtatatcagctactgtagttgtcacagtcttgtgaactttgaatgaaattccactttgtccagattgggagaagtggaaatttatttggatttagagcaggtctttttttttcttcattgtaatctgcaaaatgtagaaataaattacttaaggcagtatcctttatacagttgtataaactgtattttgaaccaaaacatataggttactacttaatgcttacctaatttcattttagtattttaggtgctgttatgttttttcatggttaacaccagaggggaaaaaatcatattctaacttattaaatttatcacattgaatagtggaacattttcatatgatacaccattatgtttaagatatatttccaagattggttataatagatggggcatataataaagaagctactattttggaaaatgacattttactatttgccaatgtatattgcaattgatgtgattatttttcttttaaagatttgtttgtgtttatgaaacagccatttattttttaaaaagtgttttgaattgtgtcttaatctctccatattcaactattcttcatttacaacaatagtgacaccagtaattatgagaggctgtcatatatcaaagcagctcaggtgggatcaacatacattggttttgaaatgtttccttagctcggttctcccaaacacataatttctgtttcagcagtacaaaggcatgttttaaaatctataacataaagaataaggaatagctttgtatttttgtcattgattaaattgcaccagaaatgtttatggaaatattaagaacattttataaaacatacgaaaaagtgattgtgaaggatttttatttgcatgattatagttaagcaaatttcatttcacatttttgtaatgctgtacagcagttcacaaaaaaatgttcattgtagattttgttatgttcaatgccaatgagtctgtaattttacgacctgtctgttctttttttgggtggattacgatgtaaatttttcttttctttctttctttttttttttttttgtgtagaaaaataggtgcaataatgatcaaagttttgatgtcttgagtctccatcttaggggattatcttacgtttaagcttaacatttcatgtagtaagatttggagagccacatactttacagtaaaattaagtgtgtataaaacattaattgctaacaattgttagcaaactatttcagtgataatgttcattttgaaaatatgtactgtataacattaagaaaatatttaactccctgtaacaagttccattatgaaaatcttattcctcagtgaggttatcttgctgcactctgtagcaaatttgtttaatctacattataataaaatttcttgctgcagtgcaacaggaggctttttcagtgatcttcactgtatatgtaaattacaaatgtggctgtaaaacttattccaggtattaaaggttaaattgctttctatatcttcttataacttgtaagtctgatttttaagatttccttttgtccacttgtaagaatgtcaggaatttaagaatttgtttaaattaggcatatctctgccatcacatagtattatgtcaccataatgaacaattgctatttaaatagataaccaattttcagacacatttttggatttctgtgaagttgaataaacataaaagctaa

SEQ ID NO: 5192 - protein, 1447 aa, Homo sapien
MAHSKTRTNDGKITYPPGVKEISDKISKEEMVRRLKMVVKTFMDMDQDSEEEKELYLNLALHLASDFFLKHPDKDVRLLVACCLADIFRIYAPEAPYTSPDKLKDIFMFITRQLKGLEDTKSPQFNRYFYLLENIAWVKSYNICFELEDSNEIFTQLYRTLFSVINNGHNQKVHMHMVDLMSSIICEGDTVSQELLDTVLVNLVPAHKNLNKQAYDLAKALLKRTAQAIEPYITNFFNQVLMLGKTSISDLSEHVFDLILELYNIDSHLLLSVLPQLEFKLKSNDNEERLQVVKLLAKMFGAKDSELASQNKPLWQCYLGRFNDIHVPIRLECVKFASHCLMNHPDLAKDLTEYLKVRSHDPEEAIRHDVIVSIVTAAKKDILLVNDHLLNFVRERTLDKRWRVRKEAMMGLAQIYKKYALQSAAGKDAAKQIAWIKDKLLHIYYQNSIDDRLLVERIFAQYMVPHNLETTERMKCLYYLYATLDLNAVKALNEMWKCQNLLRHQVKDLLDLIKQPKTDASVKAIFSKVMVITRNLPDPGKAQDFMKKFTQVLEDDEKIRKQLEVLVSPTCSCKQAEGCVREITKKLGNPKQPTNPFLEMIKFLLERIAPVHIDTESISALIKQVNKSIDGTADDEDEGVPTDQAIRAGLELLKVLSFTHPISFHSAETFESLLACLKMDDEKVAEAALQIFKNTGSKIEEDFPHIRSALLPVLHHKSKKGPPRQAKYAIHCIHAIFSSKETQFAQIFEPLHKSLDPSNLEHLITPLVTIGHIALLAPDQFAAPLKSLVATFIVKDLLMNDRLPGKKTTKLWVPDEEVSPETMVKIQAIKMMVRWLLGMKNNHSKSGTSTLRLLTTILHSDGDLTEQGKISKPDMSRLRLAAGSAIVKLAQEPCYHEIITLEQYQLCALAINDECYQVRQVFAQKLHKGLSRLRLPLEYMAICALCAKDPVKERRAHARQCLVKNINVRREYLKQHAAVSEKLLSLLPEYVVPYTIHLLAHDPDYVKVQDIEQLKDVKECLWFVLEILMAKNENNSHAFIRKMVENIKQTKDAQGPDDAKMNEKLYTVCDVAMNIIMSKSTTYSLESPKDPVLPARFFTQPDKNFSNTKNYLPPEMKSFFTPGKPKTTNVLGAVNKPLSSAGKQSQTKSSRMETVSNASSSSNPSSPGRIKGRLDSSEMDHSENEDYTMSSPLPGKKSDKRDDSDLVRSELEKPRGRKKTPVTEQEEKLGMDDLTKLVQEQKPKGSQRSRKRGHTASESDEQQWPEEKRLKEDILENEDEQNSPPKKGKRGRPPKPLGGGTPKEEPTMKTSKKGSKKKSGPPAPEEEEEEERQSGNTEQKSKSKQHRVSRRAQQRAESPESSAIESTQSTPQKGRGRPSKTPSPSQPKKNVRVGRSKQAATKENDSSEEVDVFQGSSPVDDIPQEETEEEEVSTVNVRRRSAKRERR

SEQ ID NO: 5193 - DNA, 1873 bp, Homo sapien
  Unsure 214-289: Unknown base
  Unsure 577-610: Unknown base
caaggctgctctgctcccagaactgccaatgcccagcgaaacgggaggactcaaagtcaactgccaagctaccttcttcactccagagccaggatccagggaacactgaagatttatctcagctgaccaacaacggagcagtaactaacacctcttaaaatgtatatagcactttaagtttaaaaagtcctcccacacacatttaatgttcacnnnnnnnnnnnnnnnnnnnnnnnnnnnnnnnnnnnnnnnnnnnnnnnnnnnnnnnnnnnnnnnnnnnnnnnnnnnnaaagcaaaactagtgaatggtagagcttggatgtggagccataaattgactccaaggtcagagctctttaacatagccattattagcaaactatttttaatctgaccactggaaattaagagtcagaaggatctttaataaatcctataatcacatggccggagagtcacaaaaacaacagctttggccaagaccgtgacttcagtaaagggaacccggggctctcgcagccagccctcctgcccatggaggacagtttccttcaatcttttgggaggctgagcctcnnnnnnnnnnnnnnnnnnnnnnnnnnnnnnnnnncccggccgcccccgcgggggacacctcctcgccgccacagctttaggaaacacctctacctcctgcgaggcctcccgggctccgggaaaactacactggccagggacgactggagtgagcactggcctgggagtctgaagattgtgccttcagacctacttcgtcacttactagctggcgactttggtcagtcatctagtttttccgggccttatgttccttacatgtgactactaaaaggctactagattataggatttattaaagatccttctgactcttaatttccagtggtcagattaaaaatagtttgctaataatggctatgttaaagagctctgaccttggagtcaatttatggctccacatccaagctctaccattcactagttttgcttttcacccaacccctctgtgcctcggtttccttttctgttaaatggggatatctgttctgtttgcctctgagggttttgtgaacattaaatgtgtgtgggaggactttttaaacttaaagtgctatatacattttaagaggtgttagttactgctccgttgttggtcagctgagataaatcttcagtgttccctggatcctggctctggagtgaagaaggtagcttggcagttgactttgagtcctcccgtttcgctgggcattggcagttctgggagcagagcagccttggcatgccatggggtggattgtgtgtttatagaaaagtctgggacgtaagcgaggaaatgggccacagctcagcggaagggaggccggtggtgaggatggaatggtggagaggcaggctcaggtgtggcccaccaggagctgccttccccacttttttgggaggtagggtggggaagaagaaaagagcaaattgtttaaaaatacacatgtatatagaaaatagtaaaactgtaaggttatctgtgtgttgttggattctgggaaattcacattttctctattctctgtattttccaaattttctataacgaatatgtatttcttagaataaaaatttttttcttcaaaatttggaggaaatcgctttttacaaatgtgggttcatctttttctgcttaaccttttttctcatttgattaaagaactaataaaaatgtttttgaaattaagatatgtcttgtctcccaaatcaatgttagatttctgtgctttttacatgttttcatagtttgaagtggatggaatgtggaaaaacatctatttaaattctttgaatttattttttaaaagttgga

SEQ ID NO: 5194 - protein, 16 aa, Homo sapien
MWKNIYLNSLNLFFKS

SEQ ID NO: 5195 - DNA, 6014 bp, Homo sapien; identical to SEQ ID NO: 647

SEQ ID NO: 5196 - protein, 412 aa, Homo sapien; identical to SEQ ID NO: 648

SEQ ID NO: 5197 - DNA, 1023 bp, Homo sapien
caaacaaacaaaaacttatggcgatgcaggttttcatgctcagacgcttgcattcaggtatgctttcttttttgagagagacaaatgggtcacagctggcaccctgggaatagcacataatccagggtgtgtctgtggtggtggacgtgcaggggaacaccatctgtcctgtgtcatgatgggaaaacaatcatgaaccactggtctaaattaggcctggccatgctttctcagcccctccctcatttaaatttgtcttcccaaagctgagctaaaactaaaccatttctcctctgctggaatgatggattggtcattcagaggaacaataccaggggtgggaggtttgcaggctgagttccccaggcatgggggtgcagggtgtccctgaggtttacccaaagcacagctcgctggcctgtgacctctgcccttcctcccacagtgtaagaccccccaggaagcagctggggcctgaacctctcacctaggaggtaggtttattttattttttgttagcatcaggctctgaaggagttggtatacattttgttttgaaaacatcttctggacttacaccagagcttagtgtcgtctttactatggaaagagaggagaatggacagaaatggtttaactgtgtggagttttgtttgttttgttttaaatggaagaaagaccaaaactttcctggtggatcagctagggcctttgaccctgcattaccacggcattttatccaggtgaagtccagggaaagaactcagccaaatggactaaggaacacacgagtttggaatgcgagactctgacatttttgtgttcttggaaatccaattaccttcccatgcccagatttccttcctgcctcttggaccaggctctggcactgaggttctcactgttcccaacacagacaaagcttcctgagggctggaggggcagcaaggggagaggagaatggggaagaagcgcttgatgtagttgtgtggaataaacagtattttttcttttgtaaaaaaa

SEQ ID NO: 5198 - protein, 64 aa, Homo sapien
KQTKTYGDAGFHAQTLAFRYAFFFERDKWVTAGTLGIAHNPGCVCGGGRAGEHHLSCVMMGKQS

SEQ ID NO: 5199 - DNA, 1015 bp, Homo sapien
aataaataaatttttaaaaaccaacctgatgtgaagttgaaacacaagacgcggaaataaaaactcagagtataaatatctatattgttaccattatctgggataattgatgatttataagaagctgaggtttcgtcttcctagaaatggacttttattaggccagcaagaatgaccacttagccatttaaatgatttgtcagcatcttttgctgctctcttctaagaccattggttttcactaaaggataaatacctgctaagcaaattataaaatactataagacatttaatctcctggaagaggacttgctgataattggatcaaagttccagcattattgctcttttcgaatcatatggacttagtgttctcatgaccgaggagtcacatttttagcttgctaaaatattcactggagaacatggtgaaatccacgagtggaaacgttccatggtattttcaaacgccacgtgtcaggaatttggcatgccttcctctgggagaggcactggagtgtggccagatggaacccagcagggtacagagggcatttgtgggagcagttaggaaaccaggacgtccagcttctgcctgccagggagctcgctcatgttgtctctgaaatttgcataagagcaattacctcatattctaattttaaagatacaatttttaaagacatggaaggctctgaggcctcctgaaggctattcctatgtgaggtattgtttacgggtggcctttcactatttccaaatcagcgatgaaaagaagactgagtctaaaataaatgaagcaacagacttcagcagcctgagagaattttgttcaattccagtctccttaaaaaaaaatcggtttttgctttcaatttaggaaaattgttttgggttgcattgttgaaagtaatgatttctagcagctacttatgtataatctcttaaccaattaaattctgaatctcttaaatcacttgattattcatgctggttttagttatccactgctgta

SEQ ID NO: 5200 - protein, 66 aa, Homo sapien
MVKSTSGNVPWYFQTPRVRNLACLPLGEALECGQMEPSRVQRAFVGAVRKPGRPASACQGARSCCL

SEQ ID NO: 5201 - DNA, 2797 bp, Homo sapien
acgcgcgccctgcggagcccgcccaactccggcgagccgggcctgcgcctactcctcctcctcctctcccggcggcggctgcggcggaggcgccgactcggccttgcgcccgccctcaggcccgcgcgggcggcgcagcgaggccccgggcggcgggtggtggctgccaggcggctcggccgcgggcgctgcccggccccggcgagcggagggcggagcgcggcgccggagccgagggcgcgccgcggagggggtgctgggccgcgctgtgcccggccgggcggcggctgcaagaggaggccggaggcgagcgcggggccggcggtgggcgcgcagggcggctcgcagctcgcagccggggccgggccaggcgttcaggcaggtgatcggtgtggcggcggcggcggcggcggccccagactccctccggagttcttcttggggctgatgtccgcaaatatgcagaattaccggccgggtcgctcctgaagccagcgcggggagcgagcgcggcggcggccagcaccgggaacgcaccgaggaagaagcccagcccccgccctccgccccttccgtccccaccccctacccggcggcccaggaggctccccggctgcggcgcgcactccctgtttctcctcctcctggctggcgctgcctgcctctccgcactcactgctcgccgggcgccgtccgccagctccgtgctccccgcgccaccctcctccgggccgcgctccctaagggatggtactgaatttcgccgccacaggagaccggctggagcgcccgccccgcgcctcgcctctcctccgagcagccagcgcctcgggacgcgatgaggaccttggcttgcctgctgctcctcggctgcggatacctcgcccatgttctggccgaggaagccgagatcccccgcgaggtgatcgagaggctggcccgcagtcagatccacagcatccgggacctccagcgactcctggagatagactccgtagggagtgaggattctttggacaccagcctgagagctcacggggtccacgccactaagcatgtgcccgagaagcggcccctgcccattcggaggaagagaagcatcgaggaagctgtccccgctgtctgcaagaccaggacggtcatttacgagattcctcggagtcaggtcgaccccacgtccgccaacttcctgatctggcccccgtgcgtggaggtgaaacgctgcaccggctgctgcaacacgagcagtgtcaagtgccagccctcccgcgtccaccaccgcagcgtcaaggtggccaaggtggaatacgtcaggaagaagccaaaattaaaagaagtccaggtgaggttagaggagcatttggagtgcgcctgcgcgaccacaagcctgaatccggattatcgggaagaggacacgggaaggcctagggagtcaggtaaaaaacggaaaagaaaaaggttaaaacccacctaagatgtgaggtgaggatgagccgcagccctttcctgggacatggatgtacatggcgtgttacattcctgaacctactatgtacggtgctttattgccagtgtgcggtctttgttctcctccgtgaaaaactgtgtccgagaacactcgggagaacaaagagacagtgcacatttgtttaatgtgacatcaaagcaagtattgtagcactcggtgaagcagtaagaagcttccttgtcaaaaagagagagagagagagagagagagaaaacaaaaccacaaatgacaaaaacaaaacggactcacaaaaatatctaaactcgatgagatggagggtcgccccgtgggatggaagtgcagaggtctcagcagactggatttctgtccgggtggtcacaggtgcttttttgccgaggatgcagagcctgctttgggaacgactccagaggggtgctggtgggctctgcagggcccgcaggaagcaggaatgtcttggaaaccgccacgcgaactttagaaaccacacctcctcgctgtagtatttaagcccatacagaaaccttcctgagagccttaagtggtttttttttttgtttttgttttgttttttttttttttgttttttttttttttttttttttttacaccataaagtgattattaagcttccttttactctttggctagctttttttttttttttttttttttttttttttaattatctcttggatgacatttacaccgataacacacaggctgctgtaactgtcaggacagtgcgacggtatttttcctagcaagatgcaaactaatgagatgtattaaaataaacatggtatacctacctatgcatcatttcctaaatgtttctggctttgtgtttctcccttaccctgctttatttgttaatttaagccattttgaaagaactatgcgtcaaccaatcgtacgccgtccctgcggcacctgccccagagcccgtttgtggctgagtgacaacttgttccccgcagtgcacacctagaatgctgtgttcccacgcggcacgtgagatgcattgccgcttctgtctgtgttgttggtgtgccctggtgccgtggtggcggtcactccctctgctgccagtgtttggacagaacccaaattctttatttttggtaagatattgtgctttacctgtattaacagaaatgtgtgtgtgtggtttgtttttttgtaaaggtgaagtttgtatgtttacctaatattacctgttttgtatacctgagagcctgctatgttcttcttttgttgatccaaaattaaaaaaaaaataccaccaac

SEQ ID NO: 5202 - protein, 211 aa, Homo sapien [sequence omitted]

SEQ ID NO: 5203 - DNA, 2344 bp, Homo sapien
agatccctaaaattgaccttttagaaaaagggagaaatagaaatatagtggccactgatccatagcaatttgaaagtaccacttggcaaaaataattaaatctctctgctatagttcatgaatatattccttggtttgcctatcaggcaacccctgattcacctttctgagaggaattcctttacctaatgtcctcagggggccttggttttactttcttggaggtttttattgtacattaattttcagacacaatctgaatgggcattggaaagtatacccttcttggaggctgggcagccttagcagtttacttcctataattgtgagtctgggggcaggcttgggaattagagtatagatccgtaacagctacagtctattgcaggccaggtttgggtttttgttgttgttttgttctgtttcttggccaagtggattcctaaaactttagtaagtttctggtctgttgtcttcagtcatttacatggacagtattaaccaaggtaaaatacattgtttttaacaaagaacctcatcatttacttgctggcctctgtgtgctctccatcccctttgttcttacaggaatggtacctccttgagatcctttgagactgtaggcttgcatggaatggcaacagtcttaatctgatctcttcccctaggatggctcctattatttggcagaaaattcttaagggaaggttcttaaaaaaggttgagaaagttttagtagctccctcagagcctttacttataaatgtttcagtttggagtacagttttcaattcttcagggctccagatttgggacttggtcaatttatatggtagacaaagagcaattctctcagcaaagctatttttcccttgcgtcactgcagacttgttaatcttagtccaagtcacatatctcttgtagggctttgctgaaaagaggcaagaagcagccaacacatgctagcactctgaagttctaccaccttcgtctctgtggcaggaagtctcaacctcaccttgacttctgttggcaagaagtctcactgcccaaagccctacctcctcaactaagccaaccccagatttagggccttcgacttgctgtgctttacttctagctgccaaattctgtataggtcaagattcttggctgtaagcaatgaaatcttctttagcttaaacagaagggaattgatgaatgagtatatataggtcacagaatcaatgggagggttgaagaaacagatctaggctgagcttctaggaattatgtcacaagagtaggctgctgaaagagctgctgcttttagaacaatcaagaagctgcctgctggattaggaagctgcctgctgaacagttgccagttccagagccacaccacctctgccatgctttatgccagcaaaaatagatacatctcttcctgcctctgtccccacgttacttggctctgagtaaaagtctcaagtgagtgaatctgatggactggaccaatcatatctgaaaccctagctgcaaaggagccatgaagtacaatcaagaaattgaaaaacagtcagagttagatgatgagcttcatcgtttgtcatgcaggatttttatcccctgaagaacctgctagagaagtccaccttcacccttaaccactggtgcctcaacttaatacttttaaaattcatttgtttctgttggaattgggatactaaggtccagaggtgtccttctaaagctggtagaggtttcacgagtcatcagggacccagaacccttctcttttgctgtccctttgtcctagtgcatggtttccacactgtggtgcaagatgtctcctcaagctctaggcattacatctgctatcctgctgtcagaaagaaggaaggggaaaagaagatcatttccttctctttaaggacatttcccagaagtcacacagaacatttccatttatattactttggccagaacttggtcatatggccacatttagttccagaatgattaggaaatgcagtcttttattgatccctgtgcccaggaaaatattggaggcctttttcaaggaaaaaggggaaaacagatattggttgacaaatagcagtctctgccatactgtccctggatacatgtctttgagtgaatgtcccttatttaccattctgattacttgttggatattttcaatatgtgttacaatatggttccaaaattgtatgtgatattccaacagcaagttggatgcaatgtgtcataaaaatgacctcagtgtcaaccagcatttgaataccgtgtctcaatgctgtgcaccaataaagaacacagaaagtcagagttttccataaat

SEQ ID NO: 5204 - protein, 136 aa, Homo sapien [sequence omitted]

SEQ ID NO: 5205 - DNA, 1201 bp, Homo sapien
ggcacgagggaaagctgaaagcgtgcgaggggggtggggtggaaatagcggctgcttcttttccaaggatttatttaatggggatgtgttcaaggcaagaccgaattcagaaggatatcgacgtcgtgatccagaagtccagagctgaggactgcctgtttgcagggcccgcctggcaggacgactgagcaagttcttggaaaaccagagatattagagcggtgaatcgcgctggtcacgttggacacctgcgcgttaggagattctggagccagagggagagaccccagaaacgccccggtcggcgacccagcccgagacgcctggggtcccaagggaagctgaacgcccggtgggctcccgggatggttcttccggttctttgtgccgccttcacccagtgaaggagcctgtatccaccctgcccagtcgctgttgggctgctgcggagcttccgctgccatcttcggatcctgtgttccgcccggggctccaccagggcagggatggtggtgagggtcgctcgtgggtcccctggcagggagcagggtctggcactcacaagggcgcacgactaggacttgtcgaatgaatcccttgtcgcctttagcttttagtcctttgaagagaggtgagagtggaaatcaagagatttttttccacggggaagttctttttacaaagcgttgatttcttggcaccccgcggggcgggcaactgacacggcctccggtgcaccttctgcgctgtggagcctctggggctcagctgggcggtggtcgggtcgtggggcggtagggcgggagcgggggaagggaaagcaaaagctggaaaagaagcaggggagttgtgaaccagacatccagacctcctgaagggctcgtgcagacgtacaggcgggatcttctggaagtgagaattgtttttgtttgtttatctattgtagcagaatggggaaatggagagagaacctgaaagagccccaaactcgaggacctattgctccccaagaataacatcttccagaactagacagaaaactaggcgtctgggaaccctgaaatccttggaggagtagatcatcatgaccctctgtgttccttttggcaaatgacttgcttccattgtttgtttgttcaattgtctgtttgttaaataaataaaaccctttttatgtatctttaaaaaaaaaaaaaaaaaa

SEQ ID NO: 5206 - DNA, 10616 bp, Homo sapien
  Unsure 3047: Unknown base
  Unsure 9935: Unknown base
gcaggtggatgaatatccatatgaacagaaaaacaataaagaatatcaacacctttgagaacagaatgttaatgcttgatgggatgccggcagtcagagtcaaaacagagcttttggaatctgaacaagggtctccaaacgtccacaactatcccgatatggaagccgttcccctgttgctaaataatgtgaaaggggagcccccggaggactcgttatctgtagatcacttccaaacacaaactgagccagtggacttgtcaataaacaaagccaggacgtcccctactgccgtttcatcctccccagtttccatgacagcatctgcctcctcaccttcytcaacttcaacctcttcatcgtcttctagtcgtctagcctcatccccaactgttatcacatcagtatcttcagcgtcatcttcgtcaacagtattaactccagggccccttgtggcctctgcatctggtgttggaggccagcagtttttgcacattatccatcccgtaccgccttcaagtcccatgaatttacagtctaacaaactgagtcatgttcaccgcatccccgtggtggtacagtcggtgcctgttgtctacacagctgtaaggtcacctggaaatgtgaacaacactattgtcgtgccgcttttggaggatgggagaggccatggcaaagcacaaatggacccccgaggcctatctcccagacaaagtaaaagtgacagtgatgatgatgacctgccaaatgtgaccttagatagcgttaatgaaactggatctacggccctttccatagccagagcagtacaagaggtacatccgtccccagtatcaagggtccggggcaatcgaatgaataatcaaaagtttccttgttcaatttcaccatttagtattgagagcacaagacgccagagacggtctgaatccccagactccagaaaacggcgtatccacagatgtgattttgagggatgcaacaaagtgtacacaaaaagttctcacctgaaggctcaccggaggacacatacaggagagaaaccttacaagtgtacctgggaaggctgcacctggaagttcgctcgttcagatgaactgacgaggcattaccgcaaacatacgggagtgaagccattcaagtgcgcggactgtgatcgcagcttttcccggtcagatcatttggccctgcaccgccggaggcatatgttggtgtgaggaatgctacctgtccagctgagcgtaagagctggatctcttagcggcacccaattcagcagggctgaatccccttcacagtgttaacacaaaagggcatcaccatcccacgatgtctgaaaccagagcaggaaaaagaaggcacacttcttttggtctgaaggtaacccccatcatgactagacgagaaccgtctttacgcggcctgggagctcagtgacataaatgctgaagagacaggcattgttttccgtgctgtgtctctgccatttaaagatgtttgtagcttgtacattttctgagctgtcagacattttgttattgataccttaaaggtcacctaccacaaattgatggctagagcaagaccttttaaatttggatgaatctcccatcatcccatcccttaacccctttttaccagaaattttagttacaatctgagtaagctagaacacacatccaatctgttaccagcaagcagcatgaaagtagaaacgaagaagcagatggagagtcccattacccgcaaagaaagggcactcaggcagccctttgcaatcgcgatggcagccattagatatcactctcaacttgtcattctgccatgccctgaagaaaaccaacattgaatctttcatttgtttgtcgttgattgtttttgttttgtttcgattctgttttgttcatctgttcgagcagaggggcagttgaagtctcgtcctggtctctgccctggcatggactggcacagaggtgttctgtagttgaataggaagagcctgtctaaaaaactactgccccacttcaaattgcagtgttctgtcacctaggcatcatctcttcctgcccctagtatttgattacaaggaaccaggggaaaaaaactttcttagacacactggcaccaaggtaagaggtggggctgcccaggcaaagtcagtgaacatgaaaactcagacaaagcagagatggaaataatgcgcctcttgaggagaaaagcaataatgaataaaaggactttcctacaataacttcactgaggactcacgttaccaattttcatacttactaaagggattgtaaaaaacaccccagcattttaggtgtctggttccatttacagcactgaggtaatctttctgctgtttgttgtcctgcttggttgagtaccacaattaaagattatgctccccttttcttgtttgaaaacagttatttggtgactagaaaggcaagggaggcatagccgggaattaactcttcggttaatgggtcagttctccttggaactgaatcagtggaaagagaatgcttcccatagaaagcccgacatggtgctagtttcctctcttggagagccaaggataagtgactctccaataggttcttctataccgatttcattttctaaactgtatcaggacccaggtgtcctgcattggcatctgcagggatattgaacccactcatcctgtgcagaggatgagaggaaggtgttagttccatcagccccataaaattatgaacctttttgcaactaggaacatatacagtaaacaagcaatacatcaccaacgagcattctttcagaaaaattaccatatttttgtccccaccacaagctgggtttttttccagctttctgtggctgaggggctggtgagattttttgttgttattgttgttgttgctagaattttttatagcttagatataaaaggtctccaacaaagacctttgcaatatattttaattaccaaccacttgatttgggaattgcacatattaccctcacaatattactagcctcatttttaaatgtctggncattctgaaataatttccgggttacagaattaccctttttaggatcatcttctaattcagataatcttattctgatgaagcgagaactatgaacgttgaaacaaggacaatttgtgttggatggtattcaaaaggaattttttaaaacattaagcaacagtgtaatgattttcaggtcaaattatggcttcacaaatatgtgctctatattgtctgccaggtctcaaaaattcatcaagcaatttccctccaacaagggctgcagttctagtgataaatagcatctttagctgcacagtctactactcatcaaccagtgggttttttttagcacctggaaagtttttttgtactatatgcaactcctacttcacattgcctgtgaccattcagaatagaaaaaggtctgttgatgcatgccagtgctggttactagtcagtgacagagaacacagagagggacaaacacagccatgaaccccctggcactagtaccagcacctagttggcaagtagtgggtgcatctctcaagtgaagtgtagatttgtatttagtcctgcttgctctcataaaaagagccagttcytttctctgctgaaagatgtcttgagagtattacaggtagacttggtttttagaattcataaaactgacaggcaggggaatcttcctgagtgacagcttggtttaaatttagcacagaactagatgagttgcacttttctaataacataggatggatttggggaagggaacattttccctcatcctctgaaagtggaaaccagactgagatggtaagttaactgataaaacctgtcagcattccatcattttccccttttgacgtatcagtacttctaagaagggatctaagcacaattaagtgaattgagtccctggtctagcctcaggaactgaaacttctttggggcttgtcttgagacgtggcaaattctccttggtgagttttctaaaagtatttccccatggaaaggagaaagtggtttgggacagaaagaaatggaatgtcttcagtcatggaagagcctccatttcatctcatgtccatttctagcctctttcaaaaagcacagtgcatcatgagcaacagaaaagcagtagaatcctaaaggacataacagttgttccgtaactagaagcattctttgattttaaatttgaagctgttcagtttgcagctggggatatgtgcatggttgggaacttatacacatagagccattaactacttaagcagctgcagtagacctgattttctgtttgcagtatagagattgatttcaagggagttacattatttgaaaagttatgactttcagcctttgaggttttaagaatcccttttcatggtctgatcttaagttgtttgaaaaaagattcacgcttctgcatccacctctgccctcattctgtcaattgtgtgtggactctgagaagcctgcttgataacttgtcttaagttctattaaggcagttagactgagatttctaatgacttcaccataaagattatacttctgcctggcgtcgtttctataaaacactataggacatttgttttcaaaagcagttgagtaacagcaacataaaccacattttttaaaaaaatgagcacttttcattcacttgaaagcttaagtgggaaaaaggaagatgattgtcaggggaaaaacttacaaaatgctacagtgtttacaaatgccagttccaggtgattagaaaggccgttttcattatggttcaaatttggaatagcttatgcaaagattgtgttcatttttatacaattctttttaactttaaattgccatctgtgttttaaacataattctgcactttggaatcagttcattagaatgataacatttatatggataaagatgcagtattccttattctgtacttgatttattatacttaccaaagctgcaactgaataaatctggtgaggtgaggccttcaaaatgtattaatacgcctttgttatgttgttatgactgcttagaaatgtagccatgatgttgttctaaagatgtcttaacatttatagtgaggattgacagaaattaagcagtgttaagaataccagcatccatgttacagtctgcgtataagggactgaatgtgaggtaactcttatgaatcataataggcccagaaagccttaatattcatagttcataatccagtctcagattttgctcttcaatgttgcctgtaaacttagcaggtaaatgtattctagtataaaacatcattgaccaaatctcttcctttagtttttctgaggtagtgcatcccattaaaaaagtctcttcaattagatttggctttagtttagaaaggggtttggtaagtcatgtcttccatatgacatttctactcatccccacactgccttccacttaacctgtacagacagccccaacacatgcacatgtgtgtacacaactgtatatgcagcagccagtgggctaacaaatatcagcaaagaacttttttaaaaagaatttgtaataatccgtgctgtctagaaatgtgagttacttaccttattaggaaaccggcttataatactatatatgactctgcctgcattttatagttaagaaatgtacataaaaattgctatattttcacagtttcattataatgtctgtttagtaacccatgtccactgatactttaaatatgctaattactgagcaattgcaatagaaatccagattttcataagaaaatgaaatagaaggatactgcatctttaaaaaatagagtgaagatattttactgtattcgtaacatatgtgatagtggaaaaagtattttcaaactcacaaattttacagaggttgtaaatagtttgatgaagtatgttgggaaagagagcttctagttttcatcacaataaaaagaaaaaacttgttcagatatgccttgtatatcttacacacaatgagtgaaattgccatgggaactctgtccaactttgtcagagcatgctcttcgtgttctgttcaaaatagagtggccacttgtcatggtttagccaggatggtttaaaatataatgaagtcattttaagttgcagacaactgattccaaactagtaatgtcttttcctgaaaagggcaaaacagctgcacaggattttgcttgtactaaagaggagcatcttacaattgttctcttttctcagttatctccctcctcaacagagtgtgaacaaccatacaggtgtttattcttgttttattccaggagactgcttttaggtataactacatgttgaaagattaagtgctgtgcatatggccacgtgttaaaggaatctatactcgcaataggaataagctaatgcccattttcagaaataaattaaatgctgaaagtgcctgtcagtaaaccttatgaccaatgagatattcctatacttttacacagcaataattcttaataagactgggttttttcctgcacatgtgaacacacacacacatacacacagagagagtaaatacatacacatagtaaatcaaatctgttcacatgcccacaaaaaacgcttttatagctttcaaatatacctaatcttgtttacattaacatttcttaatttgatctttctaacttgcagaacgttaagaacacaaatctgaacattaagtttatcttcagtgaacactattgcatatggtaattataatttccagataaaaagttgactgtcatttgccccaaacttatgaaacagtatgtatgattcaaaaagttttgctcagttaaaaacaccaatttatttggcgcaaaagactgaaggatatttgtttgcttgttcattttatccactcatatcaaacgcacaaattcatctttacatttcttcattcccctttcccctaatatttcctattatcatcttaagaatcattttggaatgaatattgacagaatcatttctccccaaaaagtctgttgaagtaccactgacacttagtaagcctagcctttaaccatctttgcagttagtcctaaaaattaccagatgcacattcagaagctcacaggttttttcctgtaattactgtactgctaaaagtggagtcatggatagaaatatacaatgagactatatgaatagacatgaaccctggaaattctccaaccctgccatctcagagcacaaattcacccaaacaagctactgaggctatcagtaaaattatactcatggagagtcacacatcgggtaagggcaattttaaaagtaggactgtgattaaacattcaggctttagacttccatgatggactcagaccacaggcctcaaaaaaacatccactgttttctcctcccaatgttagaaagaagaaaagggagaaggaaatgtaccaggataagggggtaaaataaccaattaagtgtcaaaggaaagctgctgggttccttaatctcactgaagtcaagtcttctgactgggcttctttccatgtgttgtctgaaaaaactaaagtaccttgaaaggttacacattcagcaaaccatgaagataatagctattctttattaaacactgtgtgccaagcaatagactaggcaatttttagatacgttacctgcaacctgtacaacatttctacactttatggatgggaaacggagacatgggaagtgtggctgagttgttcatggatgtagaaatagtaaacggcaaagtaggaaagtgaaaccgcctatctctgacctggaggtctgcctgtatctttcccactccaccacactgcacgtgggtgtcccgaaaccaccttcccagattcctgactctcagtaattttattatggacaacatgcatgagtagtcatcatatttttcaagtgaaatatcgggacatgatataacacatgacttaacaatggtactgaatatttgaaatcaggcctttcccggaaaatcatgcatgaaggatcattataaacaaacaatagcaaccagttgtctccccgaacttgtcacttttctcataaatgtctggcctggagctccaaaatcatccaaatacttagtagcattttagcctgagtacactttctcagttcctcaactctttgtatacctttccaccaatatagacattctagaatctgcttcagatgcatttgaaattttcacccccatggaactagtgattaatatcagagcccactcttgcagttggtaatggggtggcaatcaaacgttcagatgatgataaaggagagataatggataattctttttcagagttctcacttaacagctctgttgtggaatgttttaaatagtcttataaataatttgtttatagtattgttgttagtttaattgaattttatgtaagaagctgtccaacatcagagaaatgaaattcctcccactttctgtgtagaacaaggtctctgacagtattgattcatggaagtactaatggacttagaaaacattaagagaatgtcatttctcatagtgtttctgtttctgaaaatgaatctcctgaattattatctttctccctgttacttggctggggaaagagatagaagctgtataaacaaattctcttccatgctcaaagcaagtgttccatgtgcacaacctgctgcagactggggcccttctcagttaattgggtttcacaagcaataatttctccacaacaaaaaccacaacttgaagtgagttgaaaagagatcaatagtggaaacagtcgcctcagtactttttctttctggatttcatctctagaaatttgaagtgtttgagacagagtccaccctttgtgcaaggcgagaaccaatgaatggactccttgtgtgaattattgcatcttcttccaaagcaggttcatcaagactttcacagagattcatttttgttgagaagtaagggttaataggaggatagaatttggatccaaatctagtgataaaagtgtccaagcaatcaaaaagtaagatattttagggacataccaacatcttccctttctgctaatttcatgctccaaagatatggcaaaaaaaaaaatcataaaaagtgcttttgccctacttgtgttctagttttcccatggcagaattttgtaattacatccagaatatagtgtatattttgttcctcaaactttattacattggatggatattgttgaactggggcactggtgcctatattcaaggctctttcctatcaacgtgtctgtccacgatttgttgtgtttaaagcttcattttgaaaaatcactgtccccctgtggggtagtgactgtattgttttgttcatgtctatgtgggacacattgcatcacatggcaaaccaactctctgtggatgtgagataagtacttataaaaccagcttgaaaacatcgtcttatgtattatgtcatcctgcatcataatgcaattatgtgtatcataacatgctcatttaaaaaaagagaaaccagcaaattcatgtttgtccatagaagaatgtactcagaactttgtgttgtgaaacgatgagaacagaccacctttaagatacccacctgccacttaaaatgacttagttataattagtagtagtctagacgttgttcttggtgtgtgggggtcaattctaacgtcatgttcttttgaataaatctctcagtcatatttgaaaaaaaaaatacatgggaataaagaaaaatatcatctttggccaaatcaagcaggcatcttttttcttttccttgacgtttagctcattatacgtggtgattggatcacgagatctgtccgtgtgaaaatacagaaacatcctttagtttacaaaacagttattctaggcttgaagcctntgaacagcaaattgaatagatgggctgcatctgatttgctttatggatgtaattttacaaaacactcttgggtctctgaccccagggagttaagagtgcccagaggaggtcctacacattaaaggataaagccccccagtgatgctggcaagcaaatgtgttgagttcttaaatcttcatttggttttctgttcaggattttaattgcaaatgaatttatttctccagtttatctaaagacctaatttcccaatagtttcctctgcatttatatactctgtagtgtttaggcaaccctgttataagtttattaatattatgtaagtgttgttcttgtatttatgtatagtgtatgtattgtaaatatactcagagcttttttccttttactgtaaaatggtgatttttttgccctatgataatgtaaagggagaccctcctaatgagattctctcagaggatgattattccagtctattctcagagatttaaatgaacaagtgttattgtttttaatggtgtctcagacatattctgttggtgcattgcttttctgtattcaactttcctatgaattgagctgtgaactgaaatagagtttaaacctttaactgtatgcatttgtataattatctgaatgaaggcatgaaggttaaataaagcattttgtatggaaaaaaa

SEQ ID NO: 5207 - protein, 402 aa, Homo sapien [sequence omitted]

SEQ ID NO: 5208 - DNA, 2056 bp, Homo sapien
gagaggcgcccaggcggcggcggcggcggcccagcttcttctttcctcgcacagccaggcggcccctgctcgagtcccgcgtcgccatggccgcggttcccgagttgctgcagcagcaggaggaggaccgcagcaagctgagatctgtatctgtggacctgaatgttgatccctcgcttcagattgacatacctgatgcgctcagtgagagagacaaagtcaaatttacagtgcacacaaagaccacactgcccacgtttcagagcccagagttttctgttacaaggcaacatgaagactttgtgtggctacatgacactcttattgaaacaacagactatgctgggcttattattccacctgctcctacgaagcccgactttgatggtcctcgagagaagatgcagaaactgggagaaggtgaagggtctatgaccaaagaagaatttgccaagatgaaacaagaactggaagctgagtatctcgctgtgtttaagaagactgtgtcctcccatgaagtctttcttcagcggctttcttctcaccctgttctcagtaaagatcgcaactttcatgttttcctggaatatgatcaggatctaagtgttaggcggaaaaatactaaagagatgtttggtggcttcttcaaaagtgtggtgaaaagtgctgatgaagtcctttttactggagttaaggaggtagatgacttctttgagcaagagaagaacttccttattaactattacaataggatcaaagattcttgtgtgaaagctgacaaaatgaccagatctcataaaaatgttgccgatgactatatccacaccgcagcctgcttacatagcctggctttagaagagcccacagtcatcaaaaagtacctattgaaggttgctgagctatttgaaaaactaaggaaagtagagggtcgagtttcatcagatgaagatttgaagctaacagagctcctccgatactacatgctcaacattgaagctgctaaggatctcttatacagacgcaccaaagccctcattgactatgagaactcaaacaaagctctggataaggcccggttaaagagcaaagacgtcaagttggctgaggcacaccagcaggagtgctgccagaaatttgaacaactttccgaatctgcaaaagaagaactgataaatttcaaacggaagagagtggcagcatttagaaagaatctaattgaaatgtctgaactggaaataaaacatgccaggaacaatgtctcccttttgcagagctgtattgacttgttcaagaataactgatatgccttcactcagaagaaaagaaatgaatgtgaaagaaagccaagcatcacttgcacttaaatcattaccacggaagatatattagcttcaactttagtttaaaattatgtgaataaatattttgatttctacaaatcttaacatttaaccatgttggtttaaaaatattattgcttgctacttggacataactaatttttccttgtgcatttaatacctctgggcagaatccaaatactgggttctcccgtagttcgtctttagttactaagaaagggtgtaggacacattagccttctggaaacaagtagaagccatcacctggcccatgtccctacaaacccatgattgtcagggaggtgccagttacagcaggtgattcagctacttgaggtcggtaacagaccttccattcctcactgaaggtggggtttgtgtttttgttttgccctgttactccactggtagtcatctggtgtttgtactataacaacagcaagaaaatctcatttatctttatatactctttgcacctcctttttttagtcgagatataaatatttgaggggagagaaatatctacaggtatatatggaaacaaataatgtggtctgctttataagatggccagatctacattaggaaaagtataagccccctccctaatggccgctggggggtgagggcggtgtgttgtatgtctttgggtgtttgtttttttataaagcatataataaaataatcgtgctact

SEQ ID NO: 5209 - protein, 404 aa, Homo sapien; identical to SEQ ID NO: 3299

SEQ ID NO: 5210 - DNA, 2561 bp, Homo sapien
tgatatatgaaaaagtccaaatgaatataaggaagtcagtttggaagctcttctagtattcttggtattagatcatgaagtgccacaggctagtgtgatagatggagggatggaaaaagtgctgaatacaagaaaggaaggttgaattttatatatttgtctataaagtgtcactctgggaataaagcttaaattgtctcacttatttaaaaaacagttccagtttgcccacgtgcaacattagtgagtacctaccctgttcccatgggttctccacccacccgaaacaagcacacactgggacaatctgagggtgctcacgtctgccggtgataaggaggtgttcatttgcatgatggcatttgtgcataaaatggtactgctccagaagtggttctagtgaccctgtcttcaccctagtgtggcaggccgatggaacagagcatctgcattgactgccatgcgccgattggaggcattgaccacaaacctcgggacggctttcatctggtcaagtatgtgggtcaggattctatttcctaagtactcaaactttggggtgttgggctgtttttattccagctgataaagtgatactcaagatagtactaattactccagtacatgtgggcctgtgtcatattgaatagcaatgccaaagtcccagcagtcacacagcagggaggcatctgatctgttgttggatccctgggccctgaaatgcaaagcaggctaccctttaacagctgttaatatgaatacaggtgtcttccttttgggccttgggtgcaccttctgtagaaatatgcatgacataaacagatgatctaattcacgaggacatctatgtctgcaggaccaaaacctgggcatccgtctgtctcagcagatgccatctcacttgccagcaatcttagctttctccattttttattttttgagaaaaatgaaggagacagacatagtcttatgaaataccagacttcagaatccaggtacaaatccgatcccacaatcccatgctgagatgaatgtggttctaaatgctcctttcagagagtgagtgggacctgcgtgggggcctcacattctgactgttccctgcagtcacagcttaaaatactttcatgttatctccagaaactgtcacagtgtcctccatcctctaatagttttgccactgagagcatcggccacactgcatctcctctctgccggactttagatcccggtttttcctttggggagatgagaacaatatggacacccatgggatgccgactgtcctcccaaactctagctgttcttagcccaaccgctcctctcctgacaaagacttcagtggaaaagacgggtccaggcctgcgtcttaacaccctgcccggggatcagcatcaataccacacagcgcagccacctgacgctgagaatgcggtcgggtctggtccaccggaaaggcgagtctatcatgagagagactcttaggaacatggtccaggctttgtggaacagcaagtactcttcacataactctcttctcagccgtaagcctcactccaagtgctgagaaagtgcagcgtgccaaagcggccagcctcagcctctgtcttgtgttctctcgttctttccagagacaaggcagacagaacgcagaccggccatgtgctgggcaacccgcagcggagagacgtggtgacatgtgaccgagggctgcccccagtggtcttcctccttatccggctactcactcacttggctctgcttctgggagcgtcccagagttcccaggctctgataaacatcattaagcctccagtgagggatccaaaaggctttctgcagcagcacatcctgaaggacctggagcagttggccaagatgctgggacacagtgccgacgagaccatcggcgtggtccacctcgtcctgcgcaggcttctccaagagcagcaccagctctctagcagaagtgaggaaaggggcaagggctgggcggggatcacacagcacaacggcagcgcaagcaggctcgctgtcttgtgggccaccccacacacagccagtctgagctctgtctgtgctgttgctggaaagaatgagagaacacacagagagaaaaccgtgtctagggaaggcgatgcctggggctggaaaaaggaagcactctgcttgcccagaggctggaaggagctgctctgttccctccattcacccctgcctggctaagacctgcggtattcgggagcgtctgcacgcaagtgttcagtgtgcatatatggggagtcttcagttccgaagtcagccccgtaggtcattcccctaccatgctgggagcacgtgtcgtccacacagagcgtgcgtgtcaaaggatcaatcaccatcacagttgtgtgctgatttattaaatgtttatatgtccacagttatgttaaaaaaaaaaagctataaaatattgtattcactgagctaactttctattttaaaaatttaaatccatacagaaagaaaaggtctgtaagacaacttagtaaaatggttatatggttatctgtgaaaaaaat

SEQ ID NO: 5211 - protein, 124 aa, Homo sapien
MREHTERKPCLGKAMPGAGKRKHSACPEAGRSCSVPSIHPCLAKTCGIRERLHASVQCAYMGSLQFRSQPRRSFPYHAGSTCRPHRACVSKDQSPSQLCADLLNVYMSTVMLKKKSYKILYSLS

SEQ ID NO: 5212 - DNA, 6893 bp, Homo sapien
  Unsure 441-464: Unknown base
  Unsure 1682-1745: Unknown base
gccgcgaacatcaagcggcccgcggcccgccgcagcagctgctgaccctgcagaaccaggtggcgcggctggaggaggagaaccgagactttctggctgcgctggaggacgccatggagcagtacaaactgcagagcgaccggctgcgtgagcagcaggaggagatggtggaactgcggctgcggttagagctggtgcggccaggctgggggggcccgcggctcctgaatggcctgcctcccgggtcctttgtgcctcgacctcatacagcccccctggggggtgcccacgcccatgtgctgggcatggtgccgcctgcctgcctccctggagatgaagttggctctgagcagaggggagaggtgacaaatggcagggaggctggagctgagttgctgactgaggtgaacaggctgggaagtggctcttcagctgcttcannnnnnnnnnnnnnnnnnnnnnnnccgcccaggcggaccttacacctgcgcagaaataggatcagcaactgcagtcagagggcgggggcacgcccagggagtctgccagagaggaagggcccagagcttgccttgaggagttggatgcagccattccagggtccagagcagttggtgggagcaaggcccgagttcaggcccgccaggtcccccctgccacagcctcagagtggcggctggcccaggcccagcagaagatccgggagctggctatcaacatccgcatgaaggaggagcttattggcgagctggtccgcacaggaaaggcagctcaggccctgaaccgccagcacagccagcgtatccgggagctggagcaggaggcagagcaggtgcgggccgagctgagtgaaggccagaggcagctgcgggagctcgagggcaaggagctccaggatgctggcgagcggtctcggctccaggagttccgcaggagggtcgctgcggcccagagccaggtgcaggtgctgaaggagaagaagcaggctacggagcggctggtgtcactgtcggcccagagtgagaagcgactgcaggagctcgagcggaacgtgcagctcatgcggcagcagcagggacagctgcagaggcggcttcgcgaggagacggagcagaagcggcgcctggaggcagaaatgagcaagcggcagcaccgcgtcaagccctgcccactgagctcctcacccaggagctggagctgaagcatgagcaacagcagaagatcctgaagattaagacggaagagatcgcggccttccagaggaagaggcgcagtggcagcaacggctctgtggtcagcctggaacagcagcagaagattgaggagcagaagaagtggctggaccaggagatggagaaggtgctacagcagcggcgggcgctggaggagctgggggaggagctccacaagcgggaggccatcctggccaagaaggaggccctgatgcaggagaagacggggctggagatcaagcgcctgagatccagccaggccctcaacgaggacatcgtgcgagtgtccagccggctggagcacctggagaaggagctgtccgagaagagcgggcagctgcggcagggcagcgcccagagccagcagcagatccgcagggagatcgacagcctgcgccaggagaaggactcactgctcaagcagcgcctggagatcgacggcaagctgannnnnnnnnnnnnnnnnnnnnnnnnnnnnnnnnnnnnnnnnnnnnnnnnnnnnnnnnnnnnnnnggccctggatgctgccattgagtataagaatgaggccatcacatgccgccagcgggtgcttcgggcctcagcctcgttgctgtcccagtgcgagatgaacctcatggccaagctcagctacctctcatcctcagagaccagagccctcctctgcaagtattttgacaaggtggtgacgctccgagaggagcagcaccagcagcagattgccttctcggaactggagatgcagctggaggagcagcagaggctggtgtactggctggaggtggccctggagcggcagcgcctggagatggaccgccagctgaccctgcagcagaaggagcacgagcagaacatgcagctgctcctgcagcagagtcgagaccacctcggtgaagggttagcagacagcaggaggcagtatgaggcccggattcaagctctggagaaggaactgggccgttacatgtggataaaccaggaactgaaacagaagctcggcggtgtgaacgctgtaggccacagcaggggtggggagaagaggagcctgtgctcggagggcagacaggctcctggaaatgaagatgagctccacctggcacccgagcttctctggctgtcccccctcactgagggggccccccgcacccgggaggagacgcgggacttggtccacgctccgttacccttgacctggaaacgctcgagcctgtgtggtgaggagcaggggtcccccgaggaactgaggcagcgggaggcggctgagcccctggtggggcgggtgcttcctgtgggtgaggcaggcctgccctggaactttgggcctttgtccaagccccggcgggaactgcgacgagccagcccggggatgattgatgtccggaaaaaccccctgtaagccctcggggcagaccctgccttggagggagactccgagcctgctgaaaggggcagctgcctgttttgcttctgtgaagggcagtccttaccgcacaccctaaatccaggccctcatctgtaccctcactgggatcaacaaatttgggccatggcccaaaagaactggaccctcatttaacaaaataatatgcaaattcccaccacttacttccatgaagctgtggtacccaattgccgccttgtgtcttgctcgaatctcaggacaattctggtttcaggcgtaaatggatgtgcttgtagttcaggggtttggccaagaatcatcacgaaagggtcggtggtaaccaggttgtggtttaaatggtcttatgtatataggggaaactgggagactttaggatcttaaaaaaccatttaataaaaaaaaatctttgaagggacaaatgggaagttttcacttagagtttgatttacaagacaataggaggaatcagatttgggaacacaacaggcttgaacactttctggagactgagagacagttcagagtcagccctcaccgttagccagacccctggccaggacccgcagcaggctggtccagcgggtctgtggggcactcctgtggggcactcttggtggaaacgatgagccaggtgatggtctccccaggagtgggcaatgggtgaggcctgagccctgaactggctggcttttggacagtccttgaaaatgtggctgctccagaagccactcaagctggaccatggtcacagttaacctcaggcccaacattaaacaaaaatgtactgagtgctcagtcactagagatgattttactgttacacagggaaggcaaaaaatagcttccactgcccaatgcactcttcagtttcacgtatatggcttcacagtttacaaagcgctgcctgtgtcgcagcagcccagccttacagcagctcaagggaccccagggagggcgcctttctccatttgcataaatgaggcagagtggccccctgacttgccaaggtcatggttggggtgaggctggaatgggattccttgtctgggttcctgactcccaggctgcctgagttatagcaccaatcacattgccatccacctctcctcctgcaacttccccaacaaggggcagggccaggagatggattggatccataaggggaattagaaaaccctaaggcattctaatggcaatctgaacactgaccatggcaaaagaggcttgggaccaggcatccgacttctttatgtccacagggtcctggctgactccttgatcttttgggctcagtaatgtttgtggctataagtcctccagccaggttcccatgagcttcttccgtgtataagttctgctgatggggcgcctcctggagaaagcgcgactgaaaggagagtcttctacagtggagggaagaacatccacatcctcatctctggggtctttgctctgagaggaaggtgttttcccctggaacagcagcggagactgggtcagagcctggagggcactggcagagaggcagctccgcacggcacagctgggaggtggggtggagccggaaacaaacacctcttcgtctcccgtggagggtagctgccatgcactccaacttggagacccctctttactcttactaacttctgaatcttctctcaggtcacagatccttttggctccacggtcagcttcttccttggctaacaggactctcttcctggaactcaacccaaactgtccccaggaagaggcttcctcggccttaggcatgctgttcctgggaggcgactggtctgggagctggcacactccctcgagctcaaaatcctccaagatgggcgtcctgtggatgctgagttcaaggccgtggtccttgccctctgactcaagcagtgacaggctcccaggaaggtctgcaccgacctcgcccctcccggaagaggagccggcgccacagcccaccgccctcttcctcctgggccagtctttaattatgtctggagttgtcttcccactgtgcttgggggatggtgtccaaggaaccccatctgtttgaaatggagagggggtactagaagggccgtgggtgggggtacaggcctggcagatgtaggtttgccccctgctcttgccaggtgtgctgtgggagaggcgggggcaggggggtgacacataggtgggttcaggtttgcttaaggacctgctggccctgggcatgctgagagcagggaggaagctctcttctcccagagagctctcctccttgctgaggggctcagcctctaatgaagagctggggtctatcttcttaattcgaagtttgggaaggccagaagcttgcatctccagctcaacctcataggtctgtgggctggcagagtctgtggaatgccaagctgatgctggcaggttgtctagttgtgccgaagcctggcactgtctcccatctgtggtacagtgcacgtcacaggaaggcatcagaggagagccaggcccacaggaaggaggagatgggggaatcccagggtgagacagagaagacttctcagcatctgctgtccttagcccctcaccctcttccactgataagacgttacttttcaagtcaccaatgccatggtgttcggcttcactgaggagagtgacatgctctgtgtcacttgtaatgagcagaggagaggatgcatgccaatcactcctgagaccagggcctgggtagccccgtctttcaggaggagactgaggagagaggctcagtcccttctggtcatctctagagtctgtgggggcagctgggctgtcagctgtgccaaccccaggagtagcggaggcatcaggctgacactccacgatgctccttctgggatcagaggtctttctacaccgtttcccaactttagaagggggtggaggagggacggtgtccaatgtagctctctgtgagagttcagggggagttgagggaacagggcaggagagagatgcagctacgctgggtgacatctggggctctttctgatccagttctcctggggaaggacactctattttagatttcctaaatggactcttcttggagacatcacataaaggagaggtaaacagtttctttggcgtaacaggtggggaagaagtcacagttgaattccctggtctttttggagttttgatagctttatcctttagtttctgggctggttcctctgcccgagcagctctgaggacatggggctgttggtgtgtttgattctgaggcgtgcccatgaaggctgctgctctcggaggtgttctgagagggtctctgatgggagtgagacactctctcctgggctgggcagtcgatgaagttggaggggctggacaggaggggctttctggactggaattcactgaatgtggccaagtacagtttggcaaaaacccaggcggctgagtaccttgcctcttaggagttcttggtgtcttcgtttcaagagaggtaccttctcctgcctgggtatgtcgtttttgaggagtgatttttgaatccaatggtgagtcatggccgggtgaggaggagtcttttaaggactccttaaaagctgcctgctttgtaggggtcatttttgcaggggacttctgcagcctttctggagtatacaacggagtttgtggtgtatgagagatccttcttggtgtagttttagaaaagctcagagatttctggtgactcttcttgggagtctggtaagctgcaggtacctccgaatccaaagtgtttcttgaacgctttttcattcgagctgaacccttttctgaggggctgatcatctcagacattgccccaaaaagaagactcttgggagaccgaatactttggactggagaattttctctttggtctgacttatcttgctggaaagagtggactctttgcacacttcgagacttcggctgagacacagaatagaaggaggcagaatgtgtcctgctaaatgacaactgcttgattcgaggacttcgtctcagacttatttcatctcctttttcaggggactcttcaacaacaccaatatcaggaccaggatcagaggacctcgaggaaccacatgcacaaggattattccataccacttgtaattaacacttattaaggagacaggcagcttctcacttaacaagatcacaaagatcacagggtctgataacaccagtgctggtaaagggctctcatacgtgattattgtcaagaggga

SEQ ID NO: 5213 - protein, 425 aa, Homo sapien
  unsure 111: unknown amino acid
  unsure 112: unknown amino acid
  unsure 113: unknown amino acid
  unsure 114: unknown amino acid
  unsure 115: unknown amino acid
  unsure 116: unknown amino acid
  unsure 117: unknown amino acid
  unsure 118: unknown amino acid
  unsure 119: unknown amino acid
  unsure 120: unknown amino acid
  unsure 121: unknown amino acid
  unsure 122: unknown amino acid
  unsure 123: unknown amino acid
  unsure 124: unknown amino acid
  unsure 125: unknown amino acid
  unsure 126: unknown amino acid
  unsure 127: unknown amino acid
  unsure 128: unknown amino acid
  unsure 129: unknown amino acid
  unsure 130: unknown amino acid
  unsure 131: unknown amino acid
  unsure 132: unknown amino acid
MEKVLQQRRALEELGEELHKREAILAKKEALMQEKTGLEIKRLRSSQALNEDIVRVSSRLEHLEKELSEKSGQLRQGSAQSQQQIRREIDSLRQEKDSLLKQRLEIDGKLXXXXXXXXXXXXXXXXXXXXXXALDAAIEYKNEAITCRQRVLRASASLLSQCEMNLMAKLSYLSSSETRALLCKYFDKVVTLREEQHQQQIAFSELEMQLEEQQRLVYWLEVALERQRLEMDRQLTLQQKEHEQNMQLLLQQSRDHLGEGLADSRRQYEARIQALEKELGRYMWINQELKQKLGGVNAVGHSRGGEKRSLCSEGRQAPGNEDELHLAPELLWLSPLTEGAPRTREETRDLVHAPLPLTWKRSSLCGEEQGSPEELRQREAAEPLVGRVLPVGEAGLPWNFGPLSKPRRELRRASPGMIDVRKNPL

SEQ ID NO: 5214 - DNA, 638 bp, Homo sapien
actcacaggacaaccaccacaggcaccaccacactccttgtaccccttgcccttctcccagctcattgctccaggagagagaagagttcaaaaaataaagtaatcataaacttgaactctctccattctcttgttcccatttacaggtgaatctcttcctttaagccatttttgtctcctgtgaatacagccttatctccacctgtttcttagatcccatctcccctggcttattttttccattcattaccctctttgttccctttacttctcaacctgtgctatatacatgctgttctctctgttgagattgccttatttccatctaacattctctctcctgctattctgatttgtcattcacaactgatttcaagagtcaccttcaccaggaagtcttccttgaccaccatcattcctgcctgattagagggcttcctcatggtaatatgtgttctcaagttttcagtgtcaaggaatgccatcccagaagctcattctcagatgcacaacagccagaacagtctcaagcagcattctagagcttggaatttaagaactacgcattgcctataaagtgaaacataggctaatatagattaaattgaatattgaataaaaaatatatttatttatcc

SEQ ID NO: 5215 - protein, 49 aa, Homo sapien [sequence omitted]

SEQ ID NO: 5216 - DNA, 3412 bp, Homo sapien
  Unsure 1561-1585: Unknown base
tgggaccgctgaccgcgcggctgctccgctctccccgctccaagcgccgatctgggcacccgccaccagcatggacgctcgccgcgtgccgcagaaagatctcagagtaaagaagaacttaaagaaattcagatatgtgaagttgatttccatggaaacctcgtcatcctctgatgacagttgtgacagctttgcttctgataattttgcaaacacgaggctgcagtcagttcgggaaggctgtaggacccgcagccagtgcaggcactctggacctctcagggtggcgatgaagtttccagcgcggagtaccaggggagcaaccaacaaaaaagcagagtcccgccagccctcagagaattctgtgactgattccaactccgattcagaagatgaaagtggaatgaattttttggagaaaagggctttaaatataaagcaaaacaaagcaatgcttgcaaaactcatgtctgaattagaaagcttccctggctcgttccgtggaagacatcccctcccaggctccgactcagtaagtaccagttcttgtttatatacagtagtgttttgggcacacctaaggtcgatctgtgttgtatttaaaaatctaatttctttatttgtgtggccttctagacaaacgaaggggacccagaggaaaccccctgacagatctctggatgatcctccttgaatcctgggcagtttggtctctccttgctgtgctcctgtggcactaaactccttttgattggttctttctttccttcccagctagactaagcccctcatgggcaggtaatgaagattgaaaacttttttctgttctccagtgtgagcacattcctcctacatggtagatgtgcaatagatgtttttaaaattggagaatgaaaataaaagaagaaaatcacaatttcttatcaagttgtagcttggtatcatacacaattgcattctgaggaattaaggtggtacaacttagggagatttggtgtgtctgctgtgatagaaaagatttctttttcctagctttccctgaggaaaggaaagatggaaagagggaagccatacagatatccctctgttttgcagtgtagaaactgaatgtgtttctacagggtcaagagacatcagagaaatttttttttttttagaacagaagatcatttcttacatcttcattaagtaaaagaataaatagctcatctctcaagttgaaagaaactgggcttggtattattacaaaagcaaaattaaaatggccatataggttttaggctcattttgccatgcattatgcaaaggacaaagaaaaagaaaaaatagagctctctttacttaaaacatccttaaggagaagctatgaattccccaaagtactacttctctttattatggaataaatggattcccttatacgtgctttgtttagcaatcaaggagaccgcgaaggcgtacattcccgggtgttgcttccaggagaaaccctgaacggagagctcgtcctcttaccaggtcaaggtcccggatcctcgggtcccttgacgctctacccatnnnnnnnnnnnnnnnnnnnnnnnnntacatgttggtgagaaagaggaagaccgtggatggctacatgaatgaagatgacctgcccagaagccgtcgctccagatcatccgtgacccttccgcatataattcgcccagtggaagaaattacagaggaggagttggagaacgtctgcagcaattctcgagagaagatatataaccgttcactgggctctacttgtcatcaatgccgtcagaagactattgataccaaaacaaactgcagaaacccagactgctggggcgttcgaggccagttctgtggcccctgccttcgaaaccgttatggtgaagaggtcagggatgctctgctggatccgaactggcattgcccgccttgtcgaggaatctgcaactgcagtttctgccggcagcgagatggacggtgtgcgactggggtccttgtgtatttagccaaatatcatggctttgggaatgtgcatgcctacttgaaaagcctgaaacaggaatttgaaatgcaagcataatatctggaaaatttgctgcctgccttctacttctcaaatctttcttgtaaaagtttccaattttttcactgaaacctgagttaaaaatcttgatgatcagcctgtttcataagaaactccaatcaagttaatcttagcagacatgtgtttctggagcatcacagaaggtatattgctagttacactttgccctcctgcagtttcttctctgctcccaacccccatctcatagcatccccctctatttccaatgctcctctccaaccgcttagtttctgaatttcttttaaattacagttttatgaaagcatattttatttacttggtgttgaaatagccctcataaaacctaagcacttggaaacacaataatagtattaactaactagatctattgaatttcagagaagagccttctaacttgtttacacaaaaacgagtatgatttagcattcatactagttgaaatttttaatagaatcaaggcacaaaagtcttaaaaccatgtggaaaaattaggtaattattgcagattgatgtctctcaatcccatgtattgcgcttatgttacaagttgttgtcacagttgagacttaatttctcctaatttcttctgcccgaagggtaagtggtgccgtccagcttacacaatcataattcaaaggttggtgggcaatgtaatacttaattaaaataatgatggaagagctatctggagattatgagtaagctgatttgaattttcagtataaaactttagtataattgtagtttgcaaagtttatttcagttcacatgtaaggtattgcaaataaattcttggacaattttgtatggaaacttgatattaaaaactagtctgtggttctttgcagtttcttgtaaatttataaaccaggcacaaggttcaagtttagattttaagcacttttataacaatgataagtgcctttttggagatgtaacttttagcagtttgttaacctgacatctctgccagtctagtttctgggcaggtttcctgtgtcagtattccccctcctctttgcattaatcaaggtatttggtagaggtggaatctaagtgtttgtatgtccaatttacttgcatatgtaaaccattgctgtgccattcaatgtttgatgcataattggaccttgaatcgataagtgtaaatacagcttttgatctgtaatgcttttatacaaaagtttattttaataataaaatgtttgttctaacttgtctgctttttttaaaaataatcttactgtacttaattctaattttttcctcatatttaaataaaaggccatttccacc

SEQ ID NO: 5217 - protein, 230 aa, Homo sapien
GTADRAAAPLSPLQAPIWAPATSMDARRVPQKDLRVKKNLKKFRYVKLISMETSSSSDDSCDSFASDNFANTRLQSVREGCRTRSQCRHSGPLRVAMKFPARSTRGATNKKAESRQPSENSVTDSNSDSEDESGMNFLEKRALNIKQNKAMLAKLMSELESFPGSFRGRHPLPGSDSVSTSSCLYTVVFWAHLRSICVVFKNLISLFVWPSRQTKGTQRKPPDRSLDDPP

SEQ ID NO: 5218 - DNA, 660 bp, Homo sapien
gcaaacatatgggtaagttattttttataatcccatgtattataatccatctctataaaatagttatggatttacactgtaaattaaaccatgattgtattattttgaagtaaattgtaacatcctttgttgtctgccactgaaagaaaatcctcagactctagaacatataaataaattatcaagccatccatgaggtcaaaagtatttgtcccacatgtcccgggtctaagagaagtaaattaatgaatgaatatgccttgtctttcgtgatcgatctttgttgttgtgggttttctgtccttgtagaagtctactttcacaagcatgctttagtatagttattacagccaaacatgtataattataatcggaagtaaggattaagtggcgataatgaaaacatctgtttttcccataccttatttgaaactggatcaccaaatcttcaggagaatattagaggtgtgtttattccgtctgtaccagtgttagctacactattgccacattaaaaataggaaacatttatatgttccctttgagtctttctgaaagggaaagaaaaattacagtactcactggttcataatacaaatgctggataatgctaaaagtcaactaagtatcaaaaacttaccaagcctctttttttaaaac

SEQ ID NO: 5219 - protein, 36 aa, Homo sapien
KHMGKLFFIIPCIIIHLYKIVMDLHCKLNHDCIILK

SEQ ID NO: 5220 - DNA, 337 bp, Homo sapien
cctgtctcaaaaaaaaaaaaaatatcacccttaaatcaacaaaaagacctcatgctcatgcagtggacatttcttggcctgttttcctgtgggttttcttcagcatgatatgaagcaactgttggcatagccagtgggataaataagaaatggaatcatttggctgcctcgtcacttgtgctaatggtcagttgtacacacatgacatgtggaagtgacctgtagcagcggtcactcattttaacaattgaactctgctgggttgggtatttacctttgtctagaaaagaaatatgatatattttctctaaataaatttattttcatcattccaaaa

SEQ ID NO: 5221 - protein, 35 aa, Homo sapien [sequence omitted]

SEQ ID NO: 5222 - DNA, 2119 bp, Homo sapien
caaagagcttcaaatcccagctctttctactagagataatgaaaatcaatgtgactataggacccagaatgtgttgggtttgcaaaagcagatcaccaatatgtaccccgttcagcaaaacgaatcaaaagttaataagaagcttaggcagaaagtaaatcggaagacagaaataatttctgaagtgaatcatttagataatgacaaaagtatagaatacacagttaaaagtcactcactctttttaacgcaaaaagataaggaaatcatccccggaaacctagaagacccaagtgagtttgaaacacctgctctttctaccaaagatagtggaaacctgtatgattctgagattcaaaatgttttgggggtgaaacatggccatgatatgcaacctgcttgtcaaaatgattcaaaaataggtaagaagcctagactaaatgtatgtcaaaagtcagaaataattcctgaaaccaaccaaatatatgagaatgataacaaaggtgtacatgacctagaaaaagataacttcttctctctaaccccaaaggataaagaaacaatttctgaaaatctacaagtcacaaatgaatttcaaacagttgatcttctcatcaaagataatggaaatttatgtgattatgacacccagaatatattggagttgaaaaagtatgttactgataggaaatctgctgagcaaaatgaatcaaaaataaataagctcaggaataaagtgaattggaagacagaaataatttctgaaatgaaccagatatatgaggataatgataaagatgcacatgtccaagaaagctatacaaaagatcttgattttaaagtaaataaatctaaacaaaaacttgaatgccaagacattatcaataaacactatatggaagtcaacagtaatgaaaaggaaagttgtgatcaaattttagattcctacaaagtagttaaaaaacgtaagaaagaatcatcatgcaaggcaaagaacattttgacaaaagctaagaacaaacttgcttcacagttaacagaatcttcacagacatctatctccttagaatctgatttaaaacatattactagtgaagcagattctgatccaggaaacccagttgaactatgtaagactcagaagcaaagcactaccactttgaataaaaaagatctcccttttgtggaagaaataaaagaaggagagtgtcaggttaaaaaggtaaataaaatgacatctaagtcaaagaaaaggaagacctccatagatccttctccagagagccatgaagtaatggaaagaatacttgacagcgttcagggaaagtctactgtatctgaacaagctgataaggaaaacaatttggagaatgagaaaatggtcaaaaataagccagacttttacacaaaggcatttagatctttgtctgagatacattcacctaacatacaagattcttcctttgacagtgttcgtgaaggtttagtacctttgagcgtttcttctggtaaaaatgtgataataaaagaaaattttgccttggagtgctccccagcctttcaagtaagtgatgatgagcatgagaagatgaacaagatgaaatttaaagtcaaccggagaacccaaaaatcaggaataggtgatagaccattacaggacttgtcaaataccagttttgtttcaaataacactgctgaatctgaaaataagtcagaagatctatcttcagaacgggcaagcagaagaagaaggtgtactcctttctattttaaagagccaagcctcagagacaagatgagaagatgaagtgaatttatggattctggtttttctgaattttcaaagcataaggaatcaaaacagaaatatagtatcaagaagatgaaatgcttaatgaaaaggtttttttttgtttctttggcctttcatggagtgttgatttgtccattcttaatgtttattaataggtatatgtgcataaaatagctattttgtaacattaaactttttgagtcattttggtcatcatataacttaccttcctgtttatttaagcttctttttacctagtagcctttaaccaaacaatagccttttaaccaaataaaatgtgttaat

SEQ ID NO: 5223 - protein, 568 aa, Homo sapien [sequence omitted]

SEQ ID NO: 5224 - DNA, 1869 bp, Homo sapien
gtcacccccagcgggcgcgggccggagcacgggcacccagcatgggggtactgctcacacagaggacgctgctcagtctggtccttgcactcctgtttccaagcatggcgagcatggcggctataggcagctgctcgaaagagtaccgcgtgctccttggccagctccagaagcagacagatctcatgcaggacaccagcagactcctggacccctatatacgtatccaaggcctggatgttcctaaactgagagagcactgcagggagcgccccggggccttccccagtgaggagaccctgagggggctgggcaggcggggcttcctgcagaccctcaatgccacactgggctgcgtcctgcacagactggccgacttagagcagcgcctccccaaggcccaggatttggagaggtctgggctgaacatcgaggacttggagaagctgcagatggcgaggccgaacatcctcgggctcaggaacaacatctactgcatggcccagctgctggacaactcagacacggctgagcccacgaaggctggccggggggcctctcagccgcccacccccacccctgcctcggatgcttttcagcgcaagctggagggctgcaggttcctgcatggctaccatcgcttcatgcactcagtggggcgggtcttcagcaagtggggggagagcccgaaccggagccggagacacagcccccaccaggccctgaggaagggggtgcgcaggaccagaccctccaggaaaggcaagagactcatgaccaggggacagctgccccggtagcctcgagagcaccccttgccggtgaaggatgcggcaggtgctctgtggatgagaggaaccatcgcaggatgacagctcccgggtccccaaacctgttcccctctgctactagccactgagaagtgcactttaagaggtgggagctgggcagacccctctacctcctccaggctgggagacagagtcaggctgttgcgctcccacctcagccccaagttccccaggcccagtggggtggccgggcgggccacgcgggaccgactttccattgattcaggggtctgatgacacaggctgactcatggccgggctgactgcccccctgccttgctccccgaggcctgccggtccttccctctcatgacttgcagggccgttgcccccagacttcctcctttccgtgtttctgaaggggaggtcacagcctgagctggcctcctatgcctcatcatgtcccaaaccagacacctggatgtctgggtgacctcactttaggcagctgtaacagcggcagggtgtcccaggagccctgatccgggggtccagggaatggagctcaggtcccaggccagccccgaagtcgccacgtggcctggggcaggtcactttacctctgtggacctgttttctctttgtgaagctagggagttagaggctgtacaaggcccccactgcctgtcggttgcttggattccctgacgtaaggtggatattaaaaatctgtaaatcaggacaggtggtgcaaatggcgctgggaggtgtacacggaggtctctgtaaaagcagacccacctcccagcgccgggaagcccgtcttgggtcctcgctgctggctgctccccctggtggtggatcctggaattttctcacgcaggagccattgctctcctagagggggtctcagaaactgcgaggccagttccttggagggacatgactaatttatcgatttttatcaatttttatcagttttatatttataagccttatttatgatgtatatttaatgttaatattgtgcaaacttatatttaaaacttgcctggtttctaaaaaaaaaaaaaaaaaa

SEQ ID NO: 5225 - protein, 252 aa, Homo sapien
MGVLLTQRTLLSLVLALLFPSMASMAAIGSCSKEYRVLLGQLQKQTDLMQDTSRLLDPYIRIQGLDVPKLREHCRERPGAFPSEETLRGLGRRGFLQTLNATLGCVLHRLADLEQRLPKAQDLERSGLNIEDLEKLQMARPNILGLRNNIYCMAQLLDNSDTAEPTKAGRGASQPPTPTPASDAFQRKLEGCRFLHGYHRFMHSVGRVFSKWGESPNRSRRHSPHQALRKGVRRTRPSRKGKRLMTRGQLPR

SEQ ID NO: 5226 - DNA, 3337 bp, Homo sapien
gtttttaaagtgtaagacaggaaagggatctatttgatgtctatcttcagatatattggcagttttccttaagctatttagttcctcatctgttgctttttcattttgtatactgcaagttcccaggcaactcgaatttgcaaacacagccatggatacactatttaccttacagtagtttcctgggaatctaagtctggtttttgttattcttccctcccctccactgcataatcatgtataactagcaacatttatggttataggttgatttcctaagtgtggctgatggtagcctctagtttgaagtgagggaagaatgagtagtcaggaactggtcactttgaatgtgggagggaagatattcacgacaaggttttctacgataaagcagtttcctgcttctcgtttggcacgcatgttagatggcagagaccaagaattcaagatggttggtggccagatttttgtagacagagatggtgatttgtttagtttcatcttagattttttgagaactcaccagcttttattacccactgaattttcagactatcttaggcttcagagagaggctcttttctatgaacttcgttctctagttgatctcttaaacccatacctgctacagccaagacctgctcttgtggaggtacatttcctaagccggaacactcaagcttttttcagggtgtttggctcttgcagcaaaacaattgagatgctaacagggaggattacagtgtttacagaacaaccttcggcgccgacctggaatggtaactttttccctcctcagatgaccttacttccactgcctccacaaagaccttcttaccatgacctggttttccagtgtggttctgacagcactactgataaccaaactggagtcaggtattttgtactttgcagtatttctcttgtataccagtttgtgatgttttctctaaaaacttgaagttcctcaggcctgtaacttctggaaaagatgattattcaaaataatgttttggggtaaccagtggagttgggtagaatgaccaaataattattttccaaactgggatactttttagagtgaaaggggctattattaggtgggacaaaaggaataaatgaagactgcccagaaaaaactgagactatggacattcaaatcatgggagaaaataattttgtagattatgttccattgctaatgaatttgacttagaaaagaattgccttatttttaagagattgtttcagtggttcacataaaggctcgctcactggtttctcttgagttccttacacactatataagttgttctttcagttttatgattcaactactgtttttccttcagctgactttatttttaaacacccttaaagacagatatatctcatggcaaatttggtatcctgttacagccttggctcttaaacaactcaaaatattgggataggctgtcagtatgttaaggatagttgctcctgagtcaattcttcacttactccctctgttgttcttggctggatcctaacgctgatttccactctgctgtcacaaacatttttccccccgtaaaatgtcttaatgctgtcctaccattattttaccaactgtgaaagctggctttaatttttaggaggaaaagaaaagcctgcatgtgttctttattggtatcatttaaaatatactttttttttttttttggtaaaggtaggcgtattttaagatattttcttaacttgagcagtagccaacaggaaggataccagtgtctctctctcttagcgacacactccttggtcttgcttaccaactggaggacactaggtagaataaccgagtatgacaattcttaattgtttacattttataacttcctgtccttcaaaagagtttgaaatgtcattttgggaaaagagagccagtcaagctagtaggctgattgtgaagaaaatctaataccttatctttatctcaaacctctgtacaactttattttcattgatgggatactttaacaaaaatgaaattttttttggtttttaaaatatgagtgattatgacctctttggggatcatgcttcaaaaagtcagaaacctagagacaaaactgtcattgatttttaagaagaaacacactaggtcaaaagaagatgtcctggaaatacgaagtactctttaaaaaccatgcatttggagaaagtaattgtttccttgaaaaacatgattaaaaactaaaactgggatgttcctgtgtgtacacagtgccaaatggttttccctttttatgttgtgttttagaaacagcacgaaagttttttccattttaaagtgagaaaacattatatttagacttccataattccaaaatcagaagctatttttaaaattagcattttcttgcatcaccaaatggtattcaattgtttgaagctcaaaatttttaccattccataaatgtttgtgaatttttagacagtgccaatttaaaagtagagatagccaatctgaatacggtgaaattatggggatctctggtgattgggatgaaaactctggccttaaaaggtccacttttagtatataattgcctaattagcaatcatttttattttttgctcactccctggtctgaatctatctgtctattcagatattttttggtaggtttggaaaatggagaagtgagcctaattggtgcctaattgtctggtgtatcattcactttattcagtttgttctatcaatatgatttacccctcaaggttaacctagcaggttgctcagttattatctctcaaggtcacagtactagaaatacttggcttgcatctttcagatgccattcatgttatcaagctcaaattatagttggtcacaggattctaaagtctttatttgacttctcctttttgaactggctcaaatggaaaagtgtagttgcttttaaatgttaaaaataagtttaaactttatatttcccattggtttcccctattttgtcctttctttgtgtgcttgaaatattttatttttcagtttgtcctcatagggaatcaagtattttagctaggtgatgtcttgcaagtacgttccactttgttacaatctactatctgtatatactatttgtatcttaattcttttatgagatgttctgtaacatttttctcactttgacaaatgtttttagactgtacagtcaagatctggcgcttgggggtaagtggaatgatttgctaatattgagaatctgttgtatcaaacataataaactttttttgagatgcaaaaaaaatctatgtcgggtgcggagaaagaggtaatgaaatggca

SEQ ID NO: 5227 - protein, 213 aa, Homo sapien [sequence omitted]

SEQ ID NO: 5228 - DNA, 4112 bp, Homo sapien
cccggcccgccgggaccgcaggtaacgggccgcggggccccgcgggccaggaggggaacggggtcgggcgggcgagcagcgggcaggggagctcagggctcggctccgggctctgccgccggatttgggggccgcgaggaagagctgcgagccgagggcctggggccggcgcactcctcccgccctgtctgcagttggaaaacttttccccaagtttggggcggcggagttccgggggagaaggggccgggggagccgcggagggaggcgccgggcccgcgcgtgtagggcccaggccgaggccgggacgcgggtggggcgcaggcccgggtcagggccgcagccggctgtgcgccgtgcccgcccggggcgctgccccctccctcccctgggagctgcgtggctcccccctcccccccacctgcttcctgcctcagcctcctgccccgatataacgccctccccgcgccgggcccggccttcgcgctctgcccgccacggcagccgctgcctccgctccccgcgcggccgccgcccgggccccgaccgagggttgacagcccccggccagggcggcgccagggcgggcaccgcgctcccctcctccgtatcacttcccccaactggggcaacttctcccgaggcgggaggcgctggttcctcggctccctttctccctacttgggtaaagttctccgccctgaatgacttttcctgaagcggacattttacttaaatcgggtaactgtctccaaaagggtcactgcgcctgaacagttttcttctcggaagccccagcacccagccaggtgccctggggcgtgcaggccgccctggcctcccctccaccggcggccgctcacctcctgctccttctcctggtccgggcgggccggcctgggctcccactccagagggcagctggtccttcgccggtgcccaggccgcagggctgatgcccccgctcagctgagggaaggggaagtggaggggagaagtgccgggctggggccaggcggccagggcgccgcacggctctcacccggccggtgtgtgtccccgcaggagagtgtgctgggcagacgatgctggacacgatggaggcgcccggccactccaggcagctgctgctgcagctcaacaaccagcgcaccaagggcttcttgtgcgacgtgatcatcgtggtgcagaacgccctcttccgcgcgcacaagaacgtgctggcggccagcagcgcctacctcaagtccctggtggtgcatgacaacctgctcaacctggaccatgacatggtgagcccggccgtgttccgcctggtgctggacttcatctacaccggccgcctggctgacggcgcagaggcggctgcggccgcggccgtggccccgggggctgagccgagcctgggcgccgtgctggccgccgccagctacctgcagatccccgacctcgtggcgctgtgcaagaaacgcctcaagcgccacggcaagtactgccacctgcggggcggcggcggcggcggcggcggctacgcgccctatgctatggcgacgagctgggccgggagcgcggctcccccagcgagcgctgcgaagagcgtggtggggacgcggccgtctcgcccggggggcccccgctcggcctggcgccgccgccgcgctaccctggcagcctggacgggcccggcgcgggcggcgacggcgacgactacaagagcagcagcgaggagaccggtagcagcgaggaccccagcaccgcctggcggccacctcgagggctacccatgcccgcacctggcctatggcgagcccgagagcttcggtgacaacctgtacgtgtgcattccgtgcggcaagggcttccccagctctgagcagctgaacgcgcacgtggaggctcacgtggaggaggaggaagcgctgtacggcagggccgaggcggccgaagtggccgctggggccgccggcctagggcccccttttggaggcggcggggacaaggtcgccggggctccgggtggcctgggagagctgctgcggccctaccgctgcggctcgtgcgacaagagctacaaggacccggccacgctgcggcagcacgagaagacgcactggctgacccggccctacccatgcaccatctgcgggaagaagttcacgcagcgtgggaccatgacgcgccacatgcgcagccacctgggcctcaagcccttcgcgtgcgacgcgtgcggcatgcggttcacgcgccagtaccgcctcacccggacgcacatgcgcatccaccctcgcggcgagaagccctacgagtgccaggtgtgcggcggcaagttcgcacagcaacgcaacctcatcagccacatgaagatgcacgccgtggggggcgcggcggcgcggccggggcgctggcgggcttgggggggctccccggcgtccccggccccgacggcaagggcaagctcgacttccccgagggcgtctttgctgtggctcgctcacggccgagcagctgagcctgaagcagcaggacaaggcggccgcgaccgagctgctggcgcagaccacgcacttcctgcacgaccccaaggtggcgctggagagcctctacccgctggccaagttcacggccgagctgggcctcagccccgacaaggcggccgaggtgctgagccagggcgctcacctggcggccgggcccgacggcggaccatcgaccgtttctctcccacctagagcgcccctcgccagcccgctctgtcgctgctgcgcggccctggcccgcaccccagggagcggcgggggcggcgcgcagggcccactgtgcccgggacaaccgcagcgtcgccacagtggcggctccacctctcggcggcctcacctggcctcactgcttcgtgccttagctcgggggtcgggggagaaccccgggacggggtgggatggggtaagggaaatttatatttttgatatcagctttgaccaaaggagaccccaggcccctcccgcctcttcctgtggttcgtcggccccctcccccggctccgcgctgctcttagagggggaggggtgtcactgtcggggcactcctagccctacctccggcccttgcgaccacacccattctcactgtgaatctccccgctgggtcggagcgtcgggcagagttggggagtggggaggggactgagccggccggaggcccccgcacccccgctcccacccaccccgggactgataatgtgaagttcctcattttgcacaagtggcactagcccagggccaacccttccttcctcagtcaccaagggcggggagttctggagtcggaaggcgaagagcctaccaccaggtctcccactcccgcggtgccctcccttcccttccctgcggccccggaccatatttattgcatgcgccccggcggccccccatcccgagcccaggctgggctgggctggaacgcggtctctttagctccctcctcttcgtttgtatatttcctaccttgtacacagctcttccagagccgcttccattttctatactcgaaccaaacagcaataaagcagtaaccaaggaccccgaccccgctgctctcttctgcccctgcacaaggacctggatgctgcgcccgctgggtggaggagccagaaagggccaccctcacacaggtgcagaggcttggacctgcctccctccccagtcccagaaacagatcagcaagaggtcaggtatgtttcataactaaaaatttattaaggaaacaaaaccagtgctgcaaacgggacagaaaggagagctgggtctccctcccgaccacccagtcatcggccttccagctggggagagaatcttaaaggagaggccggggaccctgtactccaaagagcccagtcttctgagactctaggggactcctacccccaaactactggccttggctcccctacacggtaccccatcgcttctggcatagtcctgggcctcagggagggcagagctgcgcacccatcctccaggcaggctgtgcagtcaggccatgggctctggggtatcccccactggtcccattaagatttgcccctggctccaccgaaaaccccgtcttcccctaag

SEQ ID NO: 5229 - protein, 547 aa, Homo sapien
MLDTMEAPGHSRQLLLQLNNQRTKGFLCDVIIVVQNALFRAHKNVLAASSAYLKSLVVHDNLLNLDHDMVSPAVFRLVLDFIYTGRLADGAEAAAAAAVAPGAEPSLGAVLAAASYLQIPDLVALCKKRLKRHGKYCHLRGGGGGGGGYAPYAMATSWAGSAAPPASAAKSVVGTRPSRPGGPRSAWRRRRATLAAWTGPARAATATTTRAAARRPVAARTPAPPGGHLEGYPCPHLAYGEPESFGDNLYVCIPCGKGFPSSEQLNAHVEAHVEEEEALYGRAEAAEVAAGAAGLGPPFGGGGDKVAGAPGGLGELLRPYRCGSCDKSYKDPATLRQHEKTHWLTRPYPCTICGKKFTQRGTMTRHMRSHLGLKPFACDACGMRFTRQYRLTRTHMRIHPRGEKPYECQVCGGKFAQQRNLISHMKMHAVGGAAARPGRWRAWGGSPASPAPTARASSTSPRASLLWLAHGRAAEPEAAGQGGRDRAAGADHALPARPQGGAGEPLPAGQVHGRAGPQPRQGGRGAEPGRSPGGRARRRTIDRFSPT

SEQ ID NO: 5230 - DNA, 1766 bp, Homo sapien
ggtgcacacgggagcgccgcaccggccggcatggaggagcgcggcgattccgagccgacccccggctgcagcggcctgggtccgggcggtgttcgcggctttggcgacggcggtggagctccttcgtgggcccctgaggacgcctggatgggcactcaccctaagtatctagaaatgatggaattagatataggagatgccacccaagtttatgtagcgttcttggtttacctggacctcatggaaagcaaaagctggcatgaagtaaactgtgtaggattaccagaactccagctcatctgccttgttggtactgagatagaaggggaggggttacagactgtggtgcctacccccatcactgcttccctcagccataacagaatatttctcttagaagatgacatccatgcttcctgatgcttgttttattcatacaagattggatttgagacccatcagactgcttcatcttttatctcagaaatagggttgacgtacatagtgagggttgacttccccattccataaggttttcattctgaagagtaaaacttccccaggtagaagactttctccttcttaaaaaatatagggtgatttctttaaaactttgttatctagagacagtttaattacagttatatacaggtttatgcctaggatgtattcagatgggtgggacctgtgtgctgcttttgtcatcccacactcaaagttgtctctttgtttcttgctgccactgccagctcattgttgagactgccatttctttctcttactcagctctccccagtgccttttggccactgcagctaccgtagaatggcattttatatgtaccttgtcacccacttctgtttactttttcctctccagtaaaaagtaaaagatttctttcaattggtcttcccattgcagttactgttatttctcttttttggttaactttaaatcaaaactcaaaatatgttcatccagagtgtgtcttaagtaacttacgtgtcttaagtaacagggaccagagacatgttacctacaagagttctgggctatccttttcattcttatcacatatcatagcttgaatattacaacagtgtgggagagaatcaaccgtaaaaatgtcttcattaattagacccagttattccacttttgttaatgtctctcaaattgtacaaagtataaaaaattatatgcacaaagatgttccaagtgacattacttttagtagcccaaattataaaccactttaaagtttggggtaaagattggcaaactttttctataaagggccagaaagtaactattttaggtttttaaacctactgtctctgtcataacttgtcaacactgctgtatgaagcacaaaagcagccatagacaatacataaacaatacgggcgtggctttgttccagtaaaactttgtttacaaatgtggtgccatagtttgtcatccctgggtctaggaaatagtcaataaacagatatatacaaatgatacataatgtacttattaaaaattagtaatgaatattattaaaaacatgaaaatattaccttaagtaaaaattgcaagacggaaaagtgtataagtgggtgtaatcatggctgaaataacagaccaagcatatgataaaaagataacaaagtaaatcaaattactaactggttatagtgggataggaggcagaaaatggatgactttgtcttttctcaatgtttttatttgtattttataataaaaatgttttaaaatta

SEQ ID NO: 5231 - protein, 139 aa, Homo sapien
GAHGSAAPAGMEERGDSEPTPGCSGLGPGGVRGFGDGGGAPSWAPEDAWMGTHPKYLEMMELDIGDATQVYVAFLVYLDLMESKSWHEVNCVGLPELQLICLVGTEIEGEGLQTVVPTPITASLSHNRIFLLEDDIHAS

SEQ ID NO: 5232 - DNA, 7885 bp, Homo sapien
gcgaaggcgacagctctaggggttggcaccggccccgagaggaggatgcgggtccggatagggctgacgctgctgctgtgtgcggtgctgctgagcttggcctcggcgtcctcggatgaagaaggcagccaggatgaatccttagattccaagactactttgacatcagatgagtcagtaaaggaccatactactgcaggcagagtagttgctggtcaaatatttcttgattcagaagaatctgaattagaatcctctattcaagaagaggaagacagcctcaagagccaagagggggaaagtgtcacagaagatatcagctttctagagtctccaaatccagaaaacaaggactatgaagagccaaagaaagtacggaaaccagctttgaccgccattgaaggcacagcacatggggagccctgccacttcccttttcttttcctagataaggagtatgatgaatgtacatcagatgggagggaagatggcagactgtggtgtgctacaacctatgactacaaagcagatgaaaagtggggcttttgtgaaactgaagaagaggctgctaagagacggcagatgcaggaagcagaaatgatgtatcaaactggaatgaaaatccttaatggaagcaataagaaaagccaaaaaagagaagcatatcggtatctccaaaaggcagcaagcatgaaccataccaaagccctggagagagtgtcatatgctcttttatttggtgattacttgccacagaatatccaggcagcgagagagatgtttgagaagctgactgaggaaggctctcccaagggacagactgctcttggctttctgtatgcctctggacttggtgttaattcaagtcaggcaaaggctcttgtatattatacatttggagctcttgggggcaatctaatagcccacatggttttgggttacagatactgggctggcatcggcgtcctccagagttgtgaatctgccctgactcactatcgtcttgttgccaatcatgttgctagtgatatctcgctaacaggaggctcagtagtacagagaatacggctgcctgatgaagtggaaaatccaggaatgaacagtggaatgctagaagaagatttgattcaatattaccagttcctagctgaaaaaggtgatgtacaagcacaggttggtcttggacaactgcacctgcacggagggcgtggagtagaacagaatcatcagagagcatttgactacttcaatttagcagcaaatgctggcaattcacatgccatggcctttttgggaaagatgtattcggaaggaagtgacattgtacctcagagtaatgagacagctctccactactttaagaaagctgctgacatgggcaacccagttggacagagtgggcttggaatggcctacctctatgggagaggagttcaagttaattatgatctagcccttaagtatttccagaaagctgctgaacaaggctgggtggatgggcagctacagcttggttccatgtactataatggcattggagtcaagagagattataaacaggccttgaagtattttaatttagcttctcagggaggccatatcttggctttctataacctagctcagatgcatgccagtggcaccggcgtgatgcgatcatgtcacactgcagtggagttgtttaagaatgtatgtgaacgaggccgttggtctgaaaggcttatgactgcctataacagctataaagatggcgattacaatgctgcagtgatccagtacctcctcctggctgaacagggctatgaagtggcacaaagcaatgcagcctttattcttgatcagagagaagcaagcattgtaggtgagaatgaaacttatcccagagctttgctacattggaacagggccgcctctcaaggctatactgtggctagaattaagctcggagactaccatttctatgggtttggcaccgatgtagattatgaaactgcatttattcattaccgtctggcttctgagcagcaacacagtgcacaagctatgtttaatctgggatatatgcatgagaaaggactgggcattaaacaggatattcaccttgcgaaacgtttttatgacatggcagctgaagccagcccagatgcacaagttccagtcttcctagccctctgcaaattgggcgtcgtctatttcttgcagtacatacgggaaacaaacattcgagatatgttcacccaacttgatatggaccagcttttgggacctgagtgggacctttacctcatgaccatcattgcgctgctgttgggaacagtcatagcttacaggcaaaggcagcaccaagacatgcctgcacccaggcctccagggccacggccagctccaccccagcaggaggggccaccagagcagcagccaccacagtaataggcactgggtccagccttgatcagtgacagcgaaggaagttatctgctgggaacacttgcatttgatttaggaccttggatcagtggtcacctcccagaagaggcacggcacaaggaagcattgaattcctaaagctgcttagaatctgatgcctttattttcagggataagtaactcttacctaaactgagctgaatgtttgtttcagtgccatatggagtaacaactttcagtggcttttttttttcttttctggaaacatatgtgagacactcagagtaatgtctactgtatccagctatctttctttggatccttttggtcattatttcagtgtgcataagttcttaatgtcaaccatctttaaggtattgtgcatcgacactaaaaactgatcagtgttaaaaaggaaaacccagttgcaagtttaaacgtgttcgaaagtctgaaaatagaacttgccttttaagttaaaaaaaaaaaaaaagctatcttgaaaatgttttggaactgcgataactgagaaacttcttaccagtccacatgcaattaaacatattcagcatatttgttattttaaaagggagggttgggaggtttcttattggtgattgtcacacggtataccatactcctctccttcaaagaatgaaaggccttgttaaggagttttttgtgagctttacttctttggaatggaatatacttatgcaaaaccttgtgaactgactccttgcactaacgcgagtttgccccacctactctgtaatttgcttgtttgttttgaatataacagagccttgatccagaagccagaggatggactaagtgggagaaattagaaaacaaaacgaactctggttggggtactacgatcacagacacagacatacttttcctaaagttgaagcatttgttcccaggatttattttactttgcatttctttttgcacaaagaacacatcaccttcctgaattctttaaatatgaaatatcattgccagggtatggcttacagtgactactattatcaatactaaaactcagagaatcaaagatggattaaactcagtggttgatgaaagccaaaacctgtttgtactgttctatactattcaggtatctttttatttctgatagttttatattataatagaaagccagccactgcttagctatcatagtcaccattttctcactgttaacattaggaaaatcaaggctactatgcttcaggattgtctggttaaatagtatgggaaaaaaactgaagagtttcaacataattacacacgtgaaataattacagcttaaactgaatttgtatttcattttattgtcagatggtggtgttcaccagcctgtatcttgtctgagactgcattcgtatctgagcaggttttctatgcctactgatgtcagtatgtttatactaaccttcatgcttttttcccagaatccctcatctgccagaaaacttgaaaagtttattgcttgtagagttgtactgctttgatttttgaagttggggtagtagttagaactagatttaactagtctataatgaacatgaaggcttttatatatgaagttgtatacctttttgtgtttagagaattatgggaaacctggtaagcaaaactttcctcccagataattgcttccaaattcgaagagttagtcaccaagagagccatatgtatgaaagcgtatctgtgaaaggtaggaaacttaccccccctaagtgtaatgttgctttaggcaactcttgtaaatagtgagacttgtttggtctcttacatgtagagatttgagtgcagttggtacagtactttggtgtctccaccactgtcccttctccccgcttcaaaataagtgtaatccacggtagcagccacacttccttcagaaggaactgttataatttatttaaaagttgaaaaaccacccaagatgactaccaactttcactttttttcttctgccatccaccctcattttccctttagcaagatttttatatctaactttccttccctccattgagtacgtgctttgagaaaacatttcttaaaacagtgtgtgccacctaaggctggatgggaaagtgcagtcttgttgttcatataaaaaacacacttcttattagtttacccacttgcctttttctattgttaatgttctgaatttccttttcttggcttgtttctacttcattttaaccctgggtcacttgctgccagcagtttgtgaatggtgtctttcaaataacttagttcttatggcttcacttaaagactgtctcaaaaatactttgctctcttcttcttttttgttcatgggacatggtacctaagcaaataggagttgggtttggtttttctcctaaaataatgctcaatacttacctaatcaaatggcatccatttgaataaaatgacaataactaaagctagttaatgtcagtgacattaaactaactccaggattcaggagttttaatgttagaatttagatttaacagatagagtgtggcttcatttgtccatggtagcccatctctcctaagaccttttctagtctgtcttcctgccttcgaacttgatgacagtaaaaccctgtttagtattctcttgtgcatttggtttgttggttagccgactgtcttgaaactattcattttgcttctagttttattttacagaggtagcattggtgggtttttttttttttttctgtctctgtgtttgaagtttcagtttctgttttctaggtaaggcttatttttgattagcagtcaatggcaaagaaaaagtaaatcaaagatgacttcttttcaaaatgtatggcccttttattgcacttttaactcagatgaatttataaattattaatcttgatactaaggatttgttacttttttgcatattaggttaatttttaccttacatgtgagagtcttaccactaagccattctgtctctgtactgttgggaagttttggaaacccctgccagtgatctggtgatgatctgatgatttatttaaagagccgttgatgcctccaggaaacttaagtattttattaatatatatataggaatttttttttattttgctttgtctttctctcccttcttttatcctcatgttcattcttcaaaccagtgttttggaagtatgcatgcaggcctataaatgaaaaacacaattctttatgtgtatagcatgtgtattaatgtctaactacatacgcaaaaacttcctttacagaggttcggactaacatttcacatgcacatttcaaaacaagatgtgtcatgaaaacagcccctttacctgccaagacaagcagggctatatttcagtgacagctggatattttgtttctgaaagtgaatctcataatatatatatgtattacacattattatgactagaagtatgtaagaaatgatcagaacaaaagaaaatttctattttcatgcaaatatttttcatcagtcatcactctcaaatataaattaaaatataacactcctgaatgcctgaggcacgatctggattttaaatgtgtggtattcattgaaaagaagctctccacccacttggtatttcaagaaaatttaaaacgatcccaaggaaagatgatttgtatgttaaagtgactgcacaagtaaaagtccaatgttgtgtgcatgaaaaggattccttggttatgtgcagggaatcatctcacatgctgtttttcctatttggtttgagaaacaggctgacactattctctttgattagaaaataaactcataaaactcataatgttgatataatcaagatgttaaccactataaatatgtagaagaggaagttttaaatagaccttaagctggcattgtgaaggaacaccatggtagactctttttggtaatggtattttgtatttaatgaaatgcagtataaaggttggtgaagtgtaataataattgtgtaaacaaatcctgtttaatagaagagatgtacagaatcgttttggtactgtatcttgaaacttgtgaaataaagattccacttttggttatcctgtatgctgtaatataccacaaccaagcaccctttccagacagactttttttaagctgaatgaatccaattttttaatgttttttggaaattcagaagcttctgaaaacattcacttgtggcaatttgaatttatctttcattttaaactcctgaaattcagatttttacaagtccaatattgccctagggagaacatgaatttgctaagaaatgttatcttttaaatctctgatatctttgtcttgaagcagccttgatatgtagtaagcgtgattcactttagcctgattataatattatttatctaaagtttgtttatgcattgccttgtcccaggaattttttaagaggacttgcagagacacgtaccacacagtaacatttagactaaatatgctctgagtaaaggagaaatgaaaaaatattaaatcaagagtgaacatgtacacaaagtgcaattggaagtgggctacaaatttagcccccagcttcccagcaggcaactcaaagaggtaactgaggtaaaatgttccagctcagaagcattggatcttggataaaaagcctacatgatgcaaactgtggcaactgagatgtcagatctcaagatctcaaattgtacttgtgggagcacagtcagtgaccccagatgaccttgactgacctaaaagttgtgggggaagtcggatgtcagagccttaacaccagcaggtgaccatccaacctggggcaatgcctgcctgttcaccacttagcctctttctggcaagtcattagaatgtcctccatcttcattggctgcaacttgatgagctacagcctctttcctaacttcctttatgatgctagtttaggttggttataccagcttggaagtatgcttagattaagttacagcagatacacaaattagatgcaagtaaaaaaaatcagaatttctgtagtagaaactacgaaaaataaaaaggaaagtttttactttttgggtatttttttacgaataagaaaaagtgagcgttaatcagttcaaaaggaggtactgctgtgtaatgggctttgtacgttccttctcatgtcacttacgtcactacttcgccatcaaattgaacaagcttttaattagatcctgaaaattcactatgctagtagtttattggtagtattatattttgagtagaactctgattttccctagaggccaaattctttttatctgggttaatttcttttaaacataacaatgttaatgctgaattgtatattaaatcccatttctaaaaaccacacaattttttctcatgtaagttgagtggaatgtggttagttaactgaatttggaatgttcatataaataatttgttgctgctc

SEQ ID NO: 5233 - protein, 794 aa, Homo sapien
MRVRIGLTLLLCAVLLSLASASSDEEGSQDESLDSKTTLTSDESVKDHTTAGRVVAGQIFLDSEESELESSIQEEEDSLKSQEGESVTEDISFLESPNPENKDYEEPKKVRKPALTAIEGTAHGEPCHFPFLFLDKEYDECTSDGREDGRLWCATTYDYKADEKWGFCETEEEAAKRRQMQEAEMMYQTGMKILNGSNKKSQKREAYRYLQKAASMNHTKALERVSYALLFGDYLPQNIQAAREMFEKLTEEGSPKGQTALGFLYASGLGVNSSQAKALVYYTFGALGGNLIAHMVLGYRYWAGIGVLQSCESALTHYRLVANHVASDISLTGGSVVQRIRLPDEVENPGMNSGMLEEDLIQYYQFLAEKGDVQAQVGLGQLHLHGGRGVEQNHQRAFDYFNLAANAGNSHAMAFLGKMYSEGSDIVPQSNETALHYFKKAADMGNPVGQSGLGMAYLYGRGVQVNYDLALKYFQKAAEQGWVDGQLQLGSMYYNGIGVKRDYKQALKYFNLASQGGHILAFYNLAQMHASGTGVMRSCHTAVELFKNVCERGRWSERLMTAYNSYKDGDYNAAVIQYLLLAEQGYEVAQSNAAFILDQREASIVGENETYPRALLHWNRAASQGYTVARIKLGDYHFYGFGTDVDYETAFIHYRLASEQQHSAQAMFNLGYMHEKGLGIKQDIHLAKRFYDMAAEASPDAQVPVFLALCKLGVVYFLQYIRETNIRDMFTQLDMDQLLGPEWDLYLMTIIALLLGTVIAYRQRQHQDMPAPRPPGPRPAPPQQEGPPEQQPPQ

SEQ ID NO: 5234 - DNA, 1263 bp, Homo sapien
gctgtggacgaagaggcggcctcggtggtaagtggcggccgctgggacccagccaggtaccggtccggctcggccctgcccctttccggccgctctcactccttccctcggcctcgagttcctcgtgggcccgtgggggccgccgcggggtcggggctgcgaggcagcgcccgccgttccatggtaagcggtgctacgggacgttcggaaggaaacctcgctagagcaggggacgcctgggctcctggctgaccacggggcctttgcacggccagggctttgcgaccgcagtgtcttccttctgtccccggtcgtgcgccgtgcccctcagcgcggctcacgtttcggaacacgtctgcctttcatgcctcccgaagagcctccccgcatcccgtgccccctgctcgctgctgccgctgacccttgggcgctgcgctggtccagagcgtgttgtcctctgacgccgtcagaacctgagctccctgcgagctgggactccgccgtgtcttcattgcctccagtgcaaagcaactgcttgcaagagaacaaaagtgtgttcaggtgcacagagtagaaaattcaaggagcctgaaagggtatttggtgaagacttgatgtgtttttcccagtcctaacctccaaggcccagttctcccctggggcagagggaaacccgtttcttacgggtctgcaaagaaagtctatgcaggaacatctacgtgcgtttctgcaaaaggtcagttactttacttggggctcttatacttaacgtagctcggagagcgccccatgcattcagatacaggtgggattcctccggaaacggagttttatagcaccagactttatcccctttcctgtagaaatttagggtttttgctgtcttttataacgaacaatgctagcttgactattgcttgtacaaaccgttttttgcccaagtcggactattttcttaggttaaattccttggtgcagaagtgcgagggctgtatttaggcccctaaaggggtggtaccaaatcgccctcccccaccagcataagagggggccggcgacacccttgcccaagctggattttgcagacctggtaggcgtgagatagtatttcactgtagcttgtgtttcctgtaagtatagtcgaacgtcgtgatgttcctgttacatctatgttacgttgatcattgttaccactgacagtcgtttcgagattggaaaatatgtttattataaacgtttgactatttaaaagccatttgtatt

SEQ ID NO: 5235 - protein, 83 aa, Homo sapien
AVDEEAASVVSGGRWDPARYRSGSALPLSGRSHSFPRPRVPRGPVGAAAGSGLRGSARRSMVSGATGRSEGNLARAGDAWAPG

SEQ ID NO: 5236 - DNA, 2360 bp, Homo sapien
  Unsure 77-99: Unknown base
ggtgatgagtttctaatcccaaatatatttgcatttaccaggcttttgtgagtttaagaagttatctatcatatctnnnnnnnnnnnnnnnnnnnnnnntgcttgtttctatcaagaatgactcctttataaactggggagtatctttaagagtggtttcaaccctgactgtatagtatcatctgttgaggagcttaaaaaaaatatgtaggcccagcccacactagactggcattggtacctggtatcagtattttttaaaaacttcccataggattctaatgtacagccaagattgaggaccatttgtctgtcatctgggattatgcttaataaattaatactgttttttaaattaattagatttcacttctaagtcattatcagtaaatttactcagtatctaactgacaagaatttctagcatatatttcttgattagtgcatgtaaaattctaaaagaatttctatagtattttccaggcaataagacaactagtgccccaaatttaccaaatgcatgagtctaagcctgtgctatatataaatatactcaaagccaagtttacatctgtgtacacaagtgtgcatgcatatgtacaattaaagactatagttgtaacagtcatgagcttgtgttttgattttactcctattcctgtattgtattaagtgtactatcatgttcttgaggcatatctccaggagatatgtttatttcttttccaggaaaagtgggacatatataagtagggtaaacgctagagctagatactcctttaatctctattacgtcagatctctggctcccttttacaaccaggcaatcttcaattataggtggctaatagggaagaaaatcatcggcagagcaacagcttcatgtaatttcagagtagaaaaatgaattttaatcttctgaaaggtaatattagaattagctggattgctacacttaggaatcataggttccaaataaatatcagtacatacggaaatcagataatgggacagattatttgaaattagggctgcctagaaatctggaatgtgagatcaccctccttctgaccaaatatgcttgaataaacttaatattccaaattatgtgagggattgcctattgtgcaaaaaaaaaaaaacgaaatctgaatttaaaaaaaattaccacagtctagtattattttagtctcttggatgttataacgttatctgtcccatctgttgttaatatgagacactgtacaaacaaacaactattttgatttagaatcagtatagatcacctagctttttgtctcaattttcctactttaatgctcttggggctttcgcttttgattttcagttttttccttaaaataattaatattgttgaaattagactttctaaatttaaatttatcagaatttcctatgtaaaatgagtctaggcaccaaatgtttaatgactttaaaaaaaatgtttatgactataaaaggaaaaaccctgtatcaatttcaagcttgttttatatccaaagtgctagttattttgtgatgagaatatatgccccaagaacatttttgaaagacatatagttagtaacttttttatttttcaacttacataaaataaacttattacttgtttcacaagtttgagttttcaaaataatatttactaaatggcatatttatgtacatccagctgaactttttgcttgaattgggtttctacattttaaaaagtctttcagtaatatacgattttttatgaatgtttttcatttaataattatgaaatcaagtaaagctaaaaggaatcttaaattcccaatatgatatcatttttttcttctcaaaagtaagtagtaatgaggttttactataaactgttacagcattctttaaaacgacaatgacaataacattttcatcataatacaaatttttgcagatgagttgaatatatcaatgaaagaaaaaaatctactttttcttgtttcctttcacaggcaatgataccgtctttatccaagttactctgccccatggcccaagttagtatatttggtttaagactcataattcttgctttggctttaaaaatcaaaccaagtgtaacctttcctgctaaaactcttcttgggtctggcagcattggtaccttgcttgcaacatcctagaagtgaggccttcacttgtgctatctttagatcataagtgatttgcttaaatttatatatttctcatgctttttataaaaccttgtttctctcttaaaagaacatattaaataagtggcttccacatttaaccatttcttttttccaactatagagttctaagtatattttaatgctcaactttgaaaaaaa

SEQ ID NO: 5237 - protein, 16 aa, Homo sapien
GDEFLIPNIFAFTRLL

SEQ ID NO: 5238 - DNA, 643 bp, Homo sapien
gctgggaagggatgggttggggagcgggggtgatcccagtctgaggctcccggggatgagataagagtctggagacgggcatgggttcttggagagtggcatgagctggctctgccctgggagcccggtctgagggggacgttgttggagcccctagtgttgggggtggttatgggagggggtggggtgagggaaacgggagaatgaaggagaaaactgagccctagtttcaccgtgttcatttggaaggacgagccgggtcctcagggggaggttccaggactctgcccttggcgttgagggttggggggcggggggcctcctcccttcctctcagcccccttccccaggggctgtgcttccatgctcctagcctcccaccttcgctcaggacatgttataacttaggctaaactgtgaaaattccggtggggatggcctgggccgagctctccaggcaggcggccctgcccccagccctgtccatccatttcaggggggagctgggcccttctccggctgtgtctggccacccagggcagtggctggggccagtggccttccagctttggcccctgcacctcttctcaatgcactttaataatgtaacatattactaataaacaagctatttatttacctg

SEQ ID NO: 5239 - protein, 20 aa, Homo sapien
LGRDGLGSGGDPSLRLPGMR

SEQ ID NO: 5240 - DNA, 2457 bp, Homo sapien
cgctgttgcctccgccacctcctccgccgccgcgcgcccctcggagttccgcgccccaccatgcccaacatcgtgctgttcagcggcagctcgcatcaggacctatcccagcgcgtggccgaccgcctgggcctggagctgggcaaggtggtcacgaagaagttcagcaaccaggagaccagcgtggagattggtgaaagcgtgagaggggaagatgtctacatcatccagagcggctgcggggaaattaacgacaacctgatggaactcctcatcatgatcaatgcctgcaagattgcgtcatcatccagagtaactgccgtgatcccgtgtttcccatacgcccgacaagataaaaaggacaagagtcgtgccccaatttctgcaaaacttgtggccaatatgctgtcggtggctggggcggatcacatcatcaccatggacctgcatgcttctcagatacagggattctttgatattcctgtggataatttgtatgcggagcccgcagtcctgcagtggattcgggaaaacattgccgagtggaagaactgtatcattgtttcacctgacgcagggggagccaaaagggttacatcaattgcagacaggttgaatgtggaatttgctttgatccacaaagagaggaagaaggcgaatgaagtggaccggatggtcctggtgggcgacgtgaaggaccgtgtggccatcctcgtggatgacatggctgacacttgcggcaccatctgccatgctgcggacaagctgctgtcagctggagccaccaaagtgtatgctatccttacccatgggatcttctctggaccagctatttccagaataaataatgccgcctttgaggctgttgtcgtcacaaacacaattccgcaagaggacaaaatgaaacactgcaccaagattcaggtcattgacatttccatgatcttggccgaagcaatccgaaggacacacaatggggaatccgtgtcctacctgttcagccatgtcccgctataaatccagaatgggaagtgtccagcaagcctactctgacttctgacttgtttttgttttctggatttttagctgtaggtattcagcaatgataggttaatcactggcaaaagcatcagatctttgtatatgctaagatttattgtttccccttctaaagctcaagatcatttctttccagtttttggggaaatggtggtggttatttggtctttaagtgaactgtcttaaatgagaaacgtttttgtcattttgacttttaacaggtacaggtgatctcttcctttgttctttcagtactttgaggcgacaactttcaagtatataatttcattgtggaagtcatagtttatatatttcgaggttgccaaaggtgacttcacattaaagccttctgtgtaaatatatactgataatgcctatggacatttgggtaaaaccctgtatagaattaattatccttttactttggagtgaaccttggaaaatttataattataataccatggattttgaattttccttttttttttttttttttggataactcagtttcagataaaccatcttggttactgtgcttaatttggaccaaattttatttagcttaatatggacactgacacattttggggggtatacattagacatatcagagcagtgtatttctggatcattttttaaatgacctcttctaaaacataactgtcacttacctgaaatgctgcatcctaaaattccaaaattatattgagcaatcgccaaggcctaaagccaactgacttaaaggtaatcatttcagctaagattaaatttaaagcctaagaatgtatagagctagttttaaaataatgatctcagatttttaaaaaggatataggaacctgcattgtcattctctgaattaagaactgatggtttctatcattatttagccccacctttgtattttaaaatccttcagaatacatttatgaaccaatgcgactggacttagccacacacaatggaaattcagaccttgactatttggtgtttccagttcacaaaggtgatgaagactgtcttgggagcagcttaatcccaaaatttgtacatttcttgctgctcctggcgtggaaacttaagtgagaccaccaaatacattggtcctgtccaattctactgaatgggggtggacctggcatttatctggccaaaaacaggagccagagaaatatgaatataccaaagttgtttgtttagcctccaacttaaattacattagtcaacttatagatactcatatgatcacttttctttttagatactacatcaactagattcaggagtatatcatttgcagtgcttgtattggtttaaaatgtaagattttaagatcctctaacactgtactaaaacatttcaataaaatcattctgactgcgttcaaaaaaaaaaaaa

SEQ ID NO: 5241 - protein, 318 aa, Homo sapien
MPNIVLFSGSSHQDLSQRVADRLGLELGKVVTKKFSNQETSVEIGESVRGEDVYIIQSGCGEINDNLMELLIMINACKIASSSRVTAVIPCFPYARQDKKDKSRAPISAKLVANMLSVAGADHIITMDLHASQIQGFFDIPVDNLYAEPAVLQWIRENIAEWKNCIIVSPDAGGAKRVTSIADRLNVEFALIHKERKKANEVDRMVLVGDVKDRVAILVDDMADTCGTICHAADKLLSAGATKVYAILTHGIFSGPAISRINNAAFEAVVVTNTIPQEDKMKHCTKIQVIDISMILAEAIRRTHNGESVSYLFSHVPL

SEQ ID NO: 5242 - DNA, 1129 bp, Homo sapien
caggacctccagcacctccccagaatcgaagagaaaggccatcatcattcagggatcgtcagcgttcacctattgcacttcctgtgaagcaggagcctccacaaattggtagctatttaacttagtttagtggaccacaattggcatgacttttttatcatataaaaaggatgtcttgttttcttaaaattgtttgagtatctctgatgtgttaggaattgacactttattttttatggtcataaagcttaaaattacaaaaatgatactggtctgaaattaaaaggtttaaataattttatttaaaccttcacattaaattccagattttgtgatgaagtgaaaatttatgctagccatagcatgttggtattttcttcagtgtaggcatttcagtacattatacagatatatgagcccttctccttttaaatctaattgttcaatctctgtccactcttagttcatctgatgcactgctgtcagattaattttcctctggttatttcacttcccttaagtattttggcagaaaatttcaattttttaaataacattatagagccagcctatttcaagtgacaaatacatatttatgccactttatatctggaaagttctaaattgttcagtatttaatggacaggagcatttgttaataaatctttactttttacattttaggaagattctaactttactccttttttaacttactagcaaatcacttatttttttcgagtctcagtttcctcagcctgtggaaaaaagtggagtaatagtagtgatctctgagggcttttgtaaggattaaattagatgatggtttaacatgctttcattgtgtcctggcagattgtaagcactagagcagtggtccctgctgttactaaaagtgatggcattgaagaaaggcatgatatttaatgggatattttttaaatttactcacaagtttgtagaaatattttacttaactgacttgcgtatatttttcccacgtgaaacagacgcagtaaaacgcaggactcttcccgcttggattcgcgaaggtcttgaaaaaatggaacgtgaaaagcagaagaaattggagaaagaaagaatggaacaacaacgttcacaattgtcc

SEQ ID NO: 5243 - protein, 70 aa, Homo sapien
MIFNGIFFKFTHKFVEIFYLTDLRIFFPRETDAVKRRTLPAWIREGLEKMEREKQKKLEKERMEQQRSQL

SEQ ID NO: 5244 - DNA, 2276 bp, Homo sapien
tggccttaggtgtacacacacctggcactttgcttgacacataataggtggaccacaaatatctactaaatgaatatttgcatatagtaatattttaaggtactaaaagcagctcaaagtaaatatattaatatattaattccattgctatctggataaccactcaactttcctgctgaaaatgcccatttaattaaagaaggttggatagagctctctatatgcattttggacaggcaggggtttcaggtcataaacattctgatgagttaatataaaatgagagaaactgtaaatttccactactaaaaatcacaaaaataacagaaacaaaagaagagataagaatttggggaattgtgctgaacaatttagtggttaaaaaaaacaactgtgcatgtttagacttaaataagcccccatccaagtgtgaggggtccagtaatttttcaaaacatatgaaagtgttaatacattttgacaaaggaccattaaaaaagtcctgaattctgacttgagggaggaaagtaatgactaatacattctctagagacttgcagactttgggaattcataaaggaatggatgataattattaactgttgctggctgattgcccagacagttctcaacagccctgtacaagtctctgggtttgggatggatcaattctgagactggaaaatggccaaatctttgcaaatgagaaatatttttcttataagttcttattgtaggcaaataattacatagattattcatcagagaatttttaaatgctcataatctcaactctttcatttacaacttgtatttccaatagtttatgggtcatctctgcatagatgtcagaagtcacctcaagtttagtgtgtccaaaatctaactcacaggtctgtttctgacctcccaacttgctttccttgtgtttttcctatgctaatgatccaccataatcaaaataattaacatttatccagtgcctactatgtactattccctgtcctgttttacatttactcatttaaagtccataagaaacattaaatctcatctgccttctgaagaagatacaaccatgctctcttttacaaagtaggaaactgggtcacagaaaggtgaagtctttaaggctgaatcacagtagctcatcctagtaaatagaaaagccaggattcaactccaggggctgggtgcagaactgctattcttcactgcttcaccaatcagcagctacccaaggcagaaaactttttcatccttggctccttcattctccctgtcaccccagatcccctctacatctagtcagagaataggtcctgtcaattccaacttctctatatggctcctctcaggcatgtgcccttaattggcctaattctctaatacaccttccctctacatgctcactccctcagatcattgctttatcacgtgttacctgggttgctattacataaagagcaatctttctaaaatgaggatcttatcacttcacttccacactaaaatgtttttcctggggaaccacactccttagcaatctgacccatcagaccttccaggctgtctcctgcctgctccctaaggctccagccacacagaattatcatgggcccacacacccaccaaatcctcccatgcctttgcccatgttgtctgggatgcccttctctcccttctgtctacatcaagcatcagactgaatatccctcttgtgcggccttctaaaacctcccgtccaaagcgaaatatattgccctctatttatacttttacagcatttggcacacaagtacagagtagtagctttttatcacattctctgataattatatagatatggtatttcttagctctctctccaactggctaataagttgctttttgtctgagtgcctaattttgtgttttgtgtctgagtgcctcagttcctcaaaaaaaggttttttgattagttcattattcatttgaacatggaaattatgctcactagtggcaaatgccactaaccgtattccagaagctaggtgtcatgtttgcaataagatatattatcccttctacaagtcaccttttatttcaggcatttgtaaatgcccattaataaagtatggttcataaattttaccttgtaagtgcctaagaaatgagactacaagctccatttcagcaggacacaataaatattattttataatgcaaaaaaatctatgtcggtgcggagaaagaggtaatgaaatggcaggaattcgatatcagctatcatacct

SEQ ID NO: 5245 - protein, 11 aa, Homo sapien
MKWQEFDISYH

SEQ ID NO: 5246 - DNA, 572 bp, Homo sapien
aacaactttcttttattaaaaatgtacataagtaaaaggaacgtggtttaattgtgcaaagagtaagaaatacagatgagcaaataacacgtattaaagccacctacgatataccacccagaagtaaccaggctgttgaatttttagagactggggtgcaaacacattttttcactcccttgtgcatatatctgggagctctgccatatacagacacagacgcggtgtccacaggcgatgcctctgctgggaatgctgcaagcaggagtctatcctttcctggtactggctcgggggccctcctcagcgcccaggtcactctagcatccaggagtccaaaggcccggctgtgcaggctgcagaggtgatcttggtgtgttttcctccaataggctacaaactctggcacccatggctggtggctggcattcaactctccagcagccagggagtccattttcttgtttctctgctggccatcctcaggacttgcggcggggagtggggggcccagggtgtgctgccacctcgcccggcgcgggttgcggccccagggcccgcgctccaggctg

SEQ ID NO: 5247 - DNA, 356 bp, Homo sapien
cgcttcggggagaaggtggctgcggctgctggggccgctgcgccggcggcggttcccgatgtggaggtccgtcttgggtggggaggcacccaggtcgctggttcgatgcagaggaagaaaccacacctagcacgtaaagccctgaaaaaatagaggtgtacagtagagttttccagaggctacatgacatgcagtatcacaacggaagcaaatataagaacccacctgtctcctgttaaaatgcaaaatgtaaaacaataccactttgctaactgtttttgtttggggaaatatagttcataaaaatatttatgttaacatgtaatttaggttaaaataaattaataaatatttgt

SEQ ID NO: 5248 - protein, 39 aa, Homo sapien
MTCSITTEANIRTHLSPVKMQNVKQYHFANCFCLGKYSS

SEQ ID NO: 5249 - DNA, 3653 bp, Homo sapien
agcccagcattcatggcgcagccatctcttgtacttgctagcaaaacaccacctgtggaaagtcagctcaaacttccaacctcatccctcacaaagggggaatggagggtttggttttggctttcactggagtctgcaacaagaactggcatcatgctgcccatttcccgcctctccccacccagacccctgcctcagggacgcctgtcctcagcccagccctcagctgcagccaggccttcagcctccgtaacccccgctcagggtccccaccccctgcagccctgtccctccagatgcatggccttgtcctgtgtgggggtggccgagagcactgccccagccctgggtaccttgggcaggaagctggcagaggccagggctgccattcaaacaggggcaggtggttttgccaggaggaagttgacagttcaacttcaaacatgggtgacgcaggccccacactgcctgctccccgtcccacccctccctgagacacgccaccccgccctctccctctctgagagcgagatacccggccagacaccctcacctgcggtgcccagctgcccaggctgaggcaagagaaggccagaaaccatgcccatggggtctctgcaaccgctggccaccttgtacctgctggggatgctggtcgcttcctgcctcggacggctcagctggtatgacccagatttccaggcaaggctcacccgttccaactcgaagtgccagggccagctggaggtctacctcaaggacggatggcacatggtttgcagccagagctggggccggagctccaagcagtgggaggaccccagtcaagcgtcaaaagtctgccagcggctgaactgtggggtgcccttaagccttggccccttccttgtcacctacacacctcagagctcaatcatctgctacggacaactgggctccttctccaactgcagccacagcagaaatgacatgtgtcactctctgggcctgacctgcttagaaccccagaagacaacacctccaacgacaaggcccccgcccaccacaactccagagcccacagctcctcccaggctgcagctggtggcacagtctggcggccagcactgtgccggcgtggtggagttctacagcggcagcctggggggtaccatcagctatgaggcccaggacaagacccaggacctggagaacttcctctgcaacaacctccagtgtggctccttcttgaagcatctgccagagactgaggcaggcagagcccaagacctaggggagccacgggaacaccagcccttgccaatccaatggaagatccagaactcaagctgtacctccctggagcattgcttcaggaaaatcaagccccagaaaagtggccgagttcttgccctcctttgctcaggtttccagcccaaggtgcagagccgtctggtggggggcagcagcatctgtgaaggcaccgtggaggtgcgccagggggctcagtgggcagccctgtgtgacagctcttcagccaggagctcgctgcggtgggaggaggtgtgccgggagcagcagtgtggcagcgtcaactcctatcgagtgctggacgctggtgacccaacatcccgggggctcttctgtccccatcagaagctgtcccagtgccacgaactttgggagagaaattcctactgcaagaaggtgtttgtcacatgccaggatccaaaccccgcaggcctggccgcaggcacggtggcaagcatcatcctggccctggtgctcctggtggtgctgctggtcgtgtgcggcccccttgcctacaagaagctagtgaagaaattccgccagaagaagcagcgccagtggattggcccaacgggaatgaaccaaaacatgtctttccatcgcaaccacacggcaaccgtccgatcccatgctgagaaccccacagcctcccacgtggataacgaatacagccaacctcccaggaactcccgcctgtcagcttatccagctctggaaggggctctgcatcgctcctccatgcagcctgacaactcctccgacagtgactatgatctgcatggggctcagaggctgtaaagaactgggatccatgagcaaaaagccgagagccagacctgtttgtcctgagaaaactgtccgctcttcacttgaaatcatgtccctatttctaccccggccagaacatggacagaggccagaagccttccggacaggcgctgctgccccgagtggcaggccagctcacactctgctgcacaacagctcggccgcccctccacttgtggaagctgtggtgggcagagccccaaaacaagcagccttccaactagagactcgggggtgtctgaagggggccccctttccctgcccgctggggagcggcgtctcagtgaaatcggctttctcctcagactctgtccctggtaaggagtgacaaggaagctcacagctgggcgagtgcattttgaatagttttttgtaagtagtgcttttcctccttcctgacaaatcgagcgctttggcctcttctgtgcagcatccacccctgcggatccctctggggaggacaggaaggggactcccggagacctctgcagccgtggtggtcagaggctgctcacctgagcacaaagacagctctgcacattcaccgcagctgccagccaggggtctgggtgggcaccaccctgacccacagcgtcaccccactccctctgtcttatgactcccctccccaaccccctcatctaaagacaccttcctttccactggctgtcaagcccacagggcaccagtgccacccagggccctgcacaaaggggcgcctagtaaaccttaaccaacttggttttttgcttcacccagcaattaaaagtcccaagctgaggtagtttcagtccatcacagttcatcttctaacccaagagtcagagatggggctggtcatgttcctttggtttgaataactcccttgacgaaaacagactcctctagtacttggagatcttggacgttacacctaatcccatggggcctcggcttccttaactgcaagtgagaagaggaggtctacccaggagcctcgggtctgatcaagggagaggccaggcgcagctcactgcggcggctccctaagaaggtgaagcaacatgggaacacatcctaagacaggtcctttctccacgccatttgatgctgtatctcctgggagcacaggcatcaatggtccaagccgcataataagtctggaagagcaaaagggagttactaggatatggggtgggctgctcccagaatctgctcagctttctgcccccaccaacaccctccaaccaggccttgccttctgagagcccccgtggccaagcccaggtcacagatcttcccccgaccatgctgggaatccagaaacagggaccccatttgtcttcccatatctggtggaggtgagggggctcctcaaaagggaactgagaggctgctcttagggagggcaaaggttcgggggcagccagtgtctcccatcagtgccttttttaataaaagctctttcatctatagtttggccaccatacagtggcctcaaagcaaccatggcctacttaaaaaccaaaccaaaaataaagagtttagttgaggag

SEQ ID NO: 5250 - protein, 695 aa, Homo sapien
  unsure 193: unknown amino acid
SPAFMAQPSLVLASKTPPVESQLKLPTSSLTKGEWRVWFWLSLESATRTGIMLPISRLSPPRPLPQGRLSSAQPSAAARPSASVTPAQGPHPLQPCPSRCMALSCVGVAESTAPALGTLGRKLAEARAAIQTGAGGFARRKLTVQLQTWVTQAPHCLLPVPPLPETRHPALSLSESEIPGQTPSPAVPSCPGXGKRRPETMPMGSLQPLATLYLLGMLVASCLGRLSWYDPDFQARLTRSNSKCQGQLEVYLKDGWHMVCSQSWGRSSKQWEDPSQASKVCQRLNCGVPLSLGPFLVTYTPQSSIICYGQLGSFSNCSHSRNDMCHSLGLTCLEPQKTTPPTTRPPPTTTPEPTAPPRLQLVAQSGGQHCAGVVEFYSGSLGGTISYEAQDKTQDLENFLCNNLQCGSFLKHLPETEAGRAQDLGEPREHQPLPIQWKIQNSSCTSLEHCFRKIKPQKSGRVLALLCSGFQPKVQSRLVGGSSICEGTVEVRQGAQWAALCDSSSARSSLRWEEVCREQQCGSVNSYRVLDAGDPTSRGLFCPHQKLSQCHELWERNSYCKKVFVTCQDPNPAGLAAGTVASIILALVLLVVLLVVCGPLAYKKLVKKFRQKKQRQWIGPTGMNQNMSFHRNHTATVRSHAENPTASHVDNEYSQPPRNSRLSAYPALEGALHRSSMQPDNSSDSDYDLHGAQRL

SEQ ID NO: 5251 - DNA, 3903 bp, Homo sapien
  Unsure 2323: Unknown base
gcccttttgagtacctctgtccaggactgaagacgaaccttggccgcagtccttgcgaactgttcgcaaaacagtgcgggctgcggtgggtcagcgtcacatgctaatgacaggatgttcctcgtagctttttattttgtgcgtcttatgtttgtatagtgtgttgtcattttgattttttttttttttttaagtataaaagctgcttagaatagttctatcatgaagggcacttttcagattgtgggctggaaagggttattttatctgtgggggagggagggagacgtgaagcctatttaaaatgagcctgtgacgattatgcacatgaccagaggcggccggtaatcagggcagagtctggtgtggaccgccgggcgcagagcggctccgcggcgggagctgagcggaaggcgcgggctgcgatctgctctctgttcccctggatccgcctatgcacattacccttgtttcattactttttcatgtcatttttttatcccaaaaaatattttttaaaagttaaaaaaagacatatcaaacatgcaaatacttgaatccagcaggccaatagtgaaatgtgaacactttctaattctacacttccaggttgacatcagtacacagaaacaggctctaggaaaaatttctaagttcatagcctacgtgtgtgtatgtgtgcgtgttgaaacagaagtgtgtgtgtgtgtgcatgtgtggcgcgtgctcctgcacggcgtgcagttttctgtgtttgtgtgtttgaaagcgtgtgaggatttaactgtgggttttcccttgtattcagtatacgctttttttttggcgcattggtcaaacggttgttattattagcttctaactttgcactgagtgtcctcgcccttcctttagctaatcctatacattacagagaattcctaggacagggctggcgacaattcatgtgtaaatgtttactcaaggactctgtgactgcgtttaaaaagtacagtgtatatctctggagaaataacatgtatacctacctttagcagctttttattgtggactaatgcaagaaaattattaccagagtattgcaccatttttccatttggaatataaagttaaagagaaaaaaaaaaaaaactgttgttgaactgtggccatagatacttgtaaagaatggatggttccgtggaaggaacagaaacaagcacttgggcgtgggttgtgactgcttttgggggagcctggggtttgggctcccacctgtttacagacctttttttctccttcagactttaaaattttaaaaatttaaaaaggaattaaaaaaaaaaaaagacttccgtcgtaaagaaacctattttcagaatgcagatgcgttccttcagagctctgggacgggacagtgttgttccctcggccatcgtcgtggactctgtcgattgctttcgccccttcgtcaaggtgacaggcgttgtggccactgtcttgcacatgccggacgcgctctcaggaaagccagggctcccgagggcagctccacaccatttcatgtatttttaaacccaactcctagcactgaagatgttatttaaaaaaaaaaaaaacaaaacaaaacaaaaaaatgaaaaaaaagaaaaagaggaaaaaaaaacacaaagaagaaaaatacctaatctctaatgtgtagcagttacatatttaccaaataatggactcaaaagaaatagatgtttgaagagtgctttatatattaaaaattgctttatgttttaaaaatgatcaatgttttgattgttttgcaaggaagaaagacaatggaataacataccttcaagtatgttttaaaaaatatatatatgaacattgtgctccctgcctgcttgatcaggaaacttgtgcattacatttttttaattagctttttaatggttttatcaaaacaaaaaaaatacaaaagaaaaaataaaaagtcctgcaagactgcagatccacaaaagctggttttatagaggatcatgaactatgcacaaactgggttcaagactttttttctcaagtttagtaggatatttagaaaaaccaaccttcctcagagtgactgcatctcattgccattacatgcgttctatatattcgatggacatacacctgcgtatgtatatccaatatgtgtgcgtgtgagcatgcgtgtgcgtatgtgcgtccgacataccacttcccgtgctgccggcgagcattgagttgtagaaaaactgttgttttaaaattggggatggaagtcaggatattttgtcttttttgggtttggtgggtttgaggggttttttgnttgtttgttttttgttttttttaccttttattttgaacttaatatgtctgtaactctgagattaaacaacaagttcgtggctcttaatgttttcctcatagaatgtgactgttgaagaacatgcatcgaaagttgctttcgaaagtacaacgctttattgaatcttaataaattgcaatttttttcttggctgttcaaagtaatgtgtttttcatttttcaaaagacactatggatgtctactttgcacgctgcgattgggagagctgtcccgctgcatgcgttccctctgtaatttcctcagagctcacatacgtacctctctcacgagtgaactcagattttccattgttttgctttattctatcatttgctttgtggttttgctgtaaatattgaaatcttaatcatcatcgagaggcacagccaagctttccagctctccacccccgtggcccatccaagtctgttcatctggtaacttctgttgtctgggacggcagcaagaagatgccggggcttgcctggagtcctggcagaggagtgccactcacttttgcctagggtccagttggggcttaaaaaatatttggagagaagagtaatgaggattttttgtgtttcctagacattttatgcatctatttttgtaaaatcaccttcgctaactttcaccaagcactttgagcacagtggaacttcagaagcacaaccagcctaaccccagaatctcaggtggcacagctagaaattgagtcccttcctaggacactggccgtggccttcagggtgaccagtcagtgccaccgggttggcattggtgttacagacaggcctctgaagacaaaccgagcaccccagcggcccctcaaactaagcaaggatcttttttctgtctgcgctccctggggcaaggtcaaaggtggacccgcccactgtgggtcaattccttcgaaaagatgggacccgcacccccgccacaggctggcccccccccacccatggggaaggtggtgtgctgctggctctgaccatactcttttggaaattgagaaggaaagcattgagtgggacctaatccggagaagaaattaaagaccagaaaaagaaggaagctgggaatgaaactcaaaatgcacttgaacctggaagcggcaaccctcagctctgcgcggccgagcctcagcaagagttcgttttgtgcctgagttactactacaggggcaaactgtacccgtgcctgtgcgctgggagaacaaggtcagcgcccaagggtgtgcaaaggatgtggcaggcttcatggaggaggtggcatttgccctgggcctgggagaccaggttggattttgacagactgggaactcgggggacaggagggcagcacagtgtaagctaaagccctgtgtagggaccccacgcaaagacctcgtgggcctgggtgtccagggcaccatttccacccatgggtgaaaaagaggcttgaggaagacaacaggttcttcacctgcatctgtggatatatatttttttaagtttattaaatttttttttaaatggcagtttcagacctgccctttgtgg

SEQ ID NO: 5252 - protein, 34 aa, Homo sapien
PFEYLCPGLKTNLGRSPCELFAKQCGLRWVSVTC

SEQ ID NO: 5253 - DNA, 629 bp, Homo sapien
  Unsure 263-288: Unknown base
ttttaactccgggctgagaacggaagtcaagttcagattctcttccttcctcaagcaagccaaaaaattaaagagcaaacacagaggccctaaatgtctcgaggcctcttcacctgtggcgatcgacgcagcaagcctgggtgtgctaagaattgaggctctctctccttcattccgggggttacgggtggccttggagcaccgggaagaattaaccggtgcctaagttttcaatcggatcattcttctcaacttgggcggcnnnnnnnnnnnnnnnnnnnnnnnnnnggcccggcacacacggcggggcagtgccagcgcgggcagcaggctgggcccgagggcagcgctgccgcagccgggagcccctcagagtgtggggcgcgggctgccccccgcgcggacaccgggcaggggccgcagatctgtccccgccgccaggcgtggggaccgcgaaggggcagccgcggcggggcggaggggcggggtgagcacttcctgactctcgcattgtccacgcaccgcccgcgccacccagggccccgccaccgcgccgtccccgtcggggaggaagttggcgctcgccccgccagccccgtcttaccgtttttggcatcgcccgcggccgc

SEQ ID NO: 5254 - protein, 208 aa, Homo sapien
  unsure 88: unknown amino acid
  unsure 89: unknown amino acid
  unsure 90: unknown amino acid
  unsure 91: unknown amino acid
  unsure 92: unknown amino acid
  unsure 93: unknown amino acid
  unsure 94: unknown amino acid
  unsure 95: unknown amino acid
  unsure 96: unknown amino acid
FNSGLRTEVKFRFSSFLKQAKKLKSKHRGPKCLEASSPVAIDAASLGVLRIEALSPSFRGLRVGLGAPGRINRCLSFQSDHSSQLGRXXXXXXXXXGPAHTAGQCQRGQQAGPEGSAAAAGSPSECGARAAPRADTGQGPQICPRRQAWGPRRGSRGGAEGRGEHFLTLALSTHRPRHPGPRHRAVPVGEEVGARPASPVLPFLASPA

SEQ ID NO: 5255 - DNA, 1443 bp, Homo sapien
catggccgccccgccgcgccccgcgccatcgccccccgccccgcggcgcctcgacacgagcgacgtcctgcagcagatcatggccatcaccgaccagagcctggacgaggcacaggccagaaagcatgctctgaattgccatcggatgaagcctgctctgttcagcgtgctctgtgagatcaaggaaaagacagtggtaagcatccgtggcattcaagacgaagatccccctgacgcccagctcctgaggctggataacatgctgctggctgagggcgtgtgcaggcccgagaagagaggaagaggaggagcggtggccagggccggcacagcaacaccaggtggctgtccaaatgacaatagcattgagcactctgactacagggccaagctgtcccagatccgacagatttaccactctgagctagagaaatatgaacaggcctgtcgtgagttcaccacgcacgtcaccaacctcctccaggagcagagcaggatgaggcctgtctcccctaaggagattgagcgcatggtcggcgccattcacggcaagttcagcgccatccagatgcagttgaagcagagcacctgtgaggcagtgatgaccctgcgttcgcggctgctcgatgccaggcgcaagcggcggaatttcagcaagcaggcgacggaagtgctgaatgagtatttttactcccatctgaacaacccttaccccagcgaagaagccaaagaagagctggccaggaagggcggcctcaccatctcccaggtctctaactggtttggcaacaaaagaatccggtataaaaagaacatggggaagtttcaagaagaggctaccatttacacgggtaaaacggctgtggataccacggaagttggggtcccagggaaccacgccagctgcctgtcaacacctagctccggctcctctggacccttcccgctgcccagcgctggggacgccttcctcaccctgcggactctggcctctctccagcctcctcctgggggaggctgcctgcagtcccaggcccagggtagctggcagggggccaccccccaacctgcaactgcctcacctgctggagaccctggcagcatcaactccagtacatctaattaagtttgggggataagcaggaaagagcgctgcgtgagctgccatgtatcgccagccgttgctttgttactgaacgtgccgccgacgacctcagaaaacccagatgggtggtggtgcccatgagcccctgctcctcagccaggcccgtggcgccggctcatgtgtctgctgcgactcgagatggcctgaaacgccactcattctcccacttcagttcgtttttttgacagtaattttatggtaacgctatgaattgaattgtctgttctaggactgggcacagattttcccattaaaatttttgacttattttaaaaaaa

SEQ ID NO: 5256 - protein, 374 aa, Homo sapien
MAAPPRPAPSPPAPRRLDTSDVLQQIMAITDQSLDEAQARKHALNCHRMKPALFSVLCEIKEKTVVSIRGIQDEDPPDAQLLRLDNMLLAEGVCRPEKRGRGGAVARAGTATPGGCPNDNSIEHSDYRAKLSQIRQIYHSELEKYEQACREFTTHVTNLLQEQSRMRPVSPKEIERMVGAIHGKFSAIQMQLKQSTCEAVMTLRSRLLDARRKRRNFSKQATEVLNEYFYSHLNNPYPSEEAKEELARKGGLTISQVSNWFGNKRIRYKKNMGKFQEEATIYTGKTAVDTTEVGVPGNHASCLSTPSSGSSGPFPLPSAGDAFLTLRTLASLQPPPGGGCLQSQAQGSWQGATPQPATASPAGDPGSINSSTSN

SEQ ID NO: 5257 - DNA, 1992 bp, Homo sapien
ttttggtgactgcaaaggacagagaacctttccactttggccatactgggttgctaagccggagccatttcagctcctggctcctcaagataacggcgagtccagtgccatcttggagaagctccaggggcagggctgacttttctcctacaggaggaacaatgtggggatctgagggatgggagggagacttccccctagagtggtggtcctgctgggggctcatatccagggacccaaaaggggggctgtgtaggaggttccacattggaggggctctctctctcgcagctgtcagagttggtcctggctgtggcgtccaaacagcttgagggaaaaagatcctgtctaaccacctcatctactactcaagttctttctgaaggagggatttcttcagttaaccatggacagtgaggtttctcaccacagtaacttgagtccaggttgagggggagacagatctgtggtaaatctctgacttgggcagcacactgagtgtggaaccccacaggactccttagggaaggagcttgtgtgtgaaagaacccctggggctgagctggtgacctccatgtgtgggtgcagcagggtcttggatggtgccaattgatctggacagcctgttgatgcttttctacttccacccttcggcctggccccactgagccccatcaaggtgcctgaagaggggtccagtgagatcccgtggccacagggactccagaggcatctctgcaggaagcacaccatgccttccctccatgttccatcacggcgccacaatctgtgtcccttaacttctcagggtcaaagacaaaggcaagcgttgctgaattttctctttaatggccattggaagagtctggttcagtttttcccaactctcttcccactcgtatttggggcctctgggttttctgaaggcacaaggactgtgactttgtaccactaacctgtggttcaaacctgggtgtgtttctggcatctccctaacccagatcagcaatggccaccctgctcctctgaggtcagcagaagactgggaagcagaggtgagggatgcaggccacactggaatgggaagtcttttccccactggatgtgcctgtctggtgggttttggaccttcccagactacatctctaggagaggcctgtttggagtagtacactgagagaccctggcctcttctgctggaagactgtccaagtcttggggtttcttgagctggtgattcctctgccatcctgctctctctcttcatctcaggcagcatggggtccacttttgtccccaaacctaatgttttaatccaaatgcaaattggttccacatttttactggagggtaatcagtttttaaaattcacacacatgtaatcgaaacgcaatactataaagttctactggtgagactcctgaactcagtctgttttcttagtaaaatccagcaccttccttctcttcattctttgtatcactgtggctttaaactgtcttcaagttattcctcctcatcacctccattgttttatcttcacccccttaacatccacagaaacagactggagttcttgaatgttttagcttcaacttctacatgtgcccactttgctttgttaatgctaccacagctgtgctgaatgaagcctgtttcccaggcagagatcctgccactctggatgggaagataaaatgcagggtcctctttcctggtttcctgggaacatcaagggacaggtgaccagcttggaactctttgatgacttggaaggaggaagatggtctggctgatctgtggtgagaaggtcctttgcacaaggcctggcctagaggacgcagccacgaccccagcgcttggccatctctgtagaggattcgcgggtggaccatgcttagtctaacagggtatggttattaacgcccgttatgaacggttcataaccagccaacggttatgaactgtggagggcttccgcaatcccaccac

SEQ ID NO: 5258 - protein, 109 aa, Homo sapien
LVTAKDREPFHFGHTGLLSRSHFSSWLLKITASPVPSWRSSRGRADFSPTGGTMWGSEGWEGDFPLEWWSCWGLISRDPKGGLCRRFHIGGALSLAAVRVGPGCGVQTA

SEQ ID NO: 5259 - DNA, 323 bp, Homo sapien
ccaaagtgctggattacaggtgtgagccagtgcgcctagcccaccatgcctcacttttagcgcagtgtgatcctacacaaattgccctgtgtatattccaagggacgatctgggtttgtagggccagaaacacgtgcagttctggggtagcggggaggtggtcggtggctcttttaacaaaaaaataccaaatgatgaaaacaaaattaagttcagggccttgggcaggtcctgcaagttaggggcctagaagctgaaatttcattaacatctactagtggtaaatccgcttctcctacatgccagtgccctctgggaaaaaa

SEQ ID NO: 5260 - protein, 79 aa, Homo sapien [sequence omitted]

SEQ ID NO: 5261 - DNA, 2192 bp, Homo sapien
ggggcggagagaggcgagcaccgggaaggggagcgtggggccgctggaatgggtgaatttaaggtccatcgagtacgtttctttaattatgttccatcaggaatccgctgtgtggcttacaataaccagtcaaacagattggctgtttcacgaacagatggcactgtggaaatttataacttgtcagcaaactactttcaggagaaatttttcccaggtcatgagtctcgggctacagaagctttgtgctgggcagaaggacagcgactctttagtgctgggctcaatggcgagattatggagtatgatttacaggcgttaaacatcaagtatgctatggatgcctttggaggacctatttggagcatggctgccagccccagtggctctcaacttttggttggttgtgaagatggatctgtgaaactatttcaaattaccccagacaaaatccagtttgaaagaaattttgatcggcagaaaagtcgcatcctgagtctcagctggcatccctctggtacccacattgcagctggttccatagactacattagtgtgtttgatgtcaaatcaggcagcgctgttcataagatgattgtggacaggcagtatatgggcgtgtctaagcggaagtgcatcgtgtggggtgtcgccttcttgtccgatggcactatcataagtgtggactctgctgggaaggtgcagttctgggactcagccactgggacgcttgtgaagagccatctcatcgctaatgctgacgtgcagtccattgctgtagctgaccaagaagacagtttcgtggtgggcacagccgagggaacagtcttccattttcagctggtccctgtgacatctaacagcagtgagaagcagtgggtgcggacaaaaccgttccagcatcacactcatgacatgcgcactgtggcccacagcccaacagcgctgatatctggaggcactgacacccacttagtctttcgtcctctcatggagaaggtggaagtaaagaattacgatgccgctctccgaaaaatcacctttccccaccgatgtctcatctcctgttctaaaaagaggcagcttctcctcttccagtttgctcatcacttagaactttggcgactgggatccacagttgcaacaggcaagaatggggatactcttccactctctaaaaatgcagatcatttactgcacctaaagacaaagggtcctgagaacattatctgtagctgtatctccccatgtggaagttggatagcctattctacagtttctcggttttttctctatcggctgaattatgaacatgacaacataagcctcaaaagggtttccaaaatgccagcattccttcgctctgcccttcagattttgttttctgaagattcaacaaagctctttgtagcatcaaatcaaggagctctgcatattgttcagctgtcaggaggaagcttcaagcacctgcatgctttccagcctcagtcaggaacagtggaggccatgtgtcttttggcagtcagtccagatgggaattggctagctgcatcaggtaccagtgctggagtccatgtctacaacgtaaaacagctaaagcttcactgcacggtgcctgcttacaatttcccagtgactgctatggctattgcccccaataccaacaaccttgtcatcgctcattcggaccagcaggtatttgagtacagcatcccagacaaacagtatacagattggagccggactgtccagaagcagggctttcaccacctttggctccaaagggatactcctatcacacacatcagttttcatcccaagagaccgatgcacatccttctccatgatgcctacatgttctgcatcattgacaagtcattgccccttccaaatgacaaaaccttactctacaatccatttcctcccacgaatgaatcagatgtcatccggaggcgcacagctcatgcttttaaaatttctaagatatataagcctctactcttcatggatcttttggatgaaagaacactcgtggcagtagaacggcctctggatgacatcattgctcagctcccaccacccattaaaaagaagaaatttggaacctaaaacagggcactgtctgtgtccttccttgaactgtctaccctgttgcttttcacaaatcatggtaataaaacaagttattcttg

SEQ ID NO: 5262 - protein, 686 aa, Homo sapien
MGEFKVHRVRFFNYVPSGIRCVAYNNQSNRLAVSRTDGTVEIYNLSANYFQEKFFPGHESRATEALCWAEGQRLFSAGLNGEIMEYDLQALNIKYAMDAFGGPIWSMAASPSGSQLLVGCEDGSVKLFQITPDKIQFERNFDRQKSRILSLSWHPSGTHIAAGSIDYISVFDVKSGSAVHKMIVDRQYMGVSKRKCIVWGVAFLSDGTIISVDSAGKVQFWDSATGTLVKSHLIANADVQSIAVADQEDSFVVGTAEGTVFHFQLVPVTSNSSEKQWVRTKPFQHHTHDMRTVAHSPTALISGGTDTHLVFRPLMEKVEVKNYDAALRKITFPHRCLISCSKKRQLLLFQFAHHLELWRLGSTVATGKNGDTLPLSKNADHLLHLKTKGPENIICSCISPCGSWIAYSTVSRFFLYRLNYEHDNISLKRVSKMPAFLRSALQILFSEDSTKLFVASNQGALHIVQLSGGSFKHLHAFQPQSGTVEAMCLLAVSPDGNWLAASGTSAGVHVYNVKQLKLHCTVPAYNFPVTAMAIAPNTNNLVIAHSDQQVFEYSIPDKQYTDWSRTVQKQGFHHLWLQRDTPITHISFHPKRPMHILLHDAYMFCIIDKSLPLPNDKTLLYNPFPPTNESDVIRRRTAHAFKISKIYKPLLFMDLLDERTLVAVERPLDDIIAQLPPPIKKKKFGT

SEQ ID NO: 5263 - DNA, 679 bp, Homo sapien
attaatttatattttcagtacgatacatatcatccccccatactaaacaaatcaacccaaaaattttgatttcgcttaatttcgcctaacaaatatctaacatgtatatagcactttatagattaagtgtgttactattttctgtgcagtgggcaggaattataacttctacagatggaaaatggtctcttattgagaagttttttgtcaaaagataaccgtcaaaaggattcatgtccgggtttcatcactgtgtagtcccatactgtttatcactccatcacaatttgaaggctgtctgaaatatccatgaactccactggtaattcatggagttcaactctcttaaccaccctcctccctgacccatgatttttaccctaacagccatgagagtttccaaaaatgttatgttttacttttctagtgtatgtcaaaagacattttgtactgttttaaaattactattcttgctattcaaagaataaaaagtattgtttttcagatgatgggtggatcatgctataaaatggtaacaaagttttggaaataatagctttagattattccaaaaagaaaaaaaagaaagcctttcttgagtataaattgtttttatgagttcaaggttacattggcctcatcttaataattagcgatgattcagatattttggaatagc

SEQ ID NO: 5264 - protein, 22 aa, Homo sapien
INLYFQYDTYHPPILNKSTQKF

SEQ ID NO: 5265 - DNA, 6906 bp, Homo sapien; identical to SEQ ID NO: 1100

SEQ ID NO: 5266 - protein, 2214 aa, Homo sapien
MATRSSRRESRLPFLFTLVALLPPGALCEVWTQRLHGGSAPLPQDRGFLVVQGDPRELRLWARGDARGASRADEKPLRRKRSAALQPEPIKVYGQVSLNDSHNQMVVHWAGEKSNVIVALARDSLALARPKSSDVYVSYDYGKSFKKISDKLNFGLGNRSEAVIAQFYHSPADNKRYIFADAYAQYLWITFDFCNTLQGFSIPFRAADLLLHSKASNLLLGFDRSHPNKQLWKSDDFGQTWIMIQEHVKSFSWGIDPYDKPNTIYIERHEPSGYSTVFRSTDFFQSRENQEVILEEVRDFQLRDKYMFATKVVHLLGSEQQSSVQLWVSFGRKPMRAAQFVTRHPINEYYIADASEDQVFVCVSHSNNRTNLYISEAEGLKFSLSLENVLYYSPGGAGSDTLVRYFANEPFADFHRVEGLQGVYIATLINGSMNEENMRSVITFDKGGTWEFLQAPAFTGYGEKINCELSQGCSLHLAQRLSQLLNLQLRRMPILSKESAPGLIIATGSVGKNLASKTNVYISSSAGARWREALPGPHYYTWGDHGGIITAIAQGMETNELKYSTNEGETWKTFIFSEKPVFVYGLLTEPGEKSTVFTIFGSNKENVHSWLILQVNATDALGVPCTENDYKLWSPSDERGNECLLGHKTVFKRRTPHATCFNGEDFDRPVVVSNCSCTREDYECDFGFKMSEDLSLEVCVPDPEFSGKSYSPPVPCPVGSTYRRTRGYRKISGDTCSGGDVEARLEGELVPCPLAEENEFILYAVRKSIYRYDLASGATEQLPLTGLRAAVALDFDYEHNCLYWSDLALDVIQRLCLNGSTGQEVIINSGLETVEALAFEPLSQLLYWVDAGFKKIEVANPDGDFRLTIVNSSVLDRPRALVLVPQEGVMFWTDWGDLKPGIYRSNMDGSAAYHLVSEDVKWPNGISVDDQWIYWTDAYLECIERITFSGQQRSVILDNLPHPYAIAVFKNEIYWDDWSQLSIFRASKYSGSQMEILANQLTGLMDMKIFYKGKNTGSNACVPRPCSLLCLPKANNSRSCRCPEDVSSSVLPSGDLMCDCPQGYQLKNNTCVKEENTCLRNQYRCSNGNCINSIWWCDFDNDCGDMSDERNCPTTICDLDTQFRCQESGTCIPLSYKCDLEDDCGDNSDESHCEMHQCRSDEYNCSSGMCIRSSWVCDGDNDCRDWSDEANCTAIYHTCEASNFQCRNGHCIPQRWACDGDTDCQDGSDEDPVNCEKKCNGFRCPNGTCIPSSKHCDGLRDCSDGSDEQHCEPLCTHFMDFVCKNRQQCLFHSMVCDGIIQCRDGSDEDAAFAGCSQDPEFHKVCDEFGFQCQNGVCISLIWKCDGMDDCGDYSDEANCENPTEAPNCSRYFQFRCENGHCIPNRWKCDRENDCGDWSDEKDCGDSHILPFSTPGPSTCLPNYYRCSSGTCVMDTWVCDGYRDCADGSDEEACPLLANVTAASTPTQLGRCDRFEFECHQPKTCIPNWKRCDGHQDCQDGRDEANCPTHSTLTCMSREFQCEDGEACIVLSERCDGFLDCSDESDEKACSDELTVYKVQNLQWTADFSGDVTLTWMRPKKMPSASCVYNVYYRVVGESIWKTLETHSNKTNTVLKVLKPDTTYQVKVQVQCLSKAHNTNDFVTLRTPEGLPDAPRNLQLSLPREAEGVIVGHWAPPIHTHGLIREYIVEYSRSGSKMWASQRAASNFTEIKNLLVNTLYTVRVAAVTSRGIGNWSDSKSITTIKGKVIPPPDIHIDSYGENYLSFTLTMESDIKVNGYVVNLFWAFDTHKQERRTLNFRGSILSHKVGNLTAHTSYEISAWAKTDLGDSPLAFEHVMTRGVRPPAPSLKAKAINQTAVECTWTGPRNVVYGIFYATSFLDLYRNPKSLTTSLHNKTVIVSKDEQYLFLVRVVVPYQGPSSDYVVVKMIPDSRLPPRHLHVVHTGKTSVVIKWESPYDSPDQDLLYAIAVKDLIRKTDRSYKVKSRNSTVEYTLNKLEPGGKYHIIVQLGNMSKDSSIKITTVSLSAPDALKIITENDHVLLFWKSLALKEKHFNESRGYEIHMFDSAMNITAYLGNTTDNFFKISNLKMGHNYTFTVQARCLFGNQICGEPAILLYDELGSGADASATQAARSTDVAAVVVPILFLILLSLGVGFAILYTKHRRLQSSFTAFANSHYSSRLGSAIFSSGDDLGEDDEDAPMITGFSDDVPMVIA

SEQ ID NO: 5267 - DNA, 5388 bp, Homo sapien
  Unsure 1818-1839: Unknown base
  Unsure 3706-3726: Unknown base
  Unsure 4193-4217: Unknown base
gacctcttccccccaccttgtaattttgcttttttaatttcggtatttaaatacttttttttttttttaagcatcaatgtagtagtactctgggccgaacaggggtcaacgtttaatctacagttatcaccaacatgtatgtacttatgtcggaatcaaaatgtatcaaactgcttattgtgaagagaattatagcagacctgaagggggcgaaaaaccagatagggtggggggatggatgccggtgacgtgctagcacttgtgtggacatcccagtctgcattatgctgtttaacataaagtgccgacattttgtaccagcaaatacctgcccattccaacccttggtgggagcagacctctactgtcctctgtaacttgctgctattgaggacaagggagtttttctttctttagcgtcttcagtgaaggatacaatacaacaatgcctaatgtatttgactttttagcttgtgtctgtgtgtataggaaaagcctaaaacaagttatttgcatttcagtggttttgtgagacaaagaatgggaaattctgtagcccttctggcttaccctgttgattataaacctagcctcaaaagagattgacaggcatgactcaagtgagtgttcacatatacaagcctgcatgagccctctgtgggtaggtggtcacacttggcatctgcagcattgacgtggccccgctgggtgccttgagcatgccctcttcctgctctgcaatttgaatcaccaccgtgccccttccaccactgttccccatgcaaaagctctgcttccagcagcccccactgaccgctctctgtgtggagcaaagtgctgtcgtgcggtgaccaccaggtgaagagcagcttgtattcagacatctagagaaggttaaatcttagtgtccctgggccaggagcatatcccaaggctcctgcgagccagtggcgaccctgtccactgccgctcttggttcactgctgtgtcctgccccaccctcctctcctcctgcctgttggttccttgacctgcactatgggttagttgagttccttacgatactacggtgaaagccgggtgctagagcccctcttgtttacaagacataatgagggatttgaaatatgtaaaaataaacatgagaagctaaaatgttcttccatcataagcttaaagggaaaaaaactaaaaactttaaaaaaaaaagaccaaaaagtgcgtatatatatacatataaatatatattttagatgaagactaactctgggagcatttaacagtgttttttgtttctgtttttaacatttgttttcctgctttaaaatttgcaagcattctcaggaattctagggtaggaagccagttttttgaagatggtttatttaaccatatcttatcctagagagatggctgtttctttcctgttaataaacttttacaagttcctgaaacttcagaaagtttaaacaatttttacttaaaaaaatgtaaaaagaaaagtctccaaacattattgtcatactggggatcacacattttaaaacacatagaaatattttttaaaaattatcaatttagcagcaacaggtaaattcattatcttaaaaatatgggagaaggattaagctttgtaagagctcgatcatggattcttttgaaattgtgtgtagtttaatgggagagtgtttggtgtatatagatgagaatgccatcactttgttcctttccatttgagactgaactgaaatctcccctagtaatttttattttttttaaaggaacccttctccttgtccccacaaccccagcaacaannnnnnnnnnnnnnnnnnnnnncaacagcttaaaaaaaaaagtaatctgtaaaatagtacagttggattgctgagaatctatgtaaagagttaggagatataggttaataatttttggaacaaattttaaatataggcattactagaggaaaattatctatggactgtcctattaatgaagaatgtctgtcttacctccgtttgttttgggaggaggagaaaatatagaagaatctaataaggaacaagtgattttacttttttagctcccagctactgttgtgctcgttttaattgctgttttgaagatctgctgcttaattatccccatcccttagccggagatgtggagtgtttcctttcagtttttggtgatgttgaattcttttgtattccctcctggggccaggggtcagaattcccaagcatgaccacagcttcttttaaacattaagcttcccagtgggaaggaaactccagctcgacaggtaaagggagtgggtggggttgctgcctgcaatttctctaaaaccgctttagtgccttcgtacatacacccagacatcctgagcaagggggacgcacatgtgtgtgtgtgtggtccagtcactccacagatgtaagatactcacccataaaggaaattggagtggttctggacaggccccaaaggcagtgggctgaatttaaaataaataaacaaacgtcaagcaagttaatatgcttatgtctcagtaatgtagaatgccaagttccttcctgtgtcgtgtgccctccattactgtgcattgattcctccaggtgtgtaattgtgacaactgcagtgatttggaaagtctctttgtcttgggcaaatagaaggggttcctgttgttctgctcttgtccttcgtctcctccccttttcccccagacctcccccttctttttgtcaacttgctgggagctttgctttattggttggcagtgacctaagaacaggatatggtgaggatgtcatggaagagaagagctctttccgtggtattctttggcaagagccatgtctactaagaggttaggtgacttcagtatacttataaaattcagtgagagtgccttcttctcttctaccacactctggcatagatacaggcttgctggtcacctctcattacatagatttattttaaaaacattttgattatgttaatttgagctttcccttttttttttttaactactttttaaaacacttgattactagtggcttagaggtgtgtacatctcctgaacatcacaaacttggtttctacctaccacacgagtagccaaaagaaaagaagcactaatagagaaaggggtgtctcacaccagacagaggacctctgctgtcaattagatccagtatcatgacctaactttaagtgtggaaaagagttcagatctctgagacactgtgaagaaatggatggctcatgtaacatctctgatccctcagtccccaaccctggacgtgtttcatttacaacattcataggagttaacttagcagtgttgcaagttaaggttccaaaccaaattatttaatcagtgtccccccaataaatcacttatccatttattgctagttagttttatttatagcaacttgatttcctatgagtatggctcctgttgtaagaattttcccacctcttctgacatgaatgtagcataagttagcaatcggttcttccaaactcctgtgggttgaatatggtatagaaggtatgcaagaggaaaaagaaaggaaaagataaaactcctgcctgagaatttggaagcacctttattaacacatatatctcgcagaaactagaagctcataggctgttaactttttgcaactattcactcatttttaccacnnnnnnnnnnnnnnnnnnnnntgatttttgtaaggttaacagccagattccattttgacctcagatgctgtgtactttttaatttcattttttatattctgccatcttgactcttctctaaaacagaatgaaaatgtctgcatgctgagcaaaatgcttacgccaagcctgtttttctctgtagagtaaacaggatgttttcagcagacttggctctaatagccatctctaagattagggaacaattgagtctttatgtagaaaagatccattttttccccatcctcagagttaaaattcaacatttaaagctttatcggttattgttttagatttgagatttttgtttttaagtatctataagatctttagaagtgagataaatttttcgctggttaaaaaaaatcaaactttcctctgcagtgtttttgccaagttttgtcacacttcatgtgtatgcattaactatacttcttagtgttactgcnnnnnnnnnnnnnnnnnnnnnnnnnaaaaaagcctggttctttaatggtgtttttcctccgggttgagtgggacaactaaagccgcgtgatgatgcggatgaaaatattctgggtctggggtgtatacaatggaattggtcagtcttcagacctcagggtcgttaagaaaatagggaactcacaaaccctgctgcgcactacatttacttctttatctggcaagtacagggagtccatacagtcaagaaacacacagatacacataatgctattgaggacattggtcattctgtaagaaaacagaatattatctagatttccagagttagtgcagaccctgtgataacagtctgtgggtttgtggccagcgccaaaggtgtgtgtattttcagaaatggtccctatttgtcagtgatagtgttttttttttcttaagtttgacaaagggggtggtaatatcacattctttagatttgaaataattatcagctccaagaatctgtgaacatagtaataacaataaaaattcaacatcgaccctccctaacctgctcaccatacctccccaccccatgcctctgaagaaagaggccatgaacctacgaggtggtaaagggggacacaggtcagggagtggagagctactcctccagcagctcagcacccacactgcccgcatgcgtgtggccaccgggaccagatcccgagtgattgtggcatacccctaatatttgagtagtttttaagctgtcagtctcttgtcataacctcctaccgccacccaaaaaaagtaacgaaagttgcagtaactgccagtgtttgcctcaccaaatttaaatcgttcccttttcagttagctatatacctgaatttgtttttaacaagaaactgtacatggccaggaaaaatggtactaccttggccaaagggtctttgcaaaaagctcagtcttcagttcttcactgtgacaaatgcttatcttgttcatgggaggggaaagatcagataaataggcaagaagtactctgttttaaataaagaataaatagtgtccgtttaaagcactttgtgcctcaactttatttttaaactgtaaatcattgctttggaaataaattcccaattataattgacccatatctagccaatatcaacaagttgggatggttaagtaaaatactttatttcaaaaagg

SEQ ID NO: 5268 - protein, 60 aa, Homo sapien
DLFPPPCNFAFLISVFKYFFFFLSINVVVLWAEQGSTFNLQLSPTCMYLCRNQNVSNCLL

SEQ ID NO: 5269 - DNA, 3422 bp, Homo sapien
ggatgatactgatgagacactgacttcactgctcaatgaaattgcctttcttaatcaacaactaaatgatgactctgttggcctggctgaactacccagctctatggatacagagttcccaggggatgctcggcgggcttttattagtaaggttcctcctggaagcagagcaactttccaggttgagcacttgggaactggtttgaaagagttgcctgatgttcaaggggagagtgactctatcagtcccctcctcttgcacttggaagacgatgacttttctgagaatgaaaaacaacttgcagaaccagcctctgagccagatgtccttaagattgttattgactctgaaataaaggattccctcctttccaacaagaaagctattgatggagggaagaatacttctggcctccctgcagagcccgaaagtgtgtcctcaccccccaccctacacatgaagactggcttggagaacagcaacagcacagacactttgtggaggcctatgccaaagttggcccctctaggtttaaaagtagctaatccttccagtgatgcagatggtcagagtctcaaggtgatgccttgtttggcacctatagctgccaaagttgggtcagttggacacaaaatgaacttaacagggaatgaccaggaaggccgggaaagcaaggtgatgcctacattggcacctgttgtggctaaattgggcaactcgggggcctcaccaagttctgcagggaaatgaacttacttgtccttaagcagaagccaggctgtgaggggaaattgatctcacctcctttctctgcaggcatctgtttgtttgtgtcttagaacttggatccttgacttcaatgatgcagtggataatgatgggagaaagggggtagggtgctgaccctggtataagaagtactctgaaattctgatcatgttaaaatgtgttacctcacttgtggtgctgggtcccctcatcctctctaagaagatgtgatccattactgaacatgaggtgcccctcttacccaaggaatttataacatgactctggctccacagtggtttctagttcttcccccacaagcgaaagagctgtttgcaactttggagttgctgtagactgaactgtagcttgtagctgttgaattaagtccaaaatctaaggaatgcgatggacttgtgcaaagggatccagaagagacactttttagttgatgtttcaagaatagggagagagaggatgggtaccatggaataccaaagtgaaggactttgtgtcattcagtaaaattttcttttttcatatcctaagtagctcccattccctcaccttttcaatcagaattaacaaattcaagccttcagtaaagtagggatgcttttaacttttattattaattattttgagatcttaaaaaaatagtagttctcccttattatttttgtgggcattgaaaagctcatttcacagtaccagagatttttactgggagtatatattttggaggtaggcatagagggagccctaccccttccacaaattacgttactcaagagacagctaaaataaaatgcattatctccccagaccagagacagtggccaaaataaaaaatcatggggctggaaatttcccaaatcaaaccagcctcctggtgcttgaaggtttcattcactattacctgcacaggatgtaaagaaaagtcacagtaggcactctttaccagggaaataaggcagtatttgaatcacaagatatattttttatctgcaaccatggatccaatgatctgtagagctttttcactcattaactgtcaggatatgaaggactgacagtctgtaaagatatttatatttttgtatagttgttttcatagatttctcaaaggctgaagttttcaacctagaagatgagatttgtattgagtatagaaatgatgtttcctatctagtttgtaaataatcatggtgcacttgaggggtctcttggaaactcctagggggtcaagaatcactattctgaaactgtatagactgggatttagctgctgcattttgcctttcttaaataattatattttggaatgtaacccctgttctgtcttcattgacaggatttgcttgtgttgttaaaacactaacacaagagcttccagtgcctgggccgtgcctaggtgatgctatttcttctatatctcctgtcttctttatcccaaatcccactcagcatatcttcagacctaggttgtaagaccaactttggattggatctagccagtgaattattatttccatggttggttccctttctgttaactctggtaatcaacagattgaaaacggtggaagaacttcttctgaaaattgcagtgggagcaaattcttgttggttttgtgctgcttgcctttctagatctgctcatcagcacttaaccttccctcctctaaaggttactaaagaagcctgaagtaggtaaagagtgctcctcagcttcttatccttccactctttacccagcagatttcattcaatgccttagccaaggagtccagcacctgtctcccctgctaataattgtccttagagatgctagtactttaatccaggtatagcagtttcccgttattttcttgcttgtcgttcccctacatttcctcctgatttcccaagactctctttgtggcttttgagggtcagccaaggagcaggcaagtgagtgaacaatcctcaggaaaagaaggaccattttagcttaacacttccttttttttttttttttttaagaagaatataggtaaacaggtaatgattcttgattggagataccatttgactcttgatgagagttgtacgaagatggaaatgagggatgattccaggcgttttagggggaaggctgcagataccattctaacccccaagatactgtgttctcaagacctcttagaactaggtgttgtcagggataatttgaggagggcttagtcttcagaacaatcctgcagtcttgacagaaatctaaaatctccaaaaactcctaccctttaaccttaccctagggggaactgatctatgaatattacatgtgtgattatgaaaggtgaagttgagtgagaggagttgaggaacgtggaagacagtgagctctcaccctaacactataagaagcatgatctcaatagaccaataattcacctttttatacatctgtaaataaatggaatgtttttaagaatataattatgtcagatttagcattttcttttatatattaaatatatatatctttccttttctgctttcgaaaagtgactatttttttagaaatctaagaacagaagtttggtgattgaaaggtagaatatataaacctgaaataaagcagttaaaacaattaaaaaaaaaaaaaaaa

SEQ ID NO: 5270 - DNA, 2137 bp, Homo sapien
  Unsure 1854-1877: Unknown base
cggtccatgccactggctaccacattccagcctggcaagggtttactgtttatagaggcaccgtttgggggcttttccatgtagaatggccgttgtaaagctgaagagaaaggaacagaagcacaaaagcaccttgattcttcgcaaacacaggcaggggctgccggctggacgagggcgctgcattttgagggcgtgctggacccgctggcagagcccgccctgagggttttctctgcagctgtgggctaagcttgcccaagcccctccccttttccagaaagccacccccatggccacttgcctttcaggtccaggttgaggacacagccacgggcatatatgtatttgtttcactggggttcatggttctggggacagtcttctagcccccgagatcttgggaaaggcatgagctcaagccacataaccaaaaagtagcaaaactcaaaattattactttactttcagctgttttctctcaatagcgcgccaccatcgtctgtgtgtctgcactgaacaaacatacgagagaatctggctgatcactttgagtgcctttggcctaaactttgcacatgactttaaacgtggccctgatactgcacacagtaagaaatgttttttattttatggtccctgaggttacgagatcagatctctggaaatgtgtaagccacctgctgtcacctctgacccatgtggtccattaccatgagggccggtgagtggggcagagatgctgaggcctggctggtgagcccccgagcagtgaggcaggaccctccctggtgacctgtgtgggggccagtcctctagtcccccagacaaatctccctttaaggaggcttctgaagctctgagtgccggcgctcagaattaatttgactcttcactgctcaccgcacctgcctatgagcctctagaaaacagcttgcccaatgagagtgctgcagctgaggcagcagcagacatgtccgtttctggggaagttactcaaacaatcgtgcctcttagggggccctaatgtgccccttctggcaggttgaaatgcatctggccttgaaggggaaggttaggaaattatgaagtacgtgggtttagggttgacaaccccatatccatggactcctggagatccctgaacgccgtctaatctgaatggtaccacaatttggtttgtctgaaaatatagtagtaaccacggcagtgatttcatttttacacgtttgcatttttacatgtctgtcattatgcatcttggggtctcttttccatgacctaccagcttcccaagcttaataatcagtatctcactattatgtcattggccaactgaaaacagtagcaaaacatcctatcatccaaattgctaataaaatagaacaccacacccacacgctggcttcccatttttatagtcttatcctcccacctggagggtgtgaatggggatcagtttttcaatagaacatgtatgtttggtaagttaatatgtgtagctgacccctttgcctttgtttttatatatttatgtttttctattgtagacatattgatgcaatacctgttcatagttgaatctgttacaaattgttaccttttatttgatgaagaactatttaaagattttccttttttatttcttctaaagcaaaagtcaatgcaagtaactctaatcagcgtgcaaaggcgtgcatatatatctgctatgtaattatataatgtttttataatgctgtgtggataacttttcactgatttagttacttgactgtaggaaacactgttgctttgcacgctgtgagaggtttgcactgttacagatgaaggcaacatatttacatatgtacnnnnnnnnnnnnnnnnnnnnnnnntcaaaaataacatcggctctttggggtgtctgtttccttggttgtctcacgccactggaacattgaacccagacagaccctaggatgtgaggttcctgactgcaccttacagaccacagagccacgtgtctatttctgtagacctatctccttagatttgtacatgcattttttgcggacttgaactttgttttctgaaattagatgccatttatgatgatgtgatgtcaatcaaataaagcatcattattttcagaaaa

SEQ ID NO: 5271 - protein, 31 aa, Homo sapien
VHATGYHIPAWQGFTVYRGTVWGLFHVEWPL

SEQ ID NO: 5272 - DNA, 885 bp, Homo sapien
caactctgtgtaagaggtgaaaggcagcttgcagaaacactgcattcacaggtgaaggagaaatcccagctcattggcaagaaaacagattgtagagactgaggcatctttaaaagatgtcagggtacagaaaaagtctttcaacacccccggctttgtagatgcctacaagaaggtgaatagcaccaacgagatgctgatggagaaatttaccaccctcgttcaagaactgaaagaagagacatcctccagactctccaggcaacaagaggagctggtagagatgctaacaacgctggaggccctgggagaggccatgagagccaccccgtcacaaggagcttttccacacctgccatgcagctgagagccaagccctgctgctctctcccccacgagggggctgggtcttagagcagcactgttcttttcccctccacccaggcctcccgagctgccaggctctgtgctcccacactgactccatctgaggggtccttgaggccagtggatctggagtaccccgcccctggcctggagttcctcctccttctcacgctgacactgcagccagctcctcaatgggcggtgcctccaaatctaaagaatatggaggtcctggagcacaccaagaaatgagggactttttctttgcagaaagtttgaattctgtcttaatgagacagaatgccatacttgagcacctcatcttttgctcaaattgaaatgtcatcgaactgtatttctcaagtcaatggtctgtaaatatgatttatgtattaatctcctaagtgaacaatttatattttatcctctacataattatcgtattatgctttaaatatatatttagtttatcaataaagacattcagtactcaatagc

SEQ ID NO: 5273 - protein, 33 aa, Homo sapien
QLCVRGERQLAETLHSQVKEKSQLIGKKTDCRD

SEQ ID NO: 5274 - DNA, 1798 bp, Homo sapien
gacagtggagggcagtggagaggaccgcgctgtcctgctgtcaccaagagctggagacaccatctcccaccgagagtcatggccccattggccctgcacctcctcgtcctcgtccccatcctcctcagcctggtggcctcccaggactggaaggctgaacgcagccaagaccccttcgagaaatgcatgcaggatcctgactatgagcagctgctcaaggtggtgacctgggggctcaatcggaccctgaagccccagagggtgattgtggttggcgctggtgtggccgggctggtggccgccaaggtgctcagcgatgctggacacaaggtcaccatcctggaggcagataacaggatcgggggccgcatcttcacctaccgggaccagaacacgggctggattggggagctgggagccatgcgcatgcccagctctcacaggatcctccacaagctctgccagggcctggggctcaacctgaccaagttcacccagtacgacaagaacacgtggacggaggtgcacgaagtgaagctgcgcaactatgtggtggagaaggtgcccgagaagctgggctacgccttgcgtccccaggaaaagggccactcgcccgaagacatctaccagatggctctcaaccaggccctcaaagacctcaaggcactgggctgcagaaaggcgatgaagaagtttgaaaggcacacgctcttggaatatcttctcggggaggggaacctgagccggccggccgtgcagcttctgggagacgtgatgtccgaggatggcttcttctatctcagcttcgccgaggccctccgggcccacagctgcctcagcgacagactccagtacagccgcatcgtgggtggctgggacctgctgccgcgcgcgctgctgagctcgctgtccgggcttgtgctgttgaacgcgcccgtggtggcgatgacccagggaccgcacgatgtgcacgtgcagatcgagacctctcccccggcgcggaatctgaaggtgctgaaggccgacgtggtgctgctgacggcgagcggaccggcggtgaagcgcatcaccttctcgccgccgctgccccgccacatgcaggaggcgctgcggaggctgcactacgtgccggccaccaaggtgttcctaagcttccgcaggcccttctggcgcgaggagcacattgaaggcggccactcaaacaccgatcgcccgtcgcgcatgattttctacccgccgccgcgcgagggcgcgctgctgctggcctcgtacacgtggtcggacgcggcggcagcgttcgccggcttgagccgggaagaggcgttgcgcttggcgctcgacgacgtggcggcattgcacgggcctgtcgtgcgccagctctgggacggcaccggcgtcgtcaagcgttgggcggaggaccagcacagccagggtggctttgtggtacagccgccggcgctctggcaaaccgaaaaggatgactggacggtcccttatggccgcatctactttgccggcgagcacaccgcctacccgcacggctgggtggagacggcggtcaagtcggcgctgcgcgccgccatcaagatcaacagccggaaggggcctgcatcggacacggccagccccgaggggcacgcatctgacatggaggggcaggggcatgtgcatggggtggccagcagcccctcgcatgacctggcaaaggaagaaggcagccaccctccagtccaaggccagttatctctccaaaacacgacccacacgaggacctcgcattaaagtattttcggaaaaa

SEQ ID NO: 5275 - protein, 567 aa, Homo sapien
MAPLALHLLVLVPILLSLVASQDWKAERSQDPFEKCMQDPDYEQLLKVVTWGLNRTLKPQRVIVVGAGVAGLVAAKVLSDAGHKVTILEADNRIGGRIFTYRDQNTGWIGELGAMRMPSSHRILHKLCQGLGLNLTKFTQYDKNTWTEVHEVKLRNYVVEKVPEKLGYALRPQEKGHSPEDIYQMALNQALKDLKALGCRKAMKKFERHTLLEYLLGEGNLSRPAVQLLGDVMSEDGFFYLSFAEALRAHSCLSDRLQYSRIVGGWDLLPRALLSSLSGLVLLNAPVVAMTQGPHDVHVQIETSPPARNLKVLKADVVLLTASGPAVKRITFSPPLPRHMQEALRRLHYVPATKVFLSFRRPFWREEHIEGGHSNTDRPSRMIFYPPPREGALLLASYTWSDAAAAFAGLSREEALRLALDDVAALHGPVVRQLWDGTGVVKRWAEDQHSQGGFVVQPPALWQTEKDDWTVPYGRIYFAGEHTAYPHGWVETAVKSALRAAIKINSRKGPASDTASPEGHASDMEGQGHVHGVASSPSHDLAKEEGSHPPVQGQLSLQNTTHTRTSH

SEQ ID NO: 5276 - DNA, 1168 bp, Homo sapien
  Unsure 472-473: Unknown base
ggattgtttcgtgtctattgctttgcagcctcattattttcatttcagcatattgagaacatcctgccattgtccccaaatgcatttctttcatatccttttaactggttgtttgttttccataagactgattcatattcaatccgattgttgaacattttgattatgtccagttttttgcagttataaacaaaacctcacctaatgaacatccttatgcttcaatctttgcccatgtccctaaaagacatatcctaagggtcaattctgggattgctaggacaaaggacatacatatttctagggcttttgatacagattgctggtttgctcaccagttggaccagtctacactcccatcaacagttgtagtaattcatatttctaatgcttctgaaattataaataaaagtttttaaaaatatgattctttcagttcacctgagctacttgaagacccagaaaaattganncttacttgtctttgatatcaagaccctgtttcatacctaagtactggtgaaacatgctctagtttgtgagctatttgagtagaactaatggaaagatgaaataatagtacatcaatagttacaatgaagaaactaattatcccagagagtttttgagcatatgggtagtgtttgtgaatttaagtttgttccccacattgtcagtttattctaaaattatcaccattttagacttaaagaattttaaagccaaaagataagcaaacagacttgcttaggtcctgtagcaaattaattcagaccttgaacaacatttcattgtgctgtttaggaagtgttaagtatattgagattttccatattactgtgttactatcatacttaaattttagaagatgatcaaattattttaatgactaggactatgcttatgaagttagcatttcctgcccttatttatagaaagcacttgatatatttcacaaaggtgaggagattaactttttagggaacaagtcatttaaattcttgaaccagtttccatcttttaggctatatgagtattgaatataggagaaaagagaaaagtatgcatgtttctcaaaggctctttctttaaatgtcaccagcagatctaaacagtatccataggcacctatggccaaatttactgaaaaaaaaaaagagggttaaag

SEQ ID NO: 5277 - protein, 62 aa, Homo sapien
GLFRVYCFAASLFSFQHIENILPLSPNAFLSYPFNWLFVFHKTDSYSIRLLNILIMSSFLQL

SEQ ID NO: 5278 - DNA, 2749 bp, Homo sapien
gccaaagctgtaattgaacttcttgaaaaatcaggtgtcaacctagatggaaagaagattttggtagtgggggcccatgggtctttggaagctgctctacaatgcctgttccagagaaaagggtccatgacaatgagcatccagtggaaaacacgccagcttcaaagcaagcttcacgaggctgacattgtggtcctaggctcacctaagccagaagagattccccttacttggatacaaccaggaactactgttctcaactgctcccatgacttcctgtcagggaaggttgggtgtggctctccaagaatacattttggtggactcattgaggaagatgatgtgattctccttgctgcagctctgcgaattcagaacatggtcagtagtggaaggagatggcttcgtgaacagcagcacaggcggtggagacttcactgcttgaaacttcagcctctctcccctgtgccaagtgacattgagatttcaagaggacaaactccaaaagctgtggatgtccttgccaaggagattggattgcttgcagatgaaattgaaatctatggcaaaagcaaagccaaagtacgtttgtccgtgctagaaaggttaaaggatcaagcagatggaaaatacgtcttagttgctgggatcacacccacccctcttggagaagggaagagcacagtcaccatcgggcttgtgcaggctctgaccgcacacctgaatgtcaactcctttgcctgcttgaggcagccttcccaaggaccgacgtttggagtgaaaggaggagccgcgggtggtggatatgcccaggtcatccccatggaggagttcaaccttcacttgactggagacatccacgccatcaccgctgccaataacttgctggctgccgccatcgacacgaggattcttcatgaaaacacgcaaacagataaggctctgtataatcggctggttcctttagtgaatggtgtcagagaattttcagaaattcagcttgctcggctaaaaaaactgggaataaataagactgatccgagcacactgacagaagaggaagtgagtaaatttgcccgtctcgacatcgacccatctaccatcacgtggcagagagtattggatacaaatgaccgatttctacgaaaaataaccatcgggcagggaaacacagagaagggccattaccggcaggcgcagtttgacatcgcagtggccagcgagatcatggcggtgctggccctgacggacagcctcgcagacatgaaggcacggctgggaaggatggtggtggccagtgacaaaagcgggcagcctgtgacagcagatgatttgggggtgacaggtgctttgacagttttgatgaaagatgcaataaaaccaaacctgatgcagaccctggaagggacacctgtgttcgtgcatgcgggcccttttgctaacattgctcacggcaactcttcagtgttggctgataaaattgccctgaaactggttggtgaagaaggatttgtagtgaccgaagctggctttggtgctgacatcggaatggagaaattcttcaacatcaagtgccgagcttccggcttggtgcccaacgtggttgtgttagtggcaacggtgcgagctctgaagatgcatggaggcgggccaagtgtaacggctggtgttcctcttaagaaagaatatacagaggagaacatccagctggtggcagacggctgctgtaacctccagaagcaaattcagatcactcagctctttggggttcccgttgtggtggctctgaatgtcttcaagaccgacacccgcgctgagattgacttggtgtgtgagcttgcaaagcgggctggtgcctttgatgcagtcccctgctatcactggtcggttggtggaaaaggatcggtggacttggctcgggctgtgagagaggctgcgagtaaaagaagccgattccagttcctgtatgatgttcaggttccaattgtggacaagataaggaccattgctcaggctgtctatggagccaaagatattgaactctctcctgaggcacaagccaaaatagatcgttacactcaacagggttttggaaatttgcccatctgcatggcaaagacccacctttctctatctcaccaacctgacaaaaaaggtgtgccaagggacttcatcttacctatcagtgacgtccgggccagcataggcgctgggttcatttaccctttggtcggaacgatgagcaccatgccaggactgcccacccggccctgcttttatgacatagatcttgataccgaaacagaacaagttaaaggcttgttctaagtggacaaggctctcacaggacccgatgcagactcctgaaacagactactctttgcctttttgctgcagttggagaagaaactgaatttgaaaaatgtctgttatgcaatgctggagacgtggtgaaataggccaaagatttcttcttcgttcaagatgaattctgttcacagtggagtatggtgttcggcaaaaggacctccaccaagactgaaagaaactaatttatttctgtttctgtggagtttccattatttctactgcttacactttagaatgtttattttatggggactaagggattaggagtgtgaactaaaaggtaacattttccactctcaagttttctactttgtctttgaactgaaaataaacatggatctagaaacccaaaaaaaaaaaaaaaaaaaaaaaaaaaaaa

SEQ ID NO: 5279 - protein, 733 aa, Homo sapien
MTMSIQWKTRQLQSKLHEADIVVLGSPKPEEIPLTWIQPGTTVLNCSHDFLSGKVGCGSPRIHFGGLIEEDDVILLAAALRIQNMVSSGRRWLREQQHRRWRLHCLKLQPLSPVPSDIEISRGQTPKAVDVLAKEIGLLADEIEIYGKSKAKVRLSVLERLKDQADGKYVLVAGITPTPLGEGKSTVTIGLVQALTAHLNVNSFACLRQPSQGPTFGVKGGAAGGGYAQVIPMEEFNLHLTGDIHAITAANNLLAAAIDTRILHENTQTDKALYNRLVPLVNGVREFSEIQLARLKKLGINKTDPSTLTEEEVSKFARLDIDPSTITWQRVLDTNDRFLRKITIGQGNTEKGHYRQAQFDIAVASEIMAVLALTDSLADMKARLGRMVVASDKSGQPVTADDLGVTGALTVLMKDAIKPNLMQTLEGTPVFVHAGPFANIAHGNSSVLADKIALKLVGEEGFVVTEAGFGADIGMEKFFNIKCRASGLVPNVVVLVATVRALKMHGGGPSVTAGVPLKKEYTEENIQLVADGCCNLQKQIQITQLFGVPVVVALNVFKTDTRAEIDLVCELAKRAGAFDAVPCYHWSVGGKGSVDLARAVREAASKRSRFQFLYDVQVPIVDKIRTIAQAVYGAKDIELSPEAQAKIDRYTQQGFGNLPICMAKTHLSLSHQPDKKGVPRDFILPISDVRASIGAGFIYPLVGTMSTMPGLPTRPCFYDIDLDTETEQVKGLF

SEQ ID NO: 5280 - DNA, 1670 bp, Homo sapien
ctttttaaattgagttttcattttgaaatgaaaaatgagaaaattcaaaatttttaaatgaaaacattggtctttgcccagtaacgaacatgtgtacacctttgcattcatacagtcccctagaaccagtaagtcctttccctgcaaagctgtcctgaacattcagggtccacacattgaccactgaagggtaggaggaaaggcaaagcaagctgcacaaagggaagatggcccgtagccttgaaatgcactcttgctagccctccccattttggttattatcagcaaagatcagtgacatgttaatatattcggctattttactgtgaatataatggtaaattttaatagaaattgagttagatagcagtttctgaatctgaaagaaagtgacattgcttgcgaagtgctcacagtagcacttaacattgtgaagttcaactcaatttttatttgctgtttcacagaaagcaataatccctcatattttatagtaccatctgggttacaaaaatcccgatgcgtctttgttggacaagccaggatctcaggaaggagtggaggggagcttcatctcagtggcttctgccctgaatttgaatttttaacaggcagcttttaagcatcctgtggcactcatcccatctcagtgtagcagagacagtaatgtctttccctctatggttgagaaggagcttttgaatgcccttttggaagctgtagaaatctatgatactcatcgtcagcattcgaccatgaacttaaactcctatcacacctctaggtgtgataatatttctccttctgttacaacagagtaatgtcacacttggcacttttactgtcctcttgcgagactatcctccaagtgctgtctgagagtgttaactgctatttggctcatttttctgcaccaaggagaacagaaacacagcaggcaccaagaggaggtttagtgtgcagtgggttgttctgaaaggcagtgagtaaaatgaggtattccctgacttctgcttttgctacatgaagtcatgaggtccttgaagccagacttaggtaccgtttctttcatcccttgctagttcctaatcgtagacacaaaccttccacatccatccaggcggatggcagtgcttcttgtagaaagcaatgtcactaaggcagtgtcactaaggaaaacaggacaaggcaacagttgtgttcagagttttgactggcgtctgattggaattagaaggaagattattttgccataacctaggtaccgtgacccaagctcttttggcagaccttgacgtcacaaaccgtacgcttgctggagaagggaaaaggagagttgcagccactaagagagtcaaggctgtggcctgcctggtggtgttttataggaactggctcagggaggctgcatgtcctttgttttctgaggccttgttccacgtggcctcccacttgaggccaggaatattgcagcaatgccgaagagtgggtggacaaatagccttattattaacctaagttggaaacatggctttttgagtgtcttcattcacagatgcagtcacaaaatattaatactctttttttgaacatggcaaaacaaagtattcatttaaacctcctttgtccacgtccatggtaaaagagcacctcaggcaggggaggaaaaa

SEQ ID NO: 5281 - protein, 10 aa, Homo sapien
MVKEHLRQGR

SEQ ID NO: 5282 - DNA, 1615 bp, Homo sapien
  Unsure 891: Unknown base
atacacatgcagaagctgtgacacgtgcggaagctgtggtaagtgcatcctccttcagtctcagttctgaaaatagatcatcatggtggcaccaaagagtcacacagatgactgggctcctgggcctttctccagtaagccacagaggagtcagctgcaaatattctcttctgttctacagacctctctcctcttcctgctcatgggcccaactcctgggaaacatctctccgctgcatggcccggaaccccactgtccagcagatagagccaatccagtaccccagagaggatctcagccacctgggactgtggcagctactgtccttctgtgctcccgctttctccagggcttcagggatgatgatgcaggactaagagcctctggaaaggactcagccccaacagtggtgtcagggatcctagggggttccgtgactctccccctaaacatctcagtagacacagagattgagaacgtcatctggattggtcccaaaaatgctcttgctttcgcacgtcccaaagaaaatgtaaccattatggtcaaaagctacctgggccgactagacatcaccaagtggagttactccctgtgcatcagcaatctgactctgaatgatgcaggatcctacaaagcccagataaaccaaaggaattttgaagtcaccactgaggaggaattcaccctgttcgtctatgcaccatttattgaaaagttgtccgtccacgtcatcgagggtgaccaccgcacactcctggagggcagcggcctggagtccatcatcagcaccctggctgagccacgtgtgagcgtgcgggagggctaggccctcgcccccacctgccactggagaccgctccgccatccccacctcaccgccgcgcaanagagctggaagggtcctgccgatgggaccctgccaggcccagtgccactgccccccgagggctgctagacgtggggcgttaggcgtgtcccacccacccgccgcctcccatgggcacgtcgggaacaccggagccgccaacttggagacttcctggtctgtgaagagccgctgacgcccgcaggaaaccggggctgggccttgtgtgccagtcggggttttgtgcttggtcgtttctccgcttggatttgcttatttattgcattgctggtagagactcccaagcctgtccaccctgcaaagactcctcgggcagcatgcgggtcccgcacactgcacccatttcctggatgtcccctgcaggcgcgggaggccatccgggcctgctggctgcggccccctctcagccaggcctggctcagcccactgcgtgggaggtcaccggccactccccgaggagctgggatccccgggatgcaggcccacagtgcggggctgcacccatgatgcggagctggcctccaaccctgcgggccgcgccaggcaccaactcagtgtttgtcagtgtttgtttttccaagaaatggttcaaattgctgctcagatttttaaatttactgtagctgccagtgtacacgtgtggaccccattttatttttacaccaatttggtgaaaatgctgctttcctcagcctccccacaattaaactgcacatggtctctaa

SEQ ID NO: 5283 - protein, 275 aa, Homo sapien [sequence omitted]

SEQ ID NO: 5284 - DNA, 2061 bp, Homo sapien
  Unsure 141-186: Unknown base
  Unsure 696-995: Unknown base
agatctagtgtctggtaaggcaaatttctggctcatagatggtaccttcttgctgtgtccccacatggtagatgggaagaactggtctcattggccccttataaggacattaattccactcaataggctccaccctcatgnnnnnnnnnnnnnnnnnnnnnnnnnnnnnnnnnnnnnnnnnnnnnnaggatgtgacttcaactttacatttctacaggcagagaagtggggctgtgtaaattcttcccatcagtacttgaatgttcatttaacaaataacttatcgagcatctagcatgttccagacacaatctgaacactgagcacacaacagttggaacaaatatgattcctatcctcatggagcttctattctcctgtgaaaaacagatgttaaacatgattgaggattaggtctcaacataagaattctaggaggacacagacatttagaccatagcatcttcaggtaaactttatcttcagtaaattaaagagatctatttagatgacctttgagcatcttaattattagatgtcagtgctagtttaacttattttaaacgtttcagatatttatttaattatactttaagtgtctcatgtaaaaaagttatttataaaataatttatagggttagagtcattgcccttttaatgcaacaaataaacagttttttaaaaacctgcatgggnnnnnnnnnnnnnnnnnnnnnnnnnnnnnnnnnnnnnnnnnnnnnnnnnnnnnnnnnnnnnnnnnnnnnnnnnnnnnnnnnnnnnnnnnnnnnnnnnnnnnnnnnnnnnnnnnnnnnnnnnnnnnnnnnnnnnnnnnnnnnnnnnnnnnnnnnnnnnnnnnnnnnnnnnnnnnnnnnnnnnnnnnnnnnnnnnnnnnnnnnnnnnnnnnnnnnnnnnnnnnnnnnnnnnnnnnnnnnnnnnnnnnnnnnnnnnnnnnnnnnnnnnnnnnnnnnnnnnnnnnnnnnnnnnnnnnnnnnnnncctgcatggaagcctagtatatttattaataacaaataaattatactttagtgtactattaacctataccaattttaagttgtgattagggaatggggatgtttttaagctgaattgtcttgctgcggaattttccttttttaataagaccatattatgactctgaatgctcaagggtaagtctaaggcctcattgctgttaccaggagatttttctagttacagtaataaagatgttaattcacatgcatgcagacaactgaaactcaagtggagaatttgtttgtgaacaagtcatactacttctgttatttgcatgaatggaatctgcaatatctttttccatgggagaccctaaaagaaaaccctggatcagaatgatctgcagtttcagataataaaggcttttaagagacatttttagaattaaaaatatgctaattttattaaatgaaaatatttgtaactgttaactttctcactgacaaagcaagtttctcaataaaatacctattttaacttgcattactgacatcttttctttgagtaatctgaataatgcagaagccatcatagaggtcttttctatacattctcaatgttttcttaaatgggtttcctgagttctgttcttcatgactctgggctctgcaaacagggtttcccaattacgcattctataaacacttttatgaatgagtcaatatgacattgagtccttttcatacatttcatcatttccaatatgtagagtgacagctagaaaaatgataaaattttgattaaaacctatctctttttcttcagcatagtcaattgttttcttaactctcaatgagtaactccatgcctagcttgtgcttagctttcaatatttttagactaagacaaagtgtatttggcattttgagaacaacaattaatggtcagtaaatttctaaagcaagaaaaatgtgaaactagtgttttatatgtttgttacgcagcagaatgcgggctcttagtgtttgccccttcatatctcatcatgtaaaatattaaattactttaggccactgcacatagg

SEQ ID NO: 5285 - protein, 140 aa, Homo sapien
  unsure 14: unknown amino acid
  unsure 15: unknown amino acid
  unsure 16: unknown amino acid
  unsure 17: unknown amino acid
  unsure 18: unknown amino acid
  unsure 19: unknown amino acid
  unsure 20: unknown amino acid
  unsure 21: unknown amino acid
  unsure 22: unknown amino acid
  unsure 23: unknown amino acid
  unsure 24: unknown amino acid
  unsure 25: unknown amino acid
  unsure 26: unknown amino acid
  unsure 27: unknown amino acid
  unsure 28: unknown amino acid
  unsure 29: unknown amino acid
  unsure 30: unknown amino acid
  unsure 31: unknown amino acid
  unsure 32: unknown amino acid
  unsure 33: unknown amino acid
  unsure 34: unknown amino acid
  unsure 35: unknown amino acid
  unsure 36: unknown amino acid
  unsure 37: unknown amino acid
  unsure 38: unknown amino acid
  unsure 39: unknown amino acid
  unsure 40: unknown amino acid
  unsure 41: unknown amino acid
  unsure 42: unknown amino acid
  unsure 43: unknown amino acid
  unsure 44: unknown amino acid
  unsure 45: unknown amino acid
  unsure 46: unknown amino acid
  unsure 47: unknown amino acid
  unsure 48: unknown amino acid
  unsure 49: unknown amino acid
  unsure 50: unknown amino acid
  unsure 51: unknown amino acid
  unsure 52: unknown amino acid
  unsure 53: unknown amino acid
  unsure 54: unknown amino acid
  unsure 55: unknown amino acid
  unsure 56: unknown amino acid
  unsure 57: unknown amino acid
  unsure 58: unknown amino acid
  unsure 59: unknown amino acid
  unsure 60: unknown amino acid
  unsure 61: unknown amino acid
  unsure 62: unknown amino acid
  unsure 63: unknown amino acid
  unsure 64: unknown amino acid
  unsure 65: unknown amino acid
  unsure 66: unknown amino acid
  unsure 67: unknown amino acid
  unsure 68: unknown amino acid
  unsure 69: unknown amino acid
  unsure 70: unknown amino acid
  unsure 71: unknown amino acid
  unsure 72: unknown amino acid
  unsure 73: unknown amino acid
  unsure 74: unknown amino acid
  unsure 75: unknown amino acid
  unsure 76: unknown amino acid
  unsure 77: unknown amino acid
  unsure 78: unknown amino acid
  unsure 79: unknown amino acid
  unsure 80: unknown amino acid
  unsure 81: unknown amino acid
  unsure 82: unknown amino acid
  unsure 83: unknown amino acid
  unsure 84: unknown amino acid
  unsure 85: unknown amino acid
  unsure 86: unknown amino acid
  unsure 87: unknown amino acid
  unsure 88: unknown amino acid
  unsure 89: unknown amino acid
  unsure 90: unknown amino acid
  unsure 91: unknown amino acid
  unsure 92: unknown amino acid
  unsure 93: unknown amino acid
  unsure 94: unknown amino acid
  unsure 95: unknown amino acid
  unsure 96: unknown amino acid
  unsure 97: unknown amino acid
  unsure 98: unknown amino acid
  unsure 99: unknown amino acid
  unsure 100: unknown amino acid
  unsure 101: unknown amino acid
  unsure 102: unknown amino acid
  unsure 103: unknown amino acid
  unsure 104: unknown amino acid
  unsure 105: unknown amino acid
  unsure 106: unknown amino acid
  unsure 107: unknown amino acid
  unsure 108: unknown amino acid
  unsure 109: unknown amino acid
  unsure 110: unknown amino acid
  unsure 111: unknown amino acid
  unsure 112: unknown amino acid
  unsure 113: unknown amino acid
MQQINSFLKTCMGXXXXXXXXXXXXXXXXXXXXXXXXXXXXXXXXXXXXXXXXXXXXXXXXXXXXXXXXXXXXXXXXXXXXXXXXXXXXXXXXXXXXXXXXXXXXXXXXXXXXLHGSLVYLLITNKLYFSVLLTYTNFKL

SEQ ID NO: 5286 - DNA, 6577 bp, Homo sapien
  Unsure 2689-2732: Unknown base
  Unsure 5063: Unknown base
  Unsure 5144: Unknown base
  Unsure 5210: Unknown base
  Unsure 5313: Unknown base
gccgggaagtggctccagggagaagaggcctcttccctcacccgctgtgggagctgcgccccgaaagcctgccccggcacgtcgggctctcctgacccgccaagaccagagagccgttggcgccctccgcccgggcctgccggtccgtttattttaagaagctttgtgcgcctgctgtggggatttctgatccaggctgcgaagaatttcgaagtctggaaaatagcaactgtgtttgtttctaaaggatcttctcctgacccagcatcgctcatcacaatgaagaaccaagacaaaaagaacggggctgccaaacaatccaatccaaaaagcagcccaggacaaccggaagcaggacccgagggagcccaggagcggcccagccaggcggctcctgcagtagaagcagaaggtcccggcagcagccaggctcctcggaagccggagggggctcaagccagaacggctcagtctggggcccttcgtgatgtctctgaggagctgagccgccaactggaagacatactgagcacatactgtgtggacaataaccaggggggccccggcgaggatggggcacagggtgagccggctgaacccgaagatgcagagaagtcccggacctatgtggcaaggaatggggagcctgaaccaactccagtagtcaatggagagaaggaaccctccaagggggatccaaacacagaagagatccggcagagtgacgaggtcggagaccgagaccatcgaaggccacaggagaagaaaaaagccaagggtttggggaaggagatcacgttgctgatgcagacattgaatactctgagtaccccagaggagaagctggctgctctgtgcaagaagtatgctgaactgctggaggagcaccggaattcacagaagcagatgaagctcctacagaaaaagcagagccagctggtgcaagagaaggaccacctgcgcggtgagcacagcaaggccgtcctggcccgcagcaagcttgagagcctatgccgtgagctgcagcggcacaaccgctccctcaaggaagaaggtgtgcagcgggcccgggaggaggaggagaagcgcaaggaggtgacctcgcacttccaggtgacactgaatgacattcagctgcagatggaacagcacaatgagcgcaactccaagctgcgccaagagaacatggagctggctgagaggctcaagaagctgattgagcagtatgagctgcgcgaggagcatatcgacaaagtcttcaaacacaaggacctacaacagcagctggtggatgccaagctccagcaggcccaggagatgctaaaggaggcagaagagcggcaccagcgggagaaggattttctcctgaaagaggcagtagagtcccagaggatgtgtgagctgatgaagcagcaagagacccacctgaagcaacagcttgccctatacacagagaagtttgaggagttccagaacacactttccaaaagcagcgaggtattcaccacattcaagcaggagatggaaaagatgactaagaagatcaagaagctggagaaagaaaccaccatgtaccggtcccggtgggagagcagcaacaaggccctgcttgagatggctgaggagaaaacagtccgggataaagaactggagggcctgcaggtaaaaatccaacggctggagaagctgtgccgggcactgcagacagagcgcaatgacctgaacaagagggtacaggacctgagtgctggtggccagggctccctcactgacagtggccctgagaggaggccagaggggcctggggctcaagcacccagctcccccagggtcacagaagcgccttgctacccaggagcaccgagcacagaagcatcaggccagactgggcctcaagagcccacctccgccagggcctagagagcctggtgttgggtcatgctgggaagggagcggcagcccagccaggcctggcccataaaaggctcccatgctgagcagcccattgctgaagccaggatgttctgacctggctggcatctggcacttgcaattttggattttgtgggtcagttttacgtacatagggcattttgcaaggccttgcaaatgcatttatacctgtaagtgtacagtgggcttgcattggggatgggggtgtgtacagatgaagtcagtggcttgtctgtgagctgaagagtcttgagaggggctgtcatctgtagctgccatcacagtgagttggcagaagtgacttgagcatttctctgtctgatttgaggctcagacccctccctgcccttcagagctcaagacaagtaatacacccaggtcttgactgcatttgtcttgtgagcagggcttgcttggtcagctcaggccctcctagctgctctggaggctcctttgattctctagacctggaaaaggtgtccctaggcagagccctggcagggcgctcagagctggggatttcctgcctggaacaagggacctggagaatgtttttgcgtgggatgatgtgctggtcaggagccccttgggcatcgcttcccctgccctttggtagtgccaggaccaggccaatgatgcttctcagtagccttatcattcacaggtgcctctctagcctgcacaaatgattgacaagagatcacccaaaggattatttctgaaggtgtttttttcnnnnnnnnnnnnnnnnnnnnnnnnnnnnnnnnnnnnnnnnnnnnttttgcacatgacagtgtttgtattgaggaccttccaaggaagagggatgctgtagcagtggtgcctgggtgcctggcctccagtgtcccacctccttcaccaccccacttggctcctttgccatcttgatgctgaggtttcctgtttggtgagatcaggttgtttgtggtaaaagaaaggaaagggcttctgatggctttgccacaagcttacctgtgggtttcagtcctgagaggccaccaccagttcccatcagcactgtctccatgcagcagttgctgggtcccatgtccagctgcctctttggcttcatgggtttttctgcttcctgcccccacccccacatgtgcaatcctcaagatttgtcctgattctatttcctggcacctccctgcctgtccttggggattctacttcttcctgtgtgggagcccatagctgttgtctaacaggtaagaaatgaaattgaactattgactgggccccagaaatccataaaatggctgcagacagttgtttctgtgtcctgttctacccccactccagtacataactactatgtactgtgtagagccattctatatgctgaatgttctgctgttgcaaacttgccagggtattagccagtgtttgtgccaagcagttttctgggacaacagaatgactcagaccaagatggataggatggttagggctttgcttcttgctgtttttctttgaagctagttcattgtcctgcaggtcccttcatcttccatacctagcccactcttttagcccttaccttaaatctctcagataagttggttcacaaagaatgttaagtactgaatcatgtgtgactgagaccagagatggcaaatgaatggcacaccatttctccttctcctgccccagggcaggtaccactgatctgcatcagagttgcctgctattctctggtgtatccttcacatctaggtgccctcaagcagctgtgtgagtgttgagatctctgccatctctggctgagatactgctgtcctgtgaagtgtttcccatgacctttttcttcccctttgaatccctctgtctggagtagtccttgcctcttcctgctccagtagggccttttccctaccccagcccctgtgccaggctaagctggtacaagagctgccaacctcacagagtgtttgctaggcgagagaggtgcagggaagaggcagaggtatgcaccttcccccttgaagagaggggaaaggcctacagtggcccacataattgcctgactcacacttcagctacctcttaatgcctgtggagggactggagctgctggatcccagtgtggtggtgtaggaggccacagtgagcaggtggccccagctgggtttcccaggtcaggaatgtgggccccaggcaaggtgcagcctttgctcacagctccatccatgtctagaccttcaggccagtctgcagatgaggttccctacctttttcttctcttcattgaccaaatcaaccaatcactacagctgctctgcttctgctttccaaagtagcccaggtcctgggccagatgcaggggaggtgcctatccatgagtgaaggccagtgtcttcctcacctgggtgggtcccacacttgtgacctcagttttaggaccaagatctgtgttggtttcttagattgctagcttttcctccaggggaccacagcaggtgaagctcaagagcgcatggctctgctaatagtaaattgttttcagggccttgtccagctgagagcttcatgtccaccagattctgagaggtgtcagcagcacttttttttttatttgttgtttgttttccatgaggttatcggaccatgggctgagctcaggcactttctgtaggagactgttatttctgtaaagatggttatttaaccctcctccaccccatcacggtggccctgagggctgacccggaggccagtggagctgcctggtgtccacgggggagggccaaggcctgctgagctgattctccagctgctgccccagcctttccgccttgcacagcacagaggtggtcaccccagggacagccaggcacctgctcctcttgcccttcctgggggaagggagctgccttctgtccctgtaactgctttccttatggcccagcccggccactcagacttgtttgaagctgcactggcagcttttttgtctcctttgggtattcacaacagccagggacttgattttgatgtattttaaaccacattaaataaagagtctgttgccttacttgtttctctcctgacctgtgtattcctttgtttctggatctgatccattnagccccttccatcatcactgacttgttcaggtctgctgcagagcgcccatggtggttcctggtatcttacaaattccacantgtctttgagcagtcgccacagcctcaggatgctggcatattcacttgactgcctgagtggagccnttggcaaagttggcaagacccttgcctcagagaggatcacacacacacaaaaaagttttccctgacctgggggctcacaggctagtgaagggaaaaggtactnttagctatagacaggtcaatggtgctgagagcagagaggaggcccctgcccccttcagcaaggtgagggggtgatacctggaatggccttctgaaccacagggcaggtagaagatgaacgtcatttagtgattaaatggtacagctgggaagcaggtccatgggactgggagagggggtgaggctgggcccagagtctgggtaccaggttaaggaatgtgggctagatccagagggcagggggggcaactgaaggtgtttcaataggaaattgataggctccagcagtaaggcaaaaggcatggagccaggcataggccatttgaggcccaggttaagaggggtggacactcatcactgctatttgggtctgagctgtgggtaggctcctatagccctggcctgcccaagggaattcacaggggcctctaattgtatgcattccttaaggagagcacattctctgttcagtttttacaccccccatttacccacctcaagcatgggactcctatatgggagacatgctgctggtggcctcacccagcaccctgttctctctgggtcctgggttggtcaggcacaaaggatgatatgtgctgaatgcccaggaaatggcagagacaacccacctgcccttccctccaggcctccacaaatagatgtgcccacaatgactgtgacagtcccagcagagcctctgacccttctagctgggtcctgatacatgttttccatgctggccatgttatttctagtcgcagatcctctggagggtgtgggggggggtgccgccccaactcttggagattccaagcaaagcagctctgagaataatgaggtttctgaccccccagtgaagcagctgaggatgggaaccacaggggtgctccctctgtcagcagcattaccactgtctactctagcagctccggtggggaaggagagggatttctgttgtccccagtctgggcccctggttattgaaaaagttcggaattactctttacccttgtggagtgttctgagtgttggaagtacccaggaagaagccctgagcaggtgccctcaggagcagtgcccatggctccccacatcagccaagaggcccaaccccaggaagccactcctgcccggggatggggaaggtgggctgggtggctgtgtgcactgccctgggccagctcacttgagcctgctgagccgcctggccaaacatgagcctctctcctgttgtatcagatgctgttctgggacctgctcca

SEQ ID NO: 5287 - protein, 639 aa, Homo sapien
AGKWLQGEEASSLTRCGSCAPKACPGTSGSPDPPRPESRWRPPPGPAGPFILRSFVRLLWGFLIQAAKNFEVWKIATVFVSKGSSPDPASLITMKNQDKKNGAAKQSNPKSSPGQPEAGPEGAQERPSQAAPAVEAEGPGSSQAPRKPEGAQARTAQSGALRDVSEELSRQLEDILSTYCVDNNQGGPGEDGAQGEPAEPEDAEKSRTYVARNGEPEPTPVVNGEKEPSKGDPNTEEIRQSDEVGDRDHRRPQEKKKAKGLGKEITLLMQTLNTLSTPEEKLAALCKKYAELLEEHRNSQKQMKLLQKKQSQLVQEKDHLRGEHSKAVLARSKLESLCRELQRHNRSLKEEGVQRAREEEEKRKEVTSHFQVTLNDIQLQMEQHNERNSKLRQENMELAERLKKLIEQYELREEHIDKVFKHKDLQQQLVDAKLQQAQEMLKEAEERHQREKDFLLKEAVESQRMCELMKQQETHLKQQLALYTEKFEEFQNTLSKSSEVFTTFKQEMEKMTKKIKKLEKETTMYRSRWESSNKALLEMAEEKTVRDKELEGLQVKIQRLEKLCRALQTERNDLNKRVQDLSAGGQGSLTDSGPERRPEGPGAQAPSSPRVTEAPCYPGAPSTEASGQTGPQEPTSARA

SEQ ID NO: 5288 - DNA, 902 bp, Homo sapien
ccttgagctcctcctcgcccttctccaaccggcctcccctgccgcctacccccagcagggccttggatgacaaaccccctccaccacctcctccagtgggcaacaggccctcctcctcctcagaacaacaagcctccagtgccttccactccgcggccttcggcctcctcacaggccccaacttcggcggccacctcccagcaggcccgggccgcctcctctgcctccaagttccagcggcaatgacgaaaccccaagactcccacagcggaatctgtccctcagttcgtccacgcccccgttaccttcgccaggacgttcaggtcctcttcctcccccgcccagtgagagacccccacctccagtgagggacccgccaggccgatcaggtatgacaagacgtggagtgagttgcttccaaaacccagcctgcccaaatgtaccaataatcctgtcagtcaagatagtctaacaaaagcaggcataagtaaactcagactgctttgtgcttttaagtggcacacgacacgtgtgatcgtgacctcgtgtaaaccccgggggaaagtgggaccaatatttctgttggtgttttagagatgaggacactgagtagctaataaagttaaatggtcacgagctagttaataaagaagaggcaagaactttcatcttccatctctgaagtgtacttgccagtccactaccctgcctccctagagagaatttcggcggtcttaattgggaaaataagtccccacctcccgcaggagggctctgttattccaacaagaggggaagttcttcaagagctaatgaacttctcctgtacttctctcttcattcgccaggctttgaggccatttccctattcattaaagactaatgtttaaaaagtcaaaaaa

SEQ ID NO: 5289 - protein, 121 aa, Homo sapien [sequence omitted]

SEQ ID NO: 5290 - DNA, 2881 bp, Homo sapien; identical to SEQ ID NO: 709

SEQ ID NO: 5291 - protein, 592 aa, Homo sapien; identical to SEQ ID NO: 710

SEQ ID NO: 5292 - DNA, 309 bp, Homo sapien
tttgtttttctctttgataatactgtttattgtccacggaccgagcgattgctcaagaatgatacaaagcatcagaaacatgcgcagtctgcttgtcaactttcaacaactcttgtgtgttcccagcaccggaagtcgtcagacttcatattccagcataaacacagtgctcccctcccccaaaaatccaactgaaacaaaatcaacagagctttaaattacggcagcaagtccaatatttcttaatacttatcaagcaaagatttgaaaataactacaatgtaaactttattttaaatattttgagtt

SEQ ID NO: 5293 - DNA, 1708 bp, Homo sapien
gaatagggttgcaccatcccagaagctgctgttagctcgccggtcctcggcacgccgcccgttcgcccctgcgctgtccgcccttcccctagcgttacttccggtccctcgctgagggggttcgtgcggctcccaggaggcgtgaaccgcggaccatgagcgtgggcttcatcggggccggccagctggcctatgctctggcgcggggcttcacggccgcaggcatcctgtcggctcacaagataatagccagctccccagaaatgaacctgcccacggtgtccgcgctcaggaagatgggtgtgaacctgacacgcagcaacaaggagacggtgaagcacagcgacgtcctgtttctggctgtgaagccacatatcatccccttcatcctggatgagattggggccgacgtgcaagccagacacatcgtggtctcctgtgcggctggtgtcaccatcagctctgtggagaagaagctgatggcattccagccagcccccaaagtgattcgctgcatgaccaacacacctgtggtagtgcaggaaggcgctacagtgtacgccacgggcacccatgccctggtggaggatgggcagctcctggagcagctcatgagcagcgtgggcttctgcactgaggtggaagaggacctcatcgatgccgtcacggggctcagtggcagcgggcctgcctatgcattcatggctctggacgcattggctgatggtggggtgaagatgggtttgccacggcgcctggcaatccaactcggggcccaggctttgctgggagctgccaagatgctgctggactcggagcagcatccatgccagcttaaggacaatgtctgctcccctgggggagccaccatccacgccctgcactttctagagagtgggggcttccgctctctgctcatcaatgcagttgaggcctcctgtatccgaacacgagagctacagtccatggccgaccaagaaaagatctccccagctgcccttaagaagaccctcttagacagagtgaagctggaatcccccacagtctccacactgaccccctccagcccagggaagctcctcacaagaagcctggccctgggaggcaagaaggactaaggcagcatctgtcccctctgtgattcagagcccttagttgagagcccctgccgcccctgccacccccctgccccgctcccaccattgcccctcctcagctgtgcaaggagaaagcatgcttaggaagttttcaggtccttgtgataaaacctccttaaatctgttcagaccaagcaatgcgagcttcctctcctgtcccatgttggaagttgctctgaaggggtggtagatgctggaagccagacacaaccctgcgtacgctgctcagttggtggagactggggctgggactggagtcagcccagctgggaggaggggctggggaggatctgcagctgaagcccgaggcagggttggtgtgatgccaaggcaaagtggtgaggagaaaacaggaaacgggctttctctgaattggtaaatgggaaagaagtgagcaacttaagattgtcacaattaatcacaagtgtacaggattagactgggtttatatttaactcttgcttcataggtgtaccatttaaagagtgttatttaatgctaagtttaactgctttaataaagtttatttttaaataaaaaaaaaaaaaaaa

SEQ ID NO: 5294 - protein, 320 aa, Homo sapien; identical to SEQ ID NO: 4483

SEQ ID NO: 5295 - DNA, 1535 bp, Homo sapien
gcgcgttcgggagcttcggccctgcgtaggaggcgggtgcaggtgtgggtgctgagccgcccgccgcctggagggggagacagcttcaggacacgcaggccgcagcgagggcccgggcccgggggatcccaggccatggatgctccccactccaaagcagccctggacagcattaacgagctgcccgagaacatcctgctggagctgttcacgcacgtgcccgcccgccagctgctgctgaactgccgcctggtctgcagcctctggcgggacctcatcgacctcatgaccctctggaaacgcaagtgcctgcgagagggcttcatcaccaaggactgggaccagcccgtggccgactggaaaatcttctacttcctacggagcctgcataggaacctcctgcgcaacccgtgtgctgaagaggatatgtttgcatggcaaattgatttcaatggtggggaccgctggaaggtggagagcctccctggagcccacgggacagattttcctgaccccaaagtcaagaagtattttgtcacatcctacgaaatgtgcctcaagtcccagctggtggaccttgtagccgagggctactgggaggagctactagacacattccggccggacatcgtggttaaggactggtttgctgccagagccgactgtggctgcacctaccaactcaaagtgcagctggcctcggctgactacttcgtgttggcctccttcgagcccccacctgtgaccatccaacagtggaacaatgccacatggacagaggtctcctacaccttctcagactacccccggggtgtccgctacatcctcttccagcatgggggcagggacacccagtactgggcaggctggtatgggccccgagtcaccaacagcagcattgtcgtcagccccaagatgaccaggaaccaggcctcctccgaggctcagcctgggcagaagcatggacaggaggaggctgcccaatcgccctaccgagctgttgtccagattttctgacagctgtccatcctgtgtctgggtcagccagaggttcctccaggcaggagctgagcatggggtgggcagtgaggtccctgtaccagcgactcctgccccggttcaaccctaccagcttgtggtaacttactgtcacatagctctgacgttttgttgtaataaatgttttcaggccgggcactgtggctcacgcctgtaatcccagcactttgggagaccgaggcaggtggatcacgaggtcaggagacagagaccatcctggccaacacggtgaaaccctgtctctactaaaaatacaaaaaattagccgggcgtggtggcgggcgcctgtagtcccagctactcgggaggctgatgcagaagaatggcgtgaacccggaaggcagagcttgcagtgagccgagatcacgccactgcactccagcctgggtgacagagcgagactctggctcataaaataataataataataaataaataaaaaataaatggttttcagtaaaaaaaaaaaaaaaaaa

SEQ ID NO: 5296 - protein, 293 aa, Homo sapien
MDAPHSKAALDSINELPENILLELFTHVPARQLLLNCRLVCSLWRDLIDLMTLWKRKCLREGFITKDWDQPVADWKIFYFLRSLHRNLLRNPCAEEDMFAWQIDFNGGDRWKVESLPGAHGTDFPDPKVKKYFVTSYEMCLKSQLVDLVAEGYWEELLDTFRPDIVVKDWFAARADCGCTYQLKVQLASADYFVLASFEPPPVTIQQWNNATWTEVSYTFSDYPRGVRYILFQHGGRDTQYWAGWYGPRVTNSSIVVSPKMTRNQASSEAQPGQKHGQEEAAQSPYRAVVQIF

SEQ ID NO: 5297 - DNA, 1387 bp, Homo sapien
gtggcgggaaaagcgaccttttctgagcgcgtttgcctgttgagtggtagcctttcccctcaaccagcaatggaggagcagccccagatgcaagacgccgacgagcccgcggactccggaggggaaggccgggcaggcgggccaccgcaggtcgccggcgcccaggcggcgtgcagcgaggaccgcatgaccctgctcctcaggctgagagcacagacaaaacaacaactcttagaatataaatcaatggttgatgcaagtgaagaaaaaactccagaacaaattatgcaagaaaagcaaatcgaagctaaaattgaagacctggaaaatgaaattgaagaggtaaaagttgcttttgagataaaaaagcttgcattagacaggatgagactttcaactgcacttaaaaaaaacctggagaaaattagcagacagtctagtgtgctcatggataacatgaaacacctattagagctaaataaattaataatgaaatcacagcaggaatcttgggatttagaggaaaaactgcttgatattagaaagaagagattgcaattaaaacaagcttcagaaagtaagcttttagaaatacagactgaaaagaacaaacagaagattgatttggacagtatggaaaactcagagaggataaagatcatacgacaaaacctacagatggagataaaaattactactgttattcaacatgtgttccagaaccttattttggggagtaaagtcaattgggcagaggatcctgcccttaaggaaattgttctgcagcttgagaagaatgttgacatgatgtaataagaattcatttctgacatattttacatttctggcaatctcaactcttatttggaatacttctgtgcatttgtctgtccaccgtaattttagaaaagcatatccataacgtttacagttgtagtacagttgtggttagttatttgtagtgggattgaaagtaatttttttctttttatatttctatatttagtttgtttttttgttgttgttgttttttgagatggagtctcgctttgttgcccagactggagggcagtggcgcgatctcggctcactgcaacctctgcctcccgggttcaagcagttctgcctcagcctcccaagtagctgtgactaaaggtgcacgccgccatgcccagctaattttttgtattttagtagagacggggtttcaccgtgttgcccaggctgctctcagaactcctgagctcaggcagtccaccgcctcggcctaccgaagtgctaggattacagacgtaagccaccgagcctggtctagtttgcattttttttctatcagttttataagttaagaaataaaaggaattaatgttaaaaaaaaaaaaaaaaa

SEQ ID NO: 5298 - protein, 247 aa, Homo sapien
MEEQPQMQDADEPADSGGEGRAGGPPQVAGAQAACSEDRMTLLLRLRAQTKQQLLEYKSMVDASEEKTPEQIMQEKQIEAKIEDLENEIEEVKVAFEIKKLALDRMRLSTALKKNLEKISRQSSVLMDNMKHLLELNKLIMKSQQESWDLEEKLLDIRKKRLQLKQASESKLLEIQTEKNKQKIDLDSMENSERIKIIRQNLQMEIKITTVIQHVFQNLILGSKVNWAEDPALKEIVLQLEKNVDMM

SEQ ID NO: 5299 - DNA, 2100 bp, Homo sapien
ggcaggatggcgccaccaccagctagagtacatctaggtgcgttcctggcagtgactccgaatcccgggagcgcagcgagtgggacagaggcagccgcggccacacccagcaaagtgtggggctcttccgcggggaggattgaaccacgaggcgggggccgaggagcgctccctacctccatgggacagcacggacccagtgcccgggcccgggcagggcgcgccccaggacccaggccggcgcgggaagccagccctcggctccgggtccacaagaccttcaagtttgtcgtcgtcggggtcctgctgcaggtcgtacctagctcagctgcaaccatcaaacttcatgatcaatcaattggcacacagcaatgggaacatagccctttgggagagttgtgtccaccaggatctcatagatcagaacgtcctggagcctgtaaccggtgcacagagggtgtgggttacaccaatgcttccaacaatttgtttgcttgcctcccatgtacagcttgtaaatcagatgaagaagagagaagtccctgcaccacgaccaggaacacagcatgtcagtgcaaaccaggaactttccggaatgacaattctgctgagatgtgccggaagtgcagcacagggtgccccagagggatggtcaaggtcaaggattgtacgccctggagtgacatcgagtgtgtccacaaagaatcaggcaatggacataatatatgggtgattttggttgtgactttggttgttccgttgctgttggtggctgtgctgattgtctgttgttgcatcggctcaggttgtggaggggaccccaagtgcatggacagggtgtgtttctggcgcttgggtctcctacgagggcctggggctgaggacaatgctcacaacgagattctgagcaacgcagactcgctgtccactttcgtctctgagcagcaaatggaaagccaggagccggcagatttgacaggtgtcactgtacagtccccaggggaggcacagtgtctgctgggaccggcagaagctgaagggtctcagaggaggaggctgctggttccagcaaatggtgctgaccccactgagactctgatgctgttctttgacaagtttgcaaacatcgtgccctttgactcctgggaccagctcatgaggcagctggacctcacgaaaaatgagatcgatgtggtcagagctggtacagcaggcccaggggatgccttgtatgcaatgctgatgaaatgggtcaacaaaactggacggaacgcctcgatccacaccctgctggatgccttggagaggatggaagagagacatgcaaaagagaagattcaggacctcttggtggactctggaaagttcatctacttagaagatggcacaggctctgccgtgtccttggagtgaaagactctttttaccagaggtttcctcttaggtgttaggagttaatacatattaggtttttttttttttttaacatgtatacaaagtaaattcttagccaggtgtagtggctcatgcctgtaatcccagcactttgggaggctgaggcgggtggatcacttgaggtcagaagttcaagaccagcctgaccaacatcgtgaaatgccgtctttacaaaaaaatacaaaaattaactggatgtgatggtgtgtgcatatattctcggctactcgggaggctgaggcaggagaatcacttgaacccacgaggcagtgagctgagattgcaccactgcactccagcctgggacacagagcaagactctgtctcaagataaaataaaataaacttgaaagaattattgcccgactgaggctcacatgccaaaggaaaatctggttctcccctgagctggcctccgtgtgtttccttatcatggtggtcaattggaggtgttaatttgaatggattaaggaacacctagaacactggtaaggcattatttctgggacattatttctgggcatgtcttcgagggtgtttccagaggggattggcatgcgatcgggtggactgagtggaaaagacctacccttaatttgggggggcaccgtccgacagactggggagcaagatagaagaaaacaa

SEQ ID NO: 5300 - protein, 468 aa, Homo sapien
MAPPPARVHLGAFLAVTPNPGSAASGTEAAAATPSKVWGSSAGRIEPRGGGRGALPTSMGQHGPSARARAGRAPGPRPAREASPRLRVHKTFKFVVVGVLLQVVPSSAATIKLHDQSIGTQQWEHSPLGELCPPGSHRSERPGACNRCTEGVGYTNASNNLFACLPCTACKSDEEERSPCTTTRNTACQCKPGTFRNDNSAEMCRKCSTGCPRGMVKVKDCTPWSDIECVHKESGNGHNIWVILVVTLVVPLLLVAVLIVCCCIGSGCGGDPKCMDRVCFWRLGLLRGPGAEDNAHNEILSNADSLSTFVSEQQMESQEPADLTGVTVQSPGEAQCLLGPAEAEGSQRRRLLVPANGADPTETLMLFFDKFANIVPFDSWDQLMRQLDLTKNEIDVVRAGTAGPGDALYAMLMKWVNKTGRNASIHTLLDALERMEERHAKEKIQDLLVDSGKFIYLEDGTGSAVSLE

SEQ ID NO: 5301 - DNA, 2425 bp, Homo sapien
  Unsure 1971-1992: Unknown base
ccgcctgtggctcaaattccaccgccaccaaactgagatgatcattacgaaacagggcaggcgcatgtttcctttcttgagcttcaacataaacggactcaatcccactgcccactacaatgtgttcgtagaggtggtgctggcggaccccaaccactggcgcttccaggggggcaaatgggtgacctgtggcaaagccgacaataacatgcagggcaacaaaatgtatgttcacccagagtctcctaatactggttcccactggatgagacaggagatttcattcgggaaattaaaactcaccaataacaaaggcgcaaataacaacaacacccagatgatagtcttacaatccttacacaaataccaaccccgactgcatattgttgaagttacagaggatggcgtggaggacttgaatgagccctcaaagacccagacttttaccttctcagaaacgcaattcattgcagtgactgcctaccaaaacaccgatattactcaactaaagattgatcataacccctttgcaaaaggcttcagagacaactatgattccatgtacaccgcttcagaaaatgacaggttaactccatctcccacggattctcctagatcccatcagattgtccctggaggtcggtacggcgttcaatccttcttcccggagccctttgtcaacactttacctcaagcccgctattataatggcgagagaaccgtgccacagaccaacggcctcctttcaccccaacagagcgaagaggtggccaaccctccccagcggtggcttgtcacgcctgtccagcaacctgggaccaacaaactagacatcagttcctatgaatctgaatatacttctagcacattgctcccatatggcattaaatccttgccccttcagacatcccatgccctggggtattacccagacccaacctttcctgcaatggcagggtggggaggtcgaggttcttaccagaggaagatggcagctggactaccatggacctccagaacaagccccactgtgttctctgaagatcagctctccaaggagaaagtgaaagaggaaattggctcttcttggatagagacacccccttccatcaaatctctagattccaatgattcaggagtatacaccagtgcttgtaagcgaaggcggctgtctcctagcaactccagtaatgaaaattcaccctccataaagtgtgaggacattaatgctgaagagtatagtaaagacacctcaaaaggcatgggagggtattatgctttttacacaactccctaaagagttattttaacctcaaaaattagctaactttttgcagatggacttggtggtgttttttgttgtcttctttgcctaggttgccaaaaagatgtttgccttccaccttgatgcatcctgttttgtgcaattctctaaaagaaggtgccaaagctttttgattgctgcaggtaactgaaacaaacctagcatttttaaaaaataagattaatggaagactttaaggtattttaaaattcgaagggtatccaaggttctgtatttatttattggggagacactaacaattcaaagaagcaggctgtgaacattgggtgcccagtgctatcagatgagttaaaacctttgattctcatttctatttgtaaattcttaagcaaatagaagccgagtgttaaggtgttttgcttctgaaagagggctgtgccttccgtttcagaaggagacattttgctgttacattctgccaggggcaaaagatactaggcccaggagtcaagaaaagcttttgtgaaagtgatagtttcacctgactttgattccttaacccccggcttttggaacaagccatgtttgccctagtccaggattgcctcacttgagacttgctaggcctctgctgtgtgctggggtggccagtgggactcaggagagagcaagctaaggagtcaccnnnnnnnnnnnnnnnnnnnnnngggagaatttaaaagtgtacagttgtgtgtttagatacactatagaataatgtggtatatattgtacaaatagtctacataggtgtctgggataatgtaaaactggtgctttggctttgtaaagaatttgcaaatcacttaacagctgcaggggcaaggggagagtttcatcatccccatgatatttgggaatattctgtttacttcttagagtagttaagaatgtattcagctactatgtactaacttgaaccgtgtttaaggaaaactccatatttcatcctcttcttgcgccatcccctctccctaacttggtaatgtgaagaaactaaaacctgataccacagctcctataggcattttagagatcttggatttttatgtacagtcttagtcatttttaataaatgtggttcagtaagggaacggaaaa

SEQ ID NO: 5302 - protein, 431 aa, Homo sapien
RLWLKFHRHQTEMIITKQGRRMFPFLSFNINGLNPTAHYNVFVEVVLADPNHWRFQGGKWVTCGKADNNMQGNKMYVHPESPNTGSHWMRQEISFGKLKLTNNKGANNNNTQMIVLQSLHKYQPRLHIVEVTEDGVEDLNEPSKTQTFTFSETQFIAVTAYQNTDITQLKIDHNPFAKGFRDNYDSMYTASENDRLTPSPTDSPRSHQIVPGGRYGVQSFFPEPFVNTLPQARYYNGERTVPQTNGLLSPQQSEEVANPPQRWLVTPVQQPGTNKLDISSYESEYTSSTLLPYGIKSLPLQTSHALGYYPDPTFPAMAGWGGRGSYQRKMAAGLPWTSRTSPTVFSEDQLSKEKVKEEIGSSWIETPPSIKSLDSNDSGVYTSACKRRRLSPSNSSNENSPSIKCEDINAEEYSKDTSKGMGGYYAFYTTP

SEQ ID NO: 5303 - DNA, 1775 bp, Homo sapien
gagatgaaggtgaagatgctgagccggaatccggacaattatgtccgcgaaaccaagttggacttacagagagttccaagaaactatgatcctgctttacatccttttgaggtcccacgagaatatgtaagagctttaaatgctaccaaactggaacgagtatttgcaaaaccattccttgcttcgctggatggtcaccgtgatggagtcaattgcttggcaaagcatccagagaagctggctactgtcctttctggggcgtgtgatggagaggttagaatttggaatctaactcagcggaattgtatccgtacaatacaagcacatgaaggctttgtacgaggaatatgtactcgcttttgtgggacttcttttttcactgttggtgatgacaaaactgtgaagcagtggaaaatggatgggccaggctatggagacgaggaagagccattacatacaatattaggaaagacagtgtatactgggattgatcatcactggaaagaagctgtttttgccacatgtggacagcaagtagacatttgggatgaacaaagaactaatcctatatgttcaatgacctggggatttgacagtataagtagtgttaaatttaacccaattgagacatttctcttgggaagttgtgcatctgacaggaatatagtactgtacgatatgaggcaagctactcctttgaaaaaggttatcttagatatgagaacaaatacaatctgttggaaccctatggaagctttcatttttacagcagcaaatgaagattataacttatatacttttgatatgcgtgcactggacactcctgtaatggtccatatggatcatgtatctgcagtgcttgatgtggattactctcccactgggaaggagtttgtgtctgctagtttcgataaatctattcgaatctttcctgtagacaaaagtcgaagcagggaggtatatcatacaaagagaatgcaacatgttatctgtgtaaaatggacttctgacagcaagtatattatgtgtggatctgatgaaatgaacattcgcctgtggaaagctaatgcttctgaaaaattgggtgtgcttacatcacgagaaaaagcagccaaggattataaccagaaattgaaggagaaatttcagcattatcctcatataaaacgtatagctcgtcatcgacatctaccaaaatctatctatagccagattcaggaacagcgcatcatgaaagaagctcgtcgacgaaaggaagtgaatcgtattaaacacagcaagcctggatctgtgccacttgtgtcagagaagaagaaacacgtagtggcagttgtaaaataattggtattcctaacaatcctgatgtataattatttgttacttttgatttgagaactctacaaataaaagtgctgggactagattaattgcaaacattttagttatatgtgtagagctttattgttactccttttagctaccctgaaaaatgatccttaaaggtggcctagttggtaagactgttttatccttaatctgcattcttctttcattgtagaatacagtatttgcaactcattttttcttgtttttattacagatatacttactttctctttgatctattattgtagacactatacattcaaattgacatttaagaccaaacatctcttatgttatctttaatattactttgaataatgattgcaatgatgtttcttcctgtgattccacataacatttagaataatgatgtcaattttttacaactg

SEQ ID NO: 5304 - protein, 445 aa, Homo sapien; identical to SEQ ID NO: 4633

SEQ ID NO: 5305 - DNA, 2736 bp, Homo sapien
  Unsure 766-791: Unknown base
atctgtgacccaggccttactgcttttgaacctgaagctttgggtaatttagtggaagggatggattttcaccgattctactttgaaaatgctttgtccaaaagcaataaaccaatccacactattattctaaaccctcatgtacatctggtaggggatgatgccgcctgcatagcatatattaggctcacacagtacatggatggcagtggaatgccaaagacaatgcagtcagaagagactcgtgtgtggcaccgccgggatggaaagtggcagaatgttcattttcatcgctcggggtcaccaacagtacccatcaagtaaatatttccaggctgtcagcttctttgttaatacacccatgctaaatttcaacagtgccacttctgcattctctgttctcaaggcacctggatggtgaccctgggccgtcctctcctcctcttcatgcatgtttctgagtgcatgaagttgtgaaggtcctacatgtaatgcatatgtgatgcatcatcttatcatatattccttcctatacattgtttacacttcaactacggggatgttccacacaaacttaaattactgttggcaaaacaatagggggagattagacaaaaaaaaatccacaatattccaagtacaactcttcatcaagtttctctgttaatgccaagatttaacagacttaagaactattgttctctgaatgacagttgtaagagaaatgtaaattttttagaactctttgctgttaatctgttttggnnnnnnnnnnnnnnnnnnnnnnnnnnaagggttaaaaaaaatacaccttcagtttcctggtgtgatcctggttaaaatggatgatttttcattgaaagttttgctgattaacaattaaagtgggatgatatgtgggcaaaatcacttatgaaagtagaagcaagaatcagttggtttgctaccacataaagccatgctgtttttggtcaaactgtgtaaactggaaaaattcacatcatttctgagtttaatcactttaggatatattcacattgttttggtgaatttgctgaattgaattgtttttctttctcaaatctgtgatctcttttctttatcctgtttctttgttcctttcgtttgctttcttatttttcttttgttccattcttttcttacttttttcccttttccttttttggggaggctggctagtagtgtgtgagaaaagaatagaagtgaaatttgcataatgaatgtaaaagggaaataaaagtcttttgaaggtagctatactagcacttttgatcatcttcagggcccacaaaaatgttgtcaagattttaaaggtttataattctgcttaagctctagtttggacttaggtatcctaactatgttggaggtatttgcattgtttaaagttaggataaaagcaagttcctcctgtgactgcaacgtcttactgattgggacagttgccaggaggataccaacttgatagcagagggggttttatgcaaacgcactcacctccgccttggggaatgaaagggtcacttctgcatcatcactagctagttttctagtgttagagaggcttacaaatgtttgccattctcataagtgttttgaacttgatctttgtgacttgtgcttttttagcttctctcttgaatcagagtatcattgtcttcctccaaggagttagaatttcccagtttaaaacaaaaagggaaatgtcctaggttttctttgtgcttctcatttttcctttgttgattcaattcctgtgatttttgttctcttccctgaagtgctttacagtgcatggaatctccatcattgttattttaacgatagtaattcacagtcctcagaagcctatttttaaagcagaagcaaaaaagaaaaacaaaataacaaaaacaacccttcctcttttctctcatctcacctctctgtgttgattactaatcatcttagatattattgctagtggatgtatggtagatgggttgaagcttttctgataattattacacaatttaaaacaacatatatatttaaaataaatatatacagtaaatatattgagccatgttaacctgccaatgagatctgtgaaaaaataatggcctcatttttctctttttaatttcttttacccttttgtgaagcagctatacgtggcatacatgtatttaaagaaaaaaaaatagatgtagagtgttttttttacacttttaacttagcatgtggtgttgaagtattactgtagatcaagtttgtcttccgcactaagatgtgaggaaattgtgatttgttctctccaccacaaatgaattacacatttattatcttctatcattttgaaacactgcagtttaccatgggacactgtatatatttcttgccataatggtaaaggactgattgatatatttaagagttaataaatttgtgatttctgctgacagtgcgtccatctttatttcttcagaagaggtactgtatgtatgcctgcatagtgctggccagtgtcaagggcagtgtgtcctactctggtctcatttagtacataacaatttgcacttggtgagaatggcaagttaattgttctctgtgagcaaaacaatggtctcttctgggaaaatgttgctgagaacaaaatagttaacaactaagactcctaaaagcttctctaaactgtaccctccaatccagccttcacatggctgcttttttttt

SEQ ID NO: 5306 - protein, 107 aa, Homo sapien
ICDPGLTAFEPEALGNLVEGMDFHRFYFENALSKSNKPIHTIILNPHVHLVGDDAACIAYIRLTQYMDGSGMPKTMQSEETRVWHRRDGKWQNVHFHRSGSPTVPIK

SEQ ID NO: 5307 - DNA, 2025 bp, Homo sapien; identical to SEQ ID NO: 3894

SEQ ID NO: 5308 - protein, 223 aa, Homo sapien; identical to SEQ ID NO: 3895

SEQ ID NO: 5309 - DNA, 1701 bp, Homo sapien
aaaaaaagaaaaaaaaataagtgagctgaactcacctgaagtggtttacttctgtgggttaagaagttctagtcagtgttcatagtcgtttcgttttgataattgttgaaccaattttgtttttaaaacctttagactctgaaagtaatattttgactaagaatgtaaatatttccaaactaaattactcgggaagtaaacgctttttttaaaagtatttttactggttttataccaatattatatgcagaaatcacaggatgaatttagaattaaatctcaattagttcactttggcctagatttatgaaaaatgcatgcctcgtaaagagtccactgtattcacgagtaaagttgcttttagtgttcacttgatgacttggagagtaggaattttgcaaaatctgaatttaaggaaattctttaggataaccatttcaaaaaataaaattgctatgcaatcttgaatattttctcttttgcctcgtaaaatgaaaatgcattcacagtttctgtaaattatttagcagccttaaagtttatcaaaaaattgtccagattccacgtgcagcatgcttggccctgcatttaatttaagaaggattaataataatgctctgaatttttcgaaagggattctcctaaacccacccacttctcttgcccaggctgctttttaaaaatatttttttattttttacttatttttaaattttctctttttatttatttttggttttcttgttagccccctgttatatgggagaacgaaaattgttatattttgaaagtacttattacattatttttattttagtatcttgatgctcctgtcaaaagggaaatgaggcttttaaaaataaagtaccttaattctttattgactttttgccctaaattgctaggtgtgacccagcaatcttttaggaagagattttacagtggtgctttatttatatcaataatccagtatagttaggctgttcattcctcataatagagtacataacagaaaagtgggactttcacattttcatatttaggcacgttccaatttaattccaaaaatactctgtaattctacatctaaaaaaaccgattccctaattcgaatttattggtaccaaagctctctttggctatagacaattaagagttgaccttttaagttaatgtatatgcttaaaaacagttttaggaaaatatttggtagacaaagagtttcaactttaaatgttcactatgtcatttagtgtccaactttacggataggttgactatctaaataggcatttttagtcattaaaaaaaatctagtcaccaggaggatccctataactcaaaataacttgtttgtaaaagaaaatttgtttacttacccattagtaagttcctgcatattcattataagatggcaaatcaaacttttctaggatgaagacagcttatttttaagttgtatagtcttagttggtttagggtctcaattttaattaataaaatacttggtttttatttgcttgtccttttgaattcctgttttaataattttaaaatgagcacaaagaatgttgaagttcagattaatctcttctgaatgatgtttttttcctctgtgatgagttgtttctgacttttttccttttgtatttgtaatgttgattaagatgtaaaataaaaagtgtgcctgattatttttgc

SEQ ID NO: 5310 - protein, 27 aa, Homo sapien [sequence omitted]

SEQ ID NO: 5311 - DNA, 4056 bp, Homo sapien
  Unsure 2136-2387: Unknown base
attgaaggaattaggaacaaagtataaatactcacttttaacagatggttcttgggatatgagtaagttcttgaacattcagtgtcaactcagcaggctcaaataccctccttttgcgaaaaagtggatcaatattcggaagtcatatggaaatttttacaaggttcctagaagccaaaccaaactgacaataatgcttgaaaaattaggaatggattatgatgggcggcctcactgtggtcttgatgactctaagaatatcgcccgaatagcagttcgaatgcttcaggatgggtgtgaactccgaatcaacgagaaaatgcatgcaggacagctaatgagtgtgtcctcttccttaccaatagagggcactccaccaccacaaatgccacattttagaaagtaacagttttgtgtgtggatcattccaattgaagttgctatgaagaggtagcagatgaatctcattgaattagtcctgtagtgcaaactttaagcaccttaaaacatttaaaatcttattacaggtgatagagatagatacatgtatgtgaacagattttgtaggaaggcatactgaattctttgtcaccagcacttttgatatgaacagtattcgttacatagtaacagttcctgcttacaactgaattttataatttaaggtgttcaagatatattctttttggttttaaaatgcaaaatcttattggctgttctgttgaatgtcatatcttactggtgtttaaatatgtaatgtgtttctttattaacatcactagatgaaaccatatcttaaaatgcagaaatgattggaaggtagatcttatctagcctttggatttcaagaatatcatagtccttttgattttcaaagtttatatgtgaagttcaccatgtatgtggtgaatttcgtaaggtacttggtatacatatctgcctatgtttcttttcaactcataattggaagaattatgatggattatagggtttggttaaaaatccagttactgaaggaattaatgaaaacgtagaagaaagtactaaaaggaatatcataagggctgtagctcaaacttcataatacataaatcactggggtctttttggatttggttgtttgattcgccttccttttttgacatatgtatgccttaattcttaaatctgagggaccatgctttgaaatagactgaaaattaagggtcaccacctaattttactttgtattcagtatcgtaagtgaggttaataaagtcaatactttctaccatatattacgtttttgttattaaaaaacttcattggccactagtgaagttagtcaataaaagacttgtttttctgattttacatagtaaatggctgctaagtattgagtaattcttaactaattctaaaaactaaaatgtgcatttcgacttgataaggtaaaactcttatctagaggctaaacccatgtattttcagaattgaatttttctccttgtagctttcagggaacaatttcattgacattgcttgcttcctgccttttaccttttaataaaaattgtgatgctactttattctaaagatttatattttataaccagatgaatttcctcaaaggtttccaaacctatatcatatagggtgaaaagcaggaaagtagacatttttcttggcgtgggaattctctacatagggcagtagatttcttaagccaatgaatttctgcttttcagcagtagtcatataatcagtatcataaagaataatgtgtaaataacagaaggcatatgagagtgtggtgttcctagatgagctgttacagattatagtaaaataaggaaatctaagtgctttaagtttatacagttaactcttaggataagagggatgtatgctgagatgtttgtgcatcccagatagcactgtacgataacctgtaaagtattactgaatactgaatagctgaaactgcaattggaaaatctgatgatgacgaggaaatattacgtttccagtctttttagctctatctgctaatttctttgcctgttttcactttcgccaagtaccaacaagctcatgttgtatttctttttaagaacttcaacattataagctctcagtaccctattttgttgttgnnnnnnnnnnnnnnnnnnnnnnnnnnnnnnnnnnnnnnnnnnnnnnnnnnnnnnnnnnnnnnnnnnnnnnnnnnnnnnnnnnnnnnnnnnnnnnnnnnnnnnnnnnnnnnnnnnnnnnnnnnnnnnnnnnnnnnnnnnnnnnnnnnnnnnnnnnnnnnnnnnnnnnnnnnnnnnnnnnnnnnnnnnnnnnnnnnnnnnnnnnnnnnnnnnnnnnnnnnnnnnnnnnnnnnnnnnnnnnnnnnnnnnnnnnnnacgtgagccactgcgctcagccatagattttactgtcttaacccattttaattcctctgttgagtctctgtcctcccctccaatttgatttgggattttgctgatgagatgatactaaacattgagagtactgctttttactctgacttttattgtgttgtctttgaaagacaaatagtacaactttttacaaggaaacacgtaagagatggatgtccatgaaaacaatattagtatattctattattgtttcttattaatagttacttagtatttacaaacaatttattattagctgtgttaacttttattctatgcttcatatgctctgacattgacatagtggatttctgctgatttttttcaaatccgcaatctttataaccaactgaagtatataatagagcattacattttatctttatttgtgttctgttggatcaagtatttaacatttgctctgaaaaaaatgtttttgtgatgtgtctttgttgccttgagatagatccatttatcctgcctcctagggagaagtttctgcctggattgaaacaaaaaaacacaggtgtcacaagcatgttacctattaagagagagagggtatctctgaagactaattaaaatggtaatttttaaaaagatgtgaccagttgacttttagtatatcatcccaagtattatccccaaaatgataatgcaaaacagaataatttggagaccaggagaaaaactggtatgattactggggaggggaagaagcacaggtggtcaagataataatgcatgtttggcctcagctgtagttgccaaagaaactacctgcctcacagatgagcacgcacgggtgcattgtcaaagtctgagaaggatgtattgtactttgaaggaagactttccatttctaagctaccatggagaagtatatgctcctcgagaccagagactgtgacttctgcatctttgattccagcgacatatgataaaatgttttgcacatagttgaatccagcgttgatacatgaaggacagcattacatcttttttctattatacttagaaatttcctctttgttctgcaccaccaacctgtatatcaagcctccttgccccacaaagcttccaaagcccgtaaatttgttaatctagagcaggggtcagcaaactaccacccatgggccaaatctggcctgctgcctatttttgtatggcctacaaactatggtttttatattcccttttgttaatggctcaaaataatattttgtataatatgaaaattacgagattttagtttctctaaataaagttttggaaagaactaccattctcatttgttttcatgtcatctctgaccacttttgtgctacaatggcagagttgaatagctgcatcagtggcaccatctggccagcaaggccaaaaatactactgtctggccctttatggagaaagtttgcctacccttacctcccttatgtaatgcaatatataagttccatcaacaaacaagaaatgcgactgtgatgagagcgtagagctgaatgttaaggtacaataatgatacttgcatcagacatttatggagcactgttaagtactttactccattgtttagtaagaatctggtgatggagagaggcattctccggcagtttacagatgggaaagt

SEQ ID NO: 5312 - protein, 134 aa, Homo sapien
LKELGTKYKYSLLTDGSWDMSKFLNIQCQLSRLKYPPFAKKWINIRKSYGNFYKVPRSQTKLTIMLEKLGMDYDGRPHCGLDDSKNIARIAVRMLQDGCELRINEKMHAGQLMSVSSSLPIEGTPPPQMPHFRK

SEQ ID NO: 5313 - DNA, 1239 bp, Homo sapien
ggggggagtcgagcgggtgctgctagcggaggcgccatattggaggggacaaaactccggcgacagcgagtgacacaaataaacccctggacccccttgttccctcagctctaagggccgcgatgttgtacctagaagactatctggaaatgattgagcagcttcctatggatctgcgggaccgcttcacggaaatgcgcgagatggacctgcaggtgcagaatgcaatggatcaactagaacaaagagtcagtgaattctttatgaatgcaaagaaaaataaacctgagtggagggaagagcaaatggcatccatcaaaaaagactactataaagctttggaagatgcagatgagaaggttcagttggcaaaccagatatatgacttgcagcacttctaaaagattgaaaacaccaagaagatagatagaatattcactatttctcatattgatgcaattgtggtgctctttttcatttgaaacatcttctcctaaaatatacactttaagaaatagtcatttctgtttttgcattaaagtaaattaaagcagaaaacacatgctcacttttggctaacttcagtgtatagatttcatacttatgttgtctttcctgggtacagatttattactgaacaagtacgtgtaagtaaaatgtcattggtgagcaggacacaagataaaaggtgaacaccacatatggtgtgaattgtaaatgcttataccacaaacttgaaaatgtgtcatgtagagccatggaaaatgtctagttgtttttatgtagtacacacattttaatggtgctaacaacctgggctcttttgttcatagagttattctgaaaaaaatttcataaaagacactgcctaaagataggtagaataggctgtagcttgatttactgtggaataaaaaccaaaaaaaaaaaggtcttaattgtttcagtctttaattatgtctataaacttagaaaaaggcatttacatttgaatctagactaatttgtttagtaacattcttcctcatattcaatgactgtatgtatcagtccttatttagagactgcctgctttttaattcatatagctttttggttctattctttgttttgtttattattttgttgttttattgcttgttagacctttactaaagatattttgtgtatttagaaaaaatataacataaatatatgctttttaaatatgaaaaaaaaaaaaaaaaaaaaaaaaaaaaa

SEQ ID NO: 5314 - protein, 92 aa, Homo sapien
MLYLEDYLEMIEQLPMDLRDRFTEMREMDLQVQNAMDQLEQRVSEFFMNAKKNKPEWREEQMASIKKDYYKALEDADEKVQLANQIYDLQHF

SEQ ID NO: 5315 - DNA, 3621 bp, Homo sapien
ggcacgaggcctggctgggacggaagttgcaccacaagtacaattagtttcagttttgtttcttttccaggcacccagcaacggcggcctccaggcctcaggccccctcaccatcctagaggtcaagatcagctctggctagttctcacaggtctgacccaacaagtagcactgacatttttacgtttgctggatgtacacacggaagtggaggaggaggaggagaaggaggagggcagctccttagctcaagagcaagtggcccaaggcctcagaagactagaaggaagttcctggccattcagcatggtttcccacgggtcctcgccctccctcctggaggccctgagcagcgacttcctggcctgtaaaatctgcctggagcagctgcgggcacccaagacactgccctgcctgcatacctactgccaagactgcctggcacagctggcggatggcggccgcgtccgctgccccgagtgccgcgagacagtgcctgtgccgcccgagggtgtggcctccttcaagaccaacttcttcgtcaatgggctgctggacctggtgaaggcccgggcctgtggagacctgcgtgccgggaagccagcctgtgccctgtgtcccctggtgggtggcaccagcaccggggggccggccacggcccggtgcctggactgtgccgatgacttgtgccaggcctgtgccgacgggcaccgctgcacccgccagacccacacccaccgcgtggtggacctggtgggctacagggccgggtggtatgatgaggaggcccgggagcgccaagcggcccagtgtccccagcaccccggggaggcactgcgcttcctgtgccagccctgctcacagttgctgtgcagagagtgccgcctagacccccacctggaccacccctgcctgcctctggctgaagctgtgcgtgcccggaggccgggcctggagggactgctggccggtgtggacaataacctggtggagctggaggcagcgcggagggtggagaaggaggcgctagcccggctgcgggagcaggcggcccgggtggggactcaggtggaggaggcggctgagggcgtcctccgggccctgctggcccagaagcaggaggtgctggggcagctacgagcccacgtggaggctgccgaagaagctgctcgggagaggctggcggagcttgagggccgggagcaggtggccagggcggcagccgccttcgcccgccgggtactcagcctggggcgagaggccgagatcctctccctggaaggggcgatcgcacagcggctcaggcagctgcagggctgcccctgggcaccaggcccggccccctgcctgctcccacagctggagctccatcctgggctcctggacaagaactgccaccttcttcggctgtcctttgaggagcagcagccccagaaggatggtgggaaagacggagctggtacccagggaggtgaggagagccagagccggagggaggatgagccgaagactgagagacagggtggagtccagccccaggccggagatggagcccagaccccaaaagaggaaaaagcccagacaacccgagaagagggagcccagaccttggaggaggacagggcccagacaccccacgaggatggaggaccccagccccacaggggtggcagacccaacaagaagaaaaagttcaaaggcaggctcaagtcaatttcccgggagcccagcccagccctggggccgaatctggacggctctggcctcctccccagacccatcttttactgcagtttccccacgcggatgcctggagacaagcggtccccccggatcaccgggctctgtcccttcggtccccgggagatcctggtggcggatgagcagaaccgggcactgaaacgcttctccctcaacggcgactacaagggcaccgtgccggtccctgagggctgctccccttgcagcgtggccgccctgcagagcgcggtggccttctccgctagcgcacggctctatctcatcaaccccaatggcgaagtgcagtggcgcagggccctgagcctctcccaggccagccacgcggtggcggcactgcctagcggggaccgcgtggctgtcagcgtggcgggccacgtggaggtgtacaatatggaaggcagcctggccacccggttcattcctggaggcaaggccagccggggcctgcgggcgctggtgtttctgaccaccagcccccaggggcatttcgtggggtcggactggcagcagaatagtgtggtaatctgtgatgggctgggccaggtggttggggagtacaaggggccaggcctgcatggctgccagccgggctccgtgtctgtggataagaagggctacatctttctgacccttcgagaagtcaacaaggtggtgatcctggacccgaaggggtccctccttggagacttcctgacagcctaccacggcctggaaaagccccgggttaccaccatggtggatggcaggtacctggtcgtgtccctcagtaacgggaccatccacatctttcgggtccgttctccggacagttaaaggggctaggactagggtgagagggagtggggagggagagggcaggaaggaggcagagctgtccgtgggaggtggaggccgaggacattttcctgaagggcaggggttggcaacttttcaacatggagtgccaaactgctaacccgtcttctagtgtgtagaatagggaccaaggtggtggcgtgaccttaactctcagaagcagaggaggcaggtgggtggagggggatgctgggaattcacctgcctcttgctttttgtgggtggctgctgccaccaccgccgctgctatatagtttaggtttctgaggtttgtgagcctgtcctgctttgcattcttcaaaaccattcctgatagagtagccgagggagagtcttggggccaagaagggcccagggtgggtcaggcgtgtgcactgtggaacagagctgagaccccggccccccttggactggcacagggtcctacagagtcagaggaggcctgagatttcgaatgggcagtgaatggcctcttctgccagccacaggcaggatgctccttgatcacggcatcccccggcggtagtacagggtgagcttgcaggagggtctgcaagtgcagacagcagctggggccaaagaggtgttaggttcaaaggctgcgaagagaataggctactggaaaaccaaacccaacagaattcacgtccaaaaatccacattctccatcgcttctcagccttttggctaagattaagtattaaaaaaaaaccaggctctgccaggcgcagtggctcatgcctataatcccggcactttgggagtctgtggcaggaggattgcttgaggccaggagtttgagaccagcctgggcaacatagcgagaccccatctctacaaaagattaaaaattagctgcgtgtagtagcatatgcctttcaacgtagctactcaggaggctgaggtgggaggatcccttgagccgaggagtttgagtctgcagtgagctatgatcgcaccactgcattccagaccccatctcgaaaaaaaaaaaaaaaaaaaaaa

SEQ ID NO: 5316 - DNA, 630 bp, Homo sapien
  Unsure 325: Unknown base
  Unsure 355: Unknown base
  Unsure 361: Unknown base
  Unsure 384: Unknown base
  Unsure 386: Unknown base
caggcatgggccactgcgcccggccaataatttttgtgtgtgtgtgtgctaatcatactacattttctttagaataaaagatcacatacttgtttgccattcgcagtctggccccattgtgccattctagacttacctcctgccactccccaccagctttgttttgtcttagccacacaaaataatctagcgtctctaaccagtcaaacattttaccttgtgccttggctcactctgtgccttttctccagaatatctttctgtgtacttttctcccatccttttacctttaaacctgctgctatggtttgcatgttgtttgggnactccaaaactccatgttgtagttcaattnccaatntaatagtgttgggagatggtatntnaagaggtaattaggttgctaagatggattaacatctttctcttgacactgagactgggttctcctgggaatggttagttcccaagagagtgagttgttataaaacaatgctgcctcttctattttgcgctttttgtttgcacaaactcggtccccttctgtttctctacgatgttttgatgcagcatgaggcagtcatgagaacccaccagatacagctgcctgatcctgaatttcccagccaa

SEQ ID NO: 5317 - protein, 15 aa, Homo sapien
MRTHQIQLPDPEFPS

SEQ ID NO: 5318 - DNA, 2095 bp, Homo sapien
  Unsure 1076-1104: Unknown base
aacagtctggagctgctgctgccccttcttcctttactttggccgtcatcctagagggaatgtactggaattaaacgtcgagtcatattcttccctcttagagcaacaaaatttgaatgtttctctcactttctggaatttttaaaaagcaaactttttaagttattttttcagattttatttctcattagccttttttccttgaactccattttggagtgcaccctgtagttgtaagagcattgtgctgagagcgttccccaaatgagggtctgcagcttgcactgacccctgagttcctcacccaccagccccgtgccgacccgtctaacccgtgtgggggtgctccactcaaataggcccttggcagaaaagattgtccgttctgtccacacactgcctggatacagtctccagctctaggagatggaattggtttgctccatttagaaatagatcaaaactgggcattcagtagatggtaccaatatcttcctgtactgggaaatactaaatttagattgtgaatatttacctaatgataatttttagagaaggagatatcatagatgagtatgattgggaagttcagaaaactaaaatttgatttttacagccatccaactatagaatcattagaatttagtcatttatggataaattaaaatgaacacctggactcttgttaaaatcagaaagtccaaaccaaagataggcacttcccattcaccattctgttttaaagcagtaaaaattgaggtgcccttggatatccacaagcctaaattgagtacacccttgaaccagagcccctcagttaatggggtgaccgacatggggtagctgatcccagggggcattcccctctcgagctggccctgcactgggtggcctggggattgtgcttccttgcacagtggtgcacatttctatgtgtggatgagattttcttgtcaacttttcctgccaagacactaaatgcttttcagtgctaatactgacctgatagtagagatttctttccctgagtcggatggtagcaggatttacttggtaacccttggtttaaaataccnnnnnnnnnnnnnnnnnnnnnnnnnnnnntttttaaggaaataagatcaataggcggagggaaattgtttctatatgcacttattaaataatttttgttaacaaccctgccctgggataaaagtgaatggaagtacatgactgagtaacagtaattaattctttgccctgatcgtttatttggggactgtatatgctttcttgactgacaatagaatgttgtattagttttcattgtgtctttatttgcagttcacagcacttttgttttccatatgctacaaactaaaagtttagcaattacgttatattccaattctggagtccagattgtacaaattagatgaaattctaattcgtcattttaggaagaaatcaattacctaaaattactggctcttttcaacataccctttagtatgtaaaaaaataagcttcaaatgcgtgggttaaagttaactatcaatcccagtttaagaatgatatttctgtaagaaaactgctttattttccaagttgtagtatttaacataggctgagtcacaaataagtttttaattgtatcttaatgcagttgtctctgcctttcaagtcactttgattgaaacattttaagcagaacaaatatagccaataatttaaaataatcaccccaaaaccatttctcaaacctgctaaaactttgagcatgtgaataattttctcctcttcacattcttcttatgtgggaaggaagtgaatttgaaatattaaaatctgccctttggaataggctactttggccgtttataacttgatttctactcggggaggaaggtacattcccaatagctttccaattgggatatcctgtgatatgattggcaggctgtccgagtagttacacttaataaaatttgggttcgaaagcagattcctggaagttcaaaaataattaaaacagccccggataggttagaaagtgaacttaaatcattctcagaattagaaaataagaagttattttttatcttcaaagata

SEQ ID NO: 5319 - protein, 47 aa, Homo sapien
TVWSCCCPFFLYFGRHPRGNVLELNVESYSSLLEQQNLNVSLTFWNF

SEQ ID NO: 5320 - DNA, 3103 bp, Homo sapien
cgaggcggtagagcggagaaagcctattttcttttcgtttagatacattgccttttgcctaggctggcgtcgagacttgaggccgttgcagactttggcgcggctcgcgcctcctgcttcaagagcccagcggtgagagctggcctgcggcacgcggcctaatgccagtcacaactgtggagagactatgaggccctgaactttggcgttaccaatgaaaagggaatggattcaaggccaggcatggtggctcacgcctgtaatcccagcactttgggaggccgagacagtaacagtttggaggatcaagatgttgaccaacttgaggatatttgcaatgagtcatcagacaatacccagtgtgtatattaataatatatgctgctataaaataagagcaagtttaaaaagattaaagccacatgtgccgcttggaagaaattgcagttctctaccaggcttaataggaaatgatatcaaatcccttcattccatcatcaatcctcccatagctaaaatccgtaatattggaattatggctcatattgatgcaggcaaaactaccaccacagaaagaatattgtactattccggatatacaagatcactgggagatgttgatgatggagacacagtgacagatttcatggcccaagagcgagaaagaggcattactattcaatcagctgctgttacatttgattggaaaggttatagagtcaatctaattgatacaccaggtcatgtggactttaccttggaggttgagcggtgcctaagagtgttggatggtgcagtggctgtatttgatgcctctgctggtgtagaggcccagactctcacagtatggaggcaagctgataaacacaatatacctcgaatctgttttttaaacaagatggacaaaactggagcaagctttaagtatgcagttgaaagcatcagagagaagttaaaggcaaagcctttgcttttacagttaccaattggtgaagccaaaactttcaaaggagtggtggatgtagtaatgaaagaaaaacttctttggaattgcaattcaaatgatggaaaagactttgagagaaagcccctcttggaaatgaatgatcctgaattgctgaaggaaacaactgaagcaaggaatgccttaattgaacaagttgcagatttggatgatgaatttgctgacttggttttagaagaatttagtgagaattttgatttgttaccagctgaaaagctacagactgcaatacatagagtgacactagctcagacagcagtgcctgtgctttgtggaagtgccctgaaaaacaaagggatacagcccttgttagatgctgttactatgtacttaccttcacctgaagagcgtaactatgaatttctgcagtggtataaggatgacttatgtgcattggcatttaaagttctccatgacaagcagcgaggaccactggtttttatgcgcatttactcaggcactataaaaccccagttggccattcataatattaatggaaactgcacggagagaataagtcgtctgcttttgccgtttgctgaccaacatgtagaaatcccttcattgactgctggtaacattgctttgactgttgggcttaaacatactgccactggagacaccattgtctcatccaagtccagtgcattagctgcagctcgtagagccgaacgggagggagaaaagaagcacagacaaaacaatgaagcagagagacttttattggctggagtggagattccagaacctgttttcttctgtaccatagaacccccatcactgtctaagcagccagatttggaacatgcgttgaaatgtcttcagcgtgaagatcccagtttgaaagtgaggctagatcctgactctggacaaactgttctgtgtggtatgggggagttacatatagagattattcatgatcgaatcaagagggaatatggactggagacctatctcgggcctctccaggtggcatatcgagagaccatcctaaactcagttcgtgccacagataccttagatagaactttaggagacaaaaggcatcttgtgactgtagaagtggaagcaaggccaattgaaacatcatctgttatgcctgtgattgagtttgagtatgctgaaagtatcaatgaaggccttttgaaggtctcccaagaggccattgaaaatggaattcacagcgcatgtctccaaggaccattgcttggatccccaattcaggatgtagcaattactttacattccctgacaattcatcctggcacctccacaactatgatttctgcctgtgtctcaagatgcgtgcaaaaggctctgaagaaagctgataagcaagttttggagcctctgatgaatcttgaggttacagtagctagagattatctcagccctgtcctggcagatctggcacaaagaagaggaaacattcaggaaattcagactcgccaggacaacaaagttgttattggatttgttcccttagcagaaattatgggttattcaactgtgcttcgaacgctaacatcaggctcagctacttttgccttagaactatctacttatcaagccatgaatcctcaagatcaaaatacactgctcaaccggagaagtggtttgacctaaatgttttagtttttggagagaaattcaggagcacctagctacttcattttcagtaagaacaatttttattgctttatttattggacgaataaagtactgtttcagtacattcagagaactagataaaagatataacttaagctttgatagtggcactggagccacccattttaatttatataatgagaaatgtgctttgatgtttaaagccactgtacctgaatcatgctgttcatctatgaagttattactataagtagccttcagaagagtggtatcacaaagttgtgtttcttttgtgtccttaagcttgtctcacaagaaagatgccaggcctctaaatgtaataagatagagggtcaaaggttcaatcaataaaaatattttattcaaaaaaaaaaaaaaaaaaaaaaaaaaaaaaaaaaaaaaaaaaaaaaaaaaaaaaaaaaaaaa

SEQ ID NO: 5321 - protein, 779 aa, Homo sapien
MLTNLRIFAMSHQTIPSVYINNICCYKIRASLKRLKPHVPLGRNCSSLPGLIGNDIKSLHSIINPPIAKIRNIGIMAHIDAGKTTTTERILYYSGYTRSLGDVDDGDTVTDFMAQERERGITIQSAAVTFDWKGYRVNLIDTPGHVDFTLEVERCLRVLDGAVAVFDASAGVEAQTLTVWRQADKHNIPRICFLNKMDKTGASFKYAVESIREKLKAKPLLLQLPIGEAKTFKGVVDVVMKEKLLWNCNSNDGKDFERKPLLEMNDPELLKETTEARNALIEQVADLDDEFADLVLEEFSENFDLLPAEKLQTAIHRVTLAQTAVPVLCGSALKNKGIQPLLDAVTMYLPSPEERNYEFLQWYKDDLCALAFKVLHDKQRGPLVFMRIYSGTIKPQLAIHNINGNCTERISRLLLPFADQHVEIPSLTAGNIALTVGLKHTATGDTIVSSKSSALAAARRAEREGEKKHRQNNEAERLLLAGVEIPEPVFFCTIEPPSLSKQPDLEHALKCLQREDPSLKVRLDPDSGQTVLCGMGELHIEIIHDRIKREYGLETYLGPLQVAYRETILNSVRATDTLDRTLGDKRHLVTVEVEARPIETSSVMPVIEFEYAESINEGLLKVSQEAIENGIHSACLQGPLLGSPIQDVAITLHSLTIHPGTSTTMISACVSRCVQKALKKADKQVLEPLMNLEVTVARDYLSPVLADLAQRRGNIQEIQTRQDNKVVIGFVPLAEIMGYSTVLRTLTSGSATFALELSTYQAMNPQDQNTLLNRRSGLT

SEQ ID NO: 5322 - DNA, 4644 bp, Homo sapien
agccaagcccagcagagtggccccactggccagccgagccagcccccaggcacagccaccacgccactggagggtgacggcctctccgcgcccaccgaggttggcgacagccccctgcaggcccaggctttgggagaggcaggagtggccacaggaagtgaggctcagagcagcccgcaattccaggaccacacggaaggggaggaccaggacgcttccatcccctctgggggcagaggcctgtcccaggaggggaccggtccccccacctctgctggtgaaggccattctaggactgaagatgctgcccaggagctcctgttgcctgagtcaaaaggaggcagctctgagcccgggacagaactgcagaccaccgagcaacaggcaggggcctcagcctctatggcagttgatgctgtagctgagccagccaatgcagttaaaggggccgggaaggaaatgaaagagaagacccagagaatgaaacagccaccagcaaccactcctcctttcaaaacacactgccaggaagctgagaccaagaccaaggacgagatggctgctgctgaagaaaaagtcggtaagaatgaacaaggggagcctgaagacctcaagaagccagaggggaagaacagaagtgcagctgctgtgaaaaacgagaaggagcaaaaaaaccaggaagcagatgtccaggaagtgaaggcaagcacgctgagcccgggtggaggagtcaccgtgttcttccacgccatcatctctcttcatttcccattcaatcctgacctccataaagtcttcatcagaggaggagaagaatttggggagtcaaaatgggacagcaatatctgtgagctgcactacaccagagacttgggtcatgaccgcgttcttgttgaaggcattgtctgcatttccaagaagcacctagataaatacattccttacaagtacgtcatttataatggggaatcttttgagtatgagttcatttacaagcaccagcagaagaagggcgagtacgtcaaccgctgtctgttcataaaatcttcacttctgggctcaggagactggcatcagtactatgacatagtttatatgaagcctcatgggagactccagaaagtcatgaaccacatcacagacgggccgaggaaggacctggtgaaggggaagcagattgccgctgcgctcatgctggacagcaccttcagcatcctgcagacctgggacaccatcaacctgaacagcttcttcacccagttcgagcagttttgctttgtcctgcaacagcctatgatttatgaaggacaggcacagctgtggaccgatttgcagtacagggagaaagaggtgaagagatacctgtggcaacatctgaaaaaacacgtggtaccattgccggacggaaaaagcacggactttttgcctgtggactgcccagtgaggagtaaactgaaaacaggcctgattgtcctttttgtagtggaaaaaattgagcttttattagaaggcagcctggactggttgtgtcacctcctaacctcagatgccagctcaccagatgagtttcaccgtgacctaagccacatccttgggatacctcagagctggcggctgtacctggtgaacctgtgccaaagatgcatggacacaaggacgtacacctggctgggcgccctgcctgtcctgcactgctgtatggagctggccccgcggcacaaggatgcctggagacagcctgaggacacctgggccgctctggagggactctccttctcaccgttccgggaacaaatgctagatacgagttccctacttcagtttatgagagagaagcagcatttgctgagcatagacgagcctctcttccggtcctggtttagtctgctacctctgagtcacctggttatgtatatggaaaacttcattgagcacctgggtcgttttcctgctcatatcctggactgtctttcagggatttactaccggcttccgggacttgagcaagtcttgaatacgcaggatgttcaggatgttcagaacgttcagaacattttagaaatgctgttgcgactcctggacacttaccgggacaagattcccgaggaggccttgtcaccatcctacctgactgtgtgtctgaaactgcatgaagccatctgcagcagcacaaagctacttaagttttacgagctgccagccttatctgccgagattgtctgcagaatgattagacttctatctctggtggattctgcaggacagagagatgaaactggaaataattcagtccaaacagtcttccaagggacccttgctgctacgaaaaggtggctccgagaagtttttacaaagaacatgctcacatcttcaggtgcctcattcacatacgtcaaggaaattgaggtctggaggcggctggtggaaatccaattccccgcggagcatggctggaaggagtcgttgctgggagacatggaatggaggctcacaaaggaggaacccctctcccagatcactgcctactgcaatagttgctgggacaccaaaggcttagaggacagtgtggccaagaccttcgagaaatgcatcattgaagccgtgagctcagcctgccagtctcagaccagtatccttcaggggttctcttactctgatttgcggaaatttggcatcgtcttgtctgctgtgatcactaagtcctggcctaggaccgcggacaacttcgatgacattttaaagcatctgctcacgttggcagatgtcaagcacgtcttcagattgtgtggaaccgacgagaaaatactagcaaatgtcacagaggatgccaagaggctgatagctgttgccgactctgtgttgacgaaagttgttggtgacctcctaagtggcacgattttagttggacaactggagctgattataaagcacaagaatcagtttcttgacatctggcaactgagggaaaaaagtctttcaccccaggatgaaaaatgtgctgtggaggaagcactggattggagaagggaggaactgttacttctaaagaaagagaaaagatgtgttgatagtctcctgaagatgtgtgggaacgtgaaacatctgatacaagtggactttggagtgcttgcagtaagacactcacaagacctcagcagtaaaagattaaatgacaccatgacagtgagactgtccacctcctcgaactcgcagagggcaacgcattaccacctgagctcccaggtccaagaaatggctgggaagatagacttgctcagagacagccacatcttccagctcttctggcgggaagccgcagagccgctgagtgagcctaaggaggaccaggaagccgcagagttgctgagtgagcccgaagaagaatcagaaaggcacatccttgagcttcaagaggtgtatgactatttgtatcagccttcttacagaaagttcattaagttgcaccaggatctaaagtcaggagaggtcacccttgcagagattgatgtcatcttcaaggactttgtgaataaatacacggacctggattcagaacttaagatcatgtgcaccgtggaccaccagggccaaagagattggatcaaggaccgagtggaacagatcaaggaataccatcacctgcaccaggctgtccacgcagccaaggtcatcttgcaggtcaaagagagcctgggactgaacggtgacttcagtgttctcaacactttactaaattttactgataacttcgacgactttcgccgtgaaacactggaccagatcaaccaggagctcatccaggccaaaaagctgctccaggacatcagcgaggcccggtgcaaggggctgcaggctctgtccctgagaaaggagttcatctgctgggtccgggaggctcttggaggcatcaatgagctgaaggtgtttgtggacctggcctccatctcagcgggggagaatgacattgatgtggaccgggtggcctgcttccatgacgctgtgcagggctacgcatccctgctatttaagctggaccccagcgtggacttcagtgcattcatgaagcatctgaaaaagctgtggaaggctctggataaggaccagtacctgcccaggaaactggtgagtcttattctgtctctaatgcagattttgttgaatagagcattgcttagcaacgttagggcagtgactgtggaaatggtggcacacctgtgtggtaggtttgtacacagccgttttcaatgatatttaaaaagcttttcttcataaatggaaattcaccatcttgttacctagaaagcaggatacaaaattacatgacacatagtaatctctaaggtgcaaaacacacgtggaaaaaagacagaagggaaatatgctgaaacgttgccaggagttttctctgaatggttgtaattgtcattttattctgttactttttgttattttctataattgatagaattttttatcagaaaaaagtaaacatttaaaattagccaggcatggtggtgtgcgcctgtaatcccagctactctggaggctgagacagaattgcttgaacccgggaggcagagatagcagtgaactgagatcacaccactgtactccagcctgagtgacaaagtgagactctgtctc

SEQ ID NO: 5323 - protein, 1415 aa, Homo sapien
SQAQQSGPTGQPSQPPGTATTPLEGDGLSAPTEVGDSPLQAQALGEAGVATGSEAQSSPQFQDHTEGEDQDASIPSGGRGLSQEGTGPPTSAGEGHSRTEDAAQELLLPESKGGSSEPGTELQTTEQQAGASASMAVDAVAEPANAVKGAGKEMKEKTQRMKQPPATTPPFKTHCQEAETKTKDEMAAAEEKVGKNEQGEPEDLKKPEGKNRSAAAVKNEKEQKNQEADVQEVKASTLSPGGGVTVFFHAIISLHFPFNPDLHKVFIRGGEEFGESKWDSNICELHYTRDLGHDRVLVEGIVCISKKHLDKYIPYKYVIYNGESFEYEFIYKHQQKKGEYVNRCLFIKSSLLGSGDWHQYYDIVYMKPHGRLQKVMNHITDGPRKDLVKGKQIAAALMLDSTFSILQTWDTINLNSFFTQFEQFCFVLQQPMIYEGQAQLWTDLQYREKEVKRYLWQHLKKHVVPLPDGKSTDFLPVDCPVRSKLKTGLIVLFVVEKIELLLEGSLDWLCHLLTSDASSPDEFHRDLSHILGIPQSWRLYLVNLCQRCMDTRTYTWLGALPVLHCCMELAPRHKDAWRQPEDTWAALEGLSFSPFREQMLDTSSLLQFMREKQHLLSIDEPLFRSWFSLLPLSHLVMYMENFIEHLGRFPAHILDCLSGIYYRLPGLEQVLNTQDVQDVQNVQNILEMLLRLLDTYRDKIPEEALSPSYLTVCLKLHEAICSSTKLLKFYELPALSAEIVCRMIRLLSLVDSAGQRDETGNNSVQTVFQGTLAATKRWLREVFTKNMLTSSGASFTYVKEIEVWRRLVEIQFPAEHGWKESLLGDMEWRLTKEEPLSQITAYCNSCWDTKGLEDSVAKTFEKCIIEAVSSACQSQTSILQGFSYSDLRKFGIVLSAVITKSWPRTADNFDDILKHLLTLADVKHVFRLCGTDEKILANVTEDAKRLIAVADSVLTKVVGDLLSGTILVGQLELIIKHKNQFLDIWQLREKSLSPQDEKCAVEEALDWRREELLLLKKEKRCVDSLLKMCGNVKHLIQVDFGVLAVRHSQDLSSKRLNDTMTVRLSTSSNSQRATHYHLSSQVQEMAGKIDLLRDSHIFQLFWREAAEPLSEPKEDQEAAELLSEPEEESERHILELQEVYDYLYQPSYRKFIKLHQDLKSGEVTLAEIDVIFKDFVNKYTDLDSELKIMCTVDHQGQRDWIKDRVEQIKEYHHLHQAVHAAKVILQVKESLGLNGDFSVLNTLLNFTDNFDDFRRETLDQINQELIQAKKLLQDISEARCKGLQALSLRKEFICWVREALGGINELKVFVDLASISAGENDIDVDRVACFHDAVQGYASLLFKLDPSVDFSAFMKHLKKLWKALDKDQYLPRKLVSLILSLMQILLNRALLSNVRAVTVEMVAHLCGRFVHSRFQ

SEQ ID NO: 5324 - DNA, 5361 bp, Homo sapien
gcctcctccgccacctccaccgatgtggaatccaatgattcctgcttttgacctcttccaaggaaaccatggctttgtagctcctgttgtaaccacagctgcacactggagatctgtcaactacacatttccaccctcagttatttctcacacttccccaacaaaagtatggagaaataaagatggaacaagtgcttatcaagtacaagaaaccccagtttctcaggttgtaagaaagaagacatcttacgttggactagttcttgttcttctcagaggtcttccgggatctggaaaatcttttttggcaaggactttgcaagaggataatccaagtggagtcattcttagtactgatgattatttttatataaatggacagtaccagtttgatgtaaagtacttaggagaagcacatgaatggaaccagaatcgtgcaaaagaagcatttgagaagaagatatctcctataattatagataatacaaacctacaggcatgggaaatgaaaccatatgttgctttgtctcagaaacacaaatataaagtcctttttcgggaaccagacacatggtggaagtttaaaccaaaggaacttgcaaggcgtaacattcatggggtaagcaaagaaaaaataacaagaatgttggaacattatcaacgttttgtttcagtgccaataattatgagttcttcggttccagagaaaattgaacgtattgagttgtgtgcatattcttgtgaggatagaagcactagcccaagagacaatgaagatattatctctgaaaaagaagaaaatattttatctttatctttgaagcatctagagttcactgaagagaagaatcttgatgtaaccaaagaaacaatgttacctgagaatgttgcatatctctctaatgcagatttaaacaaaagaagaaaagaaataagtgatatgaatcctagcattcaaagtgctttaattctggaaactccacacatgtatttttctgactctgaaagcaaactacaggcaacagacaaaagtgaaaacgagcaaatagaaatggtggctgtaaaagggtatagtaaaactgacacagatagttctatggagagagtatcacctagtacttgctgtagtgaaaataatcaagaagactgtgatcttgcaaatagtggaccacttcaaaatgaaaaatcctcacctggtgaaatagtggaagaaagagcaacagtaacgaaaaaagcctttgggaaacaaaaaagcaaatcgactttggaagagttcccaagacatgagctatcaaattttgttggtgactggccagttgataagactattggtcagaggacaaaaaggaacagaaaaactgaaaaaacttcatccgtacaaagcgacaaaaagtataattaccctcagtcacacaaattagttaacagtgtatctgtgaatacagattgtgtccagcaacgaggatctccacatgaaagtgtagaggatggcagaaagtcacagtgtgatgatgcttcagagccactcaatagctataaatatgatgcttataaaaatattgacaaaaactcattcaacattatgggtgactggccttcatctgattctttagctcagagggaacacagatcaagaatgccaaagactggtttaagtgagcccaacctagaaattggaacaaatgacaaaatgaatgaaatatccttatctacagcacatgaggcctgttggggcacaagctctcaaaaactaaagacattgggtagctccaatctaggaagttctgaaatgctgctcagtgaaatgacctgtgagagtcagacttgtctaagtaaaaagagtcatgggcaacacacatcgttgcctcttacttttaccaatagtgcaccaactgtttctggagtagtagaaccacaaacgttagctgaatgtcaagagcaaatgcctaagagagaccctggaaaagaagtaggcatgtgcacccagactgaaccacaggattttgctcttttatggaaaatagaaaagaataaaattagcatttcagattctatcaaagtattaacaggaagattagatggatttaagccgaaagttttcaatattaacacaaaatcagacgttcaagaagcaattccatatagagtaatgtatgataaaagcacgtttgttgaagaaagtgagcttaccagtgcagatgaatctgaaaatcttaacattctttgtaaactgtttggatccttttcattagaagccctgaaagacttatatgagaggtgcaataaagatattatttgggccacaagccttttgttggattctgaaactaagttatgtgaggatacagagtttgagaatttccaaaaatcgtgtgatggatcacaaattgggcctttttctctggggttgaatttgaaagaaattattagccaaagaggaactttagagaattctaattctcctgtgccagagtttagccatgggattggtattagtaacgctgactcacagtctacttgtgatgcagaaagaggaaactcagagcaggcggaaatgagagctgtcactcctgaaaaccatgaatcgatgacaagtatatttcccagtgctgctgtgggtctaaagaataataatgacatacttcctaacagccaggaagaacttttatatagcagtaagcagtcctttccaggtattctaaaagctactactcctaaagatatgagtgaaacagaaaaaaacctagtagtcacagagactggagacaacatacattctccttcacatttctctgatatttttaactttgtatctagtacttcaaatcttgaattaaatgaagaaatttattttactgattctcttgaaataaagagaaatgaaaattttccaaaggattatgtgaaattttcagatgaagaagaatttatgaatgaagatgagaaggaaatgaaggaaattctaatggcaggaagtagtttatcagctggagttaggggggaagataaaaccgagatattgaatcccactccagcgatggccaaatctctgaccatagactgtctggaattggcattaccccctgaactggcttttcaacttaatgaattatttggtcctgttggtattgattcagggtctctaacagttgaagattgtgtggttcatatagatctgaatctggcgaaagtgattcatgagaaatggaaagaatctgtaatggagcgacaaagacaagaagaggtgtcttgtggcaagtttatgcaagatccttccttggttggacatactgggcttgataatcctgaacaaaaatcatctcagagaacaggcaaaaaattactgaagactttaacagcatctgaaatgctacctttattggatcattggaatactcaaactaaaaaagtatcactcagagaaataatgtcagaagaaattgccttacaggaaaaacataatttgaaaagggagacccttatgtttgaaaaagattgtgccactaaactaaaggagaagcagctctttaagatatttccagccattaaccaaaattttctggtggacattttcaaggaccacaactattcattagaacacacagtgcaatttcttaactgtgttcttgaaggggaccctgtaaaaacagttgtagcccaagagtttgttcaccaaaatgagaatgtcacatctcatactggccagaagtctaaagagaaaaaggactttgagtacccagactatgatgactacagagcagaggctttccttcaccaacagaagaggatggagtgctacagcaaggccaaagaagcttatcggatagggaaaaaaaatgtcgccaccttttatgcccagcagggtactcttcatgagcagaagatgaaagaagccaatcaccttgctgccatagagatctttgagaaagtcaatgcttcgctgctgccacagaatgttttagacctccatgggctgcatgtggatgaagctctagaacatttgatgagagttttagagaagaagactgaagaatttaagcagaacggtgggaagccctatttgtctgtgattacggggagaggaaaccacagccagggaggagttgctcgcatcaaaccagctgtcattaagtacctcataagccatagcttcaggttctctgaaattaaaccagggtgcttgaaagtcatgctaaagtaaaataaacatccttgaattagaagtatgaaggtttgtaggttaaaattacttttatttgcagtaattcagtcaattctaccctaaagatgtgttttattataaataatattcaattatgaaacaaaaaaattatgatgtttttcaaaatgcaagtgaggtttgattttttactgaatcaaatgcaaatgttacctgttaaagatattacagagaaattttattgattacaaaatatgtaagaaaattatcagctacagttttaaagtttaaaatgctctgattgtttctcagaaaaggttacctttgtattaattgttgtatgacatttagtaatgtcctaaaagtcttttgtgagaggtatttaaagtgctttgagacctgattcatgccccccaaagggtggtattaaaagaggaaaaaggacatagtagtggtagtaaagaaaaaaaggagatctaacaaaaacacttgaatattttttattttcaaaactaaacacataaaatgcttttattttgccatatcctacaggaaggaagacatgcttttgccctttcttctgctttgtatatgaccttgatcttttaccttttgttctgttcttctgtgtgcattttatggaaagaaagttgggtctgagattatattgtaattttatactttctatagacagaaaggttttcagagaaaaagaaatggttaaatatcttccagatgttgctgccttatcgaaatgcttctagaactgtctgtataagtcgtatttcagacagtactaaatacttatattttatttttgaggcatgtaattttaaaactgcagtaggttaaaattctattaaacaaatatagaaaatattttgtttataattggcctggtgtggtggcccacgcctgtaatcccagcactttgggaggccgaggtaggtggatcgcctgaggtcagaagttcaagaccagcctggccaacatggtgaatccccgtctctattaaaaatacaaaaattagctgggtgtggtggcgtgtgcctgtaatcccagctacttgggaggctgaggcaggagaaccgcttaaacctgggaggtggaggttgcagtgacccgagatcgagatcacaccactgcactcagcctgggtgacagagcaagactccgtctcc

SEQ ID NO: 5325 - DNA, 9884 bp, Homo sapien
  Unsure 2221-2245: Unknown base
atttttattgatgtttagtaatacaaattcctaatcatttttaaaccattctttgtcaacattttttgctcatttctgaacacctgctatatgtaggaaacatttgtttgcttttctaaatttgaggtaaatttgacttctttgtggactataagatatttaggggcaatagtgattacttggtggtaaaaaggtgatttaggtgcagttgcatatctaaaaccacttcaaagtcaataaatacataatactaataagttggcagaaagcttaaaagcacacaaaagcccagcataaaaacaaaaaggatactatatcttaagtgttaggagtgggaagattttttttttttattcttaagttttttagttccagtggtaagaaagttaatataattgttttctttccaaggaaatcatcagtatttatattctattctagatagtaatgggctatttttaaagactatttgttttattggttagaatgtagtatagatgatggttgacagcaatttgtctagtccttgttacttaaaatcaagtaacttctggttggtataaaatctttaaaatagattgagtaggtcagaacttattttagataaaaagatatatgtattatttagaggtttttttctacttaccacttgagattagttcttaaaggaaaaaaatacttaaaagctggacaaaaatgataacccattggcaaattatgtagatatgcattaagttatagggttagtgcatcatgaactcttttatagtcagttccttaatgtggagcaaagaaccttttgtctgaataaacatcccagtaatatccatcaaattaacttttaaaaccctaagatatttgtgagatgtgtcttatatttagccaacattattttttatttacatttattgaatccctactgtgtgggcattggctaagaacttcatattgagactggttacatttgtctttggggctcttaagtcatgttgcttttattttaaaacttttggttctctggaacagaatacctgatgaagacttttttctttgatccagacatcttgttacattctccattttaaatgaagagttctgaccttacgacatgttaactaagcaacccacttactacgtaggaagctgtagggaaatcatatcttcaagattgtttgctaaagattttgtttaaaaactgatattaaaatcatttcacgaggatcaacttgaaaaaaaatttagtgtcaattttaaaatacattttcatttttattttattttgaaagagaaatgttttattcctctttgcacagaacagtttatgaaggtggctctctcctgactccatacatcttttacacaagatgcctcttcaaaatatgcccagttatctccccctcttcagtgttagagaattggcagttagtgagtggggcagaatgcttaaggctcattaaaataccttttttaaagccctcttatatcctttatgtacacttgctctgtgtgattaaattaactttcttcaaatattagagtccatcataataagtgacagctctgttggccttctcctcagggtgccattgttttccctttttttgacttaacatctttgccctgagaaagctgtggtttctttgacaagaagctattactctttgtatgagagaataaacaaacttactcagactgaagagtatgttttcaaaaattaaagaagtagcaattatatgggagctgttatttattaaagcaattatctgagcccttaaagggctgtttgtttttacaatgttgtataatggccttgcaggaaaattagatttcttattctctcttccagtgtacattgtcttgagtattgtcacatttagagaccatagggagatatgggactcctagtattcagtcgacactctgaacagattttctgtgtgatacattttttcattttaattgagtcccctcttcctcccctccaactgatagctttttataactgtgtgaaatatctagagaagaatgaagtaggctgagctacattttcaagcttaacattctttagaaaactaagaaaatgcccaatatttcaacattaaggtgtcaataggggctaaatgatcactttaagatgttttcagtttggaacttgaatgtgtgtttaattttttgtgaacagattgatgactcttccgcgtctatttctctggcccagctnnnnnnnnnnnnnnnnnnnnnnnnntcttgaaaatataagtttttttctaacatcatatttttttatgtggaacggttttttaagaggggttgggggaggacatattttgcaaaagcattgtacatattattactatcctgtaaagagtagttgctgttttgagaagataggggaatactttgtcagcctcagcgtattggagtattgttcatcttcaagacagaagaaacacttgaagctacacttaattattttttttccctcatacattttgtttaattatacattggaaactaacaaggttctggaggaatttcctggttttggctataaattatgtggaccttttttaagcagccaaaacagaagatttcctttacacggacgattgcatggttatttcttgaatatttgacttgatcccatgaaggtcaatattttaaatgtgatgcagttgtttctttatgctatagacttgtagtctgtctgcattaggaaaagttttgaacaacctaatttgtttgaacacagactacatgaattgtgtaagtgtgtaaagctgtttgcaggaatataccaatgtgtatgtttggcagaggggcaaattgttacctcctgaatcactgtatatgccatgttttgcgataagattgcttgcattttctgctcaacaatgtgtatcttctgtttgggaaagcactagtgatggattactttttaaagcaatacatttagcttgcaaattgtgcctttaaaaaaaaaaataggcagacttttgagggccaagaaggaagctgtccagttttccaaaaatcctttttccctgctatcagaaatgtgaaaccaaatttagcaaccaagattaatgaaaagatgggttttccattagtgctgtccctatcttgttcttggctttgttatgtcctttcccctagactgtatcccgacaaaatgtcctagtaacaaattgctttttaagctcctgttctgggaaaactaagcattaaaattgattattctaaaacataaagtggactaaagccatcctattttataattttctaatgcaaagtggtttagtatagagttaacacttagaagtttatagtttactgtttttattcttatgtactgtaaggaccatatttgagtttttggtctattcctaccattgtttctttgtggggaggagttggggcggtttgggggattggttttttttttggtttttttaaactacaggtatttgtaaaacaatgtttgggttcaaacaaattagttgttaaacatctgtaatccagttttctgtaaatgttgctgttgttctaagctctgttaatgttaagcattctttgtatataaaattacaataaaatgttaaaactggttgcttgttttgtggatgaatgtaaagacaaaccccaatgaatggctgatatgagtgctaaatgcctgaagattcaacttaactagaaatcactcccttagaccctgcttacatctagaccttgtatatcatacctcaaagatgaaattcataaaacttatctgaagagtttaatttaaaattataatgctcaatgcacatcttttgcacttgagttgaaactaacatcactacctaaagagccttctacttctaatatctgctgcataatacgttcagtcattctacccccatccctacctccacattgtaagtataaattagtcttaatgctctgacacttgaattatttttaaaacatcaagtgtttctattctaacttaatatcagtctttaacttgtagaaaagtagtatgcaagtcttaatgtaaggtacaaacagggtctaaggtttgagtgcccccagaatgactttcttcagccttgcagacacctaaacatcatgtaattacctaaggaattcccaagtgcctcttccaggttatacgtgtaaatagctgtttttatgcaagattagttagatactgctctttacaggatgagtggtgttgtctttggctgtgtggtcttaaatgtgtttctaatgtgtgtgtcaaataattacctgttaaacagactgccaatctggctgaagccaatgcttctgaagaagataaaattaaagcaatgatgtcgcaatctggccatgaatacgacccaatcaattacatgaagaaacctctaggtccaccacctccatcttacacgtgtttccgttgtggtaaacctggacattatattaagaattgcccaacaaatggggataaaaactttgaatctggtcctaggattaaaaagagcactggaattcccagaagtttcatgatggaagtgaaagatcctaatatgaaaggtgcaatgcttaccaacactggaaaatatgcaataccaactatagatgctgggagactcctctttcacaaattgggaacaatggggcataagcaaattgatacttatttctggaatcgtggtgatgtctatggagcaactgcaacacaaataacacacctaagagaagcatatgcaattgggaagaaagagaaacctcccttcttaccagaggagccatcttcttcctcagaagaagatgatcctatcccagatgaattgttgtgtctcatctgcaaggatattatgactgatgctgttgtgattccctgctgtggaaacagttactgtgatgaatgtataagaacagcactcctggaatcagatgagcacacatgtccgacgtgtcatcaaaatgatgtttctcctgatgctttaattgccaataaatttttacgacaggctgtaaataacttcaaaaatgaaactggctatacaaaaagactacgaaaacagttacctcctccaccacccccaataccacctccgagaccactgattcagaggaacctacaacctctgatgagatctccgatatcaagacaacaagatcctcttatgattccagtgacatcttcatcaactcacccagctccgtctatatcttcattaacttctaatcagtcttccttggcccctcctgtgtctggaaatccgtcttctgctccagctcctgtacctgatataactgcaacagtatccatatcagttcattcagaaaaatcagatggaccttttcgggattctgataataaaatattgccagctgcagctcttgcatcagagcactcaaagggaacctcctcaattgcaattaccgctcttatggaagagaagggttaccaggtgcctgttcttggaaccccatctttgcttggacagtcattattgcatggacagttgatccccacaactggtccagtaagaataaatactgctcgtccaggtggtggtcgaccaggctgggaacattccaacaaacttggctatctggtttctccaccacaacaaattagaagaggggagaggagctgctacagaagtataaaccgtgggcgacaccacagcgaaagatcacagaggactcaaggcccgtcactaccagcaactccagtctttgtacctgttccaccacctcctttgtatccgcctcctccccatacacttcctctccctccgggtgttcctcctccacagttttctcctcagtttcctcctggccagccaccacccgctgggtatagtgtccctcctccagggtttcctccagctcctgccaatttatcaacaccttgggtatcatcaggagtgcagacagctcattcaaataccatcccaacaacacaagcaccacctttgtccagggaagaattctatagagagcagcgacgactaaaagaagaggaaaagaaaaagtccaagctagatgagtttacaaatgattttgctaaggaattgatggaatacaaaaagattcaaaaggagcgtaggcgctcattttccaggtctaaatctccctatagtggttcttcgtattcaagaagttcatatacttattctaaatcaagatctggttcaacacgttcacgctcttattctcgatcattcagccgctcacattctcgttcctattcacggtcacctccataccccagaagaggcagaggcaagagccgcaattaccgttcacggtctagatctcatggatatcatcgatctaggtcaaggtcacccccttacagacgctatcattcacgatcaagatctcctcaagcgtttaggggacagtctcctaataaacgtaatgtacctcaaggggaaacagaacgtgaatattttaatagatacagagaagttccaccaccatatgacatgaaagcatattatgggagaagtgttgactttagagacccatttgaaaaagaacgctaccgagaatgggagagaaaatatagagagtggtatgaaaaatattataaaggttatgctgctggagcacagcctagaccctcagcaaatagagagaacttttctccagagagatttttgccacttaacatcaggaattctcccttcacaagaggccgcagagaagactatgttggtgggcaaagtcatagaagtcgaaacataggtagcaactatccagaaaagctttcagcaagagatggtcacaatcagaaggataatacaaagtcaaaagagaaggagagtgaaaacgctccaggagatggtaaaggaaataagcataagaaacacagaaaaagaagaaaaggggaggaaagtgagggttttctgaacccagagttattagagacttctaggaaatcaagagaacctacaggtgttgaagaaaataaaacagactcattgtttgttctcccaagtagagatgatgccacacctgttagagatgaaccaatggatgcagaatcaatcacttttaaatcagtgtctgaaaaagacaagagagaaagggataaaccaaaagcaaagggtgataaaaccaaacggaagaatgatggatctgctgtgtccaaaaaagaaaatattgtaaaacctgctaaaggaccccaagaaaaagtagatggagaacgtgagagatctcctcgatctgaacctccaattaaaaaagccaaagaggagactccgaagactgacaatactaaatcatcatcttcctctcagaaggatgaaaaaatcactggaacccccagaaaagctcactctaaatcagcaaaagaacaccaagaaacaaaaccagtcaaagaggaaaaagtgaagaaggactattccaaagatgtcaaatcagaaaagctaacaactaaggaagaaaaggccaagaagcctaatgagaaaaacaaaccacttgataataagggagaaaaaagaaaaagaaaaactgaagaaaaaggcgtagataaagattttgagtcttcttcaatgaaaatctcgaaactagaagtgactgaaatagtgaaaccatcaccaaagcgcaaaatggaacctgatactgaaaaaatggataggacccctgaaaaggacaaaatttctttaagtgcgccagccaaaaaaatcaaactcaacagagaaactgggaagaaaattggaagtacagaaaatatatcaaacacaaaagaaccctctgaaaaattggagtcaacatctagcaaagttaaacaagaaaaagtcaaaggaaaggtcagacgaaaagtgactggaactgaaggatccagctcaactctggtggattacaccagtacgagctcaactggaggcagtcctgtgcggaaatctgaagaaaaaacagatacaaagcgaactgtgattaaaacgatggaagaatataataatgacaataccgcgccagctgaagatgttatcattatgattcaggttcctcaatccaaatgggataaagatgactttgaatctgaagaagaagatgttaaatccacacagcctatatcaagtgtaggaaaacctgctagtgttataaaaaatgttagtacaaagccatcaaatatagtcaagtatcctgagaaagaaagtgagccatccgagaaaattcagaaattcaccaaggacgtgagccatgaaatcatacaacatgaggttaaaagttcaaaaaactctgcatctagtgaaaaagggaaaaccaaagatcgagattattcagtgttggaaaaggagaaccctgaaaagaggaagaacagcactcagccagagaaagagagtaatttggaccgtctgaatgaacaaggaaattttaaaagtctgtctcaatcttccaaagaggctagaacgtcagataaacatgattccactcgtgcttcctcaaataaagacttcactcccaatagagacaaaaaaactgactatgacaccagagagtattcaagttccaaacgtagagatgaaaagaatgaattaacaagacgaaaagactctccttctcggaataaagattctgcatctggacagaaaaataaaccaagggaagagagagatttgcctaaaaaaggaacaggagattccaaaaaaagtaattctagtccctcaagagacagaaaacctcatgatcacaaagccacttatgatactaaacggccaaatgaagagacaaaatctgtagataaaaatccttgtaaggatcgtgagaagcatgtattagaagcaaggaacaataaagagtcaagtggcaataaactactttatatacttaacccaccagagacacaggttgaaaaagagcaaattactgggcaaattgacaagagtactgtcaagcctaaaccccagttaagtcattcctctagactttcctctgacttaactagagaaactgatgaagctgcttttgaaccagactataatgaaagtgacagtgaaagtaatgtttctgtaaaagaagaggaatcttcaggaaacatttctaaggacctgaaagataaaatagtggagaaagcaaaagagagcctggacacagcagcagttgtccaggtgggcataagcaggaatcagagccacagcagccccagcgtcagccccagcagaagccacagtccttctggaagccagacccgaagccacagtagcagtgccagctcagcagaaagtcaggacagcaagaagaagaagaaaaagaaggaaaagaaaaaacacaagaaacataaaaagcataagaagcataagaaacatgcaggcactgaagtggaattggaaaaaagccaaaaacacaaacacaagaaaaagaagtcaaagaagaacaaagataaagagaaggagaaggagaaagatgaccaaaaagtgaaatctgtcactgtgtaaaaagacagattttttaaattgacttaattactaagtcatctgtattaaattttgttataatgtaaagagattcaagccttgtaaataatgacatggaagaccctgtgctgcacttaaaatattgctgcttgattatttgatttttacatcagagctttataacacgaacttttgtacagaattgtgagttgtgaccatgtaacatgagaggttttgctagggcctattatttttaaccaccattaattagttggggtggagtttactgtaatgtgaaattttcacatttgaattttttaattgcctggcaaaagctgatataagttctaaaatatcagcagaatgatttgctgaattcattacatccctgttatgtcactttttgattacaataaaagttttcagtaaacttttcaaaaaatctatgtcggtgcggagaaagagtaatgaatggca

SEQ ID NO: 5326 - protein, 1696 aa, Homo sapien
MSQSGHEYDPINYMKKPLGPPPPSYTCFRCGKPGHYIKNCPTNGDKNFESGPRIKKSTGIPRSFMMEVKDPNMKGAMLTNTGKYAIPTIDAGRLLFHKLGTMGHKQIDTYFWNRGDVYGATATQITHLREAYAIGKKEKPPFLPEEPSSSSEEDDPIPDELLCLICKDIMTDAVVIPCCGNSYCDECIRTALLESDEHTCPTCHQNDVSPDALIANKFLRQAVNNFKNETGYTKRLRKQLPPPPPPIPPPRPLIQRNLQPLMRSPISRQQDPLMIPVTSSSTHPAPSISSLTSNQSSLAPPVSGNPSSAPAPVPDITATVSISVHSEKSDGPFRDSDNKILPAAALASEHSKGTSSIAITALMEEKGYQVPVLGTPSLLGQSLLHGQLIPTTGPVRINTARPGGGRPGWEHSNKLGYLVSPPQQIRRGERSCYRSINRGRHHSERSQRTQGPSLPATPVFVPVPPPPLYPPPPHTLPLPPGVPPPQFSPQFPPGQPPPAGYSVPPPGFPPAPANLSTPWVSSGVQTAHSNTIPTTQAPPLSREEFYREQRRLKEEEKKKSKLDEFTNDFAKELMEYKKIQKERRRSFSRSKSPYSGSSYSRSSYTYSKSRSGSTRSRSYSRSFSRSHSRSYSRSPPYPRRGRGKSRNYRSRSRSHGYHRSRSRSPPYRRYHSRSRSPQAFRGQSPNKRNVPQGETEREYFNRYREVPPPYDMKAYYGRSVDFRDPFEKERYREWERKYREWYEKYYKGYAAGAQPRPSANRENFSPERFLPLNIRNSPFTRGRREDYVGGQSHRSRNIGSNYPEKLSARDGHNQKDNTKSKEKESENAPGDGKGNKHKKHRKRRKGEESEGFLNPELLETSRKSREPTGVEENKTDSLFVLPSRDDATPVRDEPMDAESITFKSVSEKDKRERDKPKAKGDKTKRKNDGSAVSKKENIVKPAKGPQEKVDGERERSPRSEPPIKKAKEETPKTDNTKSSSSSQKDEKITGTPRKAHSKSAKEHQETKPVKEEKVKKDYSKDVKSEKLTTKEEKAKKPNEKNKPLDNKGEKRKRKTEEKGVDKDFESSSMKISKLEVTEIVKPSPKRKMEPDTEKMDRTPEKDKISLSAPAKKIKLNRETGKKIGSTENISNTKEPSEKLESTSSKVKQEKVKGKVRRKVTGTEGSSSTLVDYTSTSSTGGSPVRKSEEKTDTKRTVIKTMEEYNNDNTAPAEDVIIMIQVPQSKWDKDDFESEEEDVKSTQPISSVGKPASVIKNVSTKPSNIVKYPEKESEPSEKIQKFTKDVSHEIIQHEVKSSKNSASSEKGKTKDRDYSVLEKENPEKRKNSTQPEKESNLDRLNEQGNFKSLSQSSKEARTSDKHDSTRASSNKDFTPNRDKKTDYDTREYSSSKRRDEKNELTRRKDSPSRNKDSASGQKNKPREERDLPKKGTGDSKKSNSSPSRDRKPHDHKATYDTKRPNEETKSVDKNPCKDREKHVLEARNNKESSGNKLLYILNPPETQVEKEQITGQIDKSTVKPKPQLSHSSRLSSDLTRETDEAAFEPDYNESDSESNVSVKEEESSGNISKDLKDKIVEKAKESLDTAAVVQVGISRNQSHSSPSVSPSRSHSPSGSQTRSHSSSASSAESQDSKKKKKKKEKKKHKKHKKHKKHKKHAGTEVELEKSQKHKHKKKKSKKNKDKEKEKEKDDQKVKSVTV

SEQ ID NO: 5327 - DNA, 2621 bp, Homo sapien
  Unsure 2086-2106: Unknown base
ttccagattaagtttttaaccagagtcaaacttagcctttataaaaagtcctcatttaatttcaaaatagatcttctgtaagacatgcacatagggaagacctacctaggaatagcctggtgaaatgcagaattggaaaaaggcaaaagtccttgctcatgactcagaactacatcgagtgaagtcagtgttgaaaacgcccattccctccaggtgagccttccccattgtggattagtgttgtggcttcatggccctaataggggtgtgtctgccaggaactgcactgcatggggcccacagccctgccccagaagcagctttggtctcgtttgctgagaccgcttgctgtgcctcatcaatttcaggaggaaacagtgagatgcctctagattttaaatctggtttcggagagcacctaagccctctgatggaatgactctcgtaggaacttgatgggggtaattctaagggggaagagcttgggaaccgtgagggctgttaggctgcaagaagggaatggatatgtgagaccatgtgggtttattttttgaagggtgaactggagtagctgaggattctgcagttgacgccccaggatggctttgctcagccctcccccgtagactggaggaaagcctaccgccaagggaggagaggatgcatctgtcctaggtgcagccggcctccctcttccaggttcagcaagggtccctggctgggcattttcctcgtaacctttggcagcattggctcaaatgccattgtttagattcccagatatttccccactgctttttgtgttaaggtagtttggtaaaatgccttattccaatggcctaagataatatcaagcaactcactggtttacttttctaaccagctgtggttaagacacacacggcaatgtgctatctttcacatgttggacgttaaacccagaccaactccccaaatctaatttgtttcagtaatttctgaatgcattgaccaagatattcctttcatctctggttgagtttcttccattagaaggaaggattaaaccttggataaaagatttgcagatgccccagtggttagtagaggtgaaaatggaggtttcagggaaactgctggggccttttgcctttgtcctcatccaaagcattttgtgcctctctttcttctcctctggctgaatatccactggagattgaattctccgaaactccctgtgtgggtgaagtgggaagctgtgcccaggaaggggagtaactgtgcaaagttttatgcagtcagtgccagaattggattacatcacctgggggaggcgccttcaggaccaggaaatggtacatggagctttgaggtgaaaactcatcttagaaacccacaaaaagtcattcccccagcctgacatcagggacagaccacacccatggggcagaaaccgggcttggttgttgcagtgggaagagaaggcacgactctggtgcaccgagcacctttcctcgtggctgtttccaggcactgggctggatgtcctcagaaccccctgtcccctgcccactcctcaaacccttactgacccacccctctcgcctggtgctgtcccaggccctgggggtgagggggaggggactccagcgtgggcttgccctccagtgtggtgggagggaaccacgtggccacttggcttagccgtgctcatggtgcagacgtggaacgcggaggcagggagaggctccgtgacgtccccagggccccagaacgaggaaggagcggagttgggattccagcccagttggacgctgaagtccctgttttgtttactgcctcctgttcatggcgtatgaatgtatctgagatgctttgtaaggcataaagtgcaatactagcttagtggctgttcgttcagtgattccttctgttaccaaacaggtggctgagatgagagggcaacccaagcctaacgcccttcagtggccttgcatcagagtactcgtgacaggtacctctccgtggagaggggctgtcctctgcccttgcctgctcctcctattgcaacagtcctgtggactagctcaggctctacaggggctgnnnnnnnnnnnnnnnnnnnnngtgtatatgtgtctacctacacacaagcacatgtgcacacatgcacacacatgcagtgcatagcacacgcacactacacacatgcacacacactcacatggacacacactatacacacacatgcacacacatacatgcacacacatgcacatggacacacatacatgcacacacatacatgcaggtgtgcagacttggctccaggcgtgtgtttgatagtattattctatgatatttccctcatctccatagaataccagcttctgaatcctcaatcagcctttactgcaagaagaaaagaaaaacctctctcattccaggtctgtggtgcagatgggaagagtatagtcaaaacccattaaggccttagtcaaatgccagccgaattagaacgcaatgaacgttagacaaaacaacccaactggccaggcgggggaggcgcagagcgtataaatataaagttagatacttataaagaataaagactctaataaaatattttatataaaactttt

SEQ ID NO: 5328 - protein, 78 aa, Homo sapien
  unsure 52: unknown amino acid
  unsure 53: unknown amino acid
  unsure 54: unknown amino acid
  unsure 55: unknown amino acid
  unsure 56: unknown amino acid
  unsure 57: unknown amino acid
  unsure 58: unknown amino acid
MRGQPKPNALQWPCIRVLVTGTSPWRGAVLCPCLLLLLQQSCGLAQALQGLXXXXXXXVYMCLPTHKHMCTHAHTCSA

SEQ ID NO: 5329 - DNA, 672 bp, Homo sapien
catacgcaaagatagtcaccataagtcgaccatgtttttcaccttttagtcaatgttagaagcaaggggtaacttaagtcctggtgggaagaccatccattgagttctttgaaagtcaacatttttcagcccacgatagtgaaatgaaagtaaatataaatgaataacaattctaacaaaaagagttttttgattcaaatccattagtttgaacttttcgagcttattatccatttccttaaatcccatagcttatcagagttaacatcagagggaggtaaaatatttctgtgatattctttgtataaaatctacactttgaaatggattagtaacctgtgaacaatacatattttagttaacatataaattatgtgagcaaagtggttttcagtgtttttttcttattttagttttgaacctgtcttaaactcacagacttgtagaagaaatctctaattcagtatttattaggagttcacttttgccctattacagccttaattagtgacatcccagtgctgttacagcatagcagtgtcttaatatgtaatctaattgaaataacacatttgtaaaataattactagaaggtaaacttacgttaatgtcctgtgtggtttctacaaagtgtgtcattgtagacctcttggccactagatattttaagat

SEQ ID NO: 5330 - protein, 21 aa, Homo sapien
MSCVVSTKCVIVDLLATRYFK

SEQ ID NO: 5331 - DNA, 1400 bp, Homo sapien
ggcagcagtgtcgacggcagcggggcggcgggtgggaaatggcggagtatctggcctccatcttcggcaccgagaaagacaaagtcaactgttcattttatttcaaaattggagcatgtcgtcatggagacaggtgctctcggttgcacaataaaccgacgtttagccagaccatctctgcttcaaaacatctatcgtaatccccaaaacagtgcacagacggctgacggctcacactgtaagtcccacagttggagaaatttttttaaaacaatggtgttaaagagcccactcttaattgagacaaataatgttggcttctgagctgctgacatagagctgttgcaaacaggacaaggtgctggaactccttggcgcacacagcaagaacttgatacttggccacgttcaggaggcttatcccttctagggagggtcactggcccggccacctccattgattgacatttgtcatgagagcaggtccgtccatgtgaaacggatttcaacattttgagccattcattggtctttacagtgactgaacccctggcctttattaagttctttgtgtaaaattaaaactcttaggaatattaaggaatcaataaggtaagttgcccagtaagtgtgggttttatttcaccattataatttttcctccaggaagtggagatttcatgatatgtaacaattgtatttctctaatacagtaattttttccatcagtttatgtaagcattattctttccgagttcattaaaaattttctgccacatctaagaacattttggtgctagcctggcaaactatttgtgcttttacctgaattggaattttgaaaaggagagttttcacgttctgtaagcagaagtacaagatgggcatatcatgagacctccgttacaccgcagtgttagggattcaaggcagccgccaactgagaaaacgcctctgcttctccagaaaataacttgctctcttttcagcactgaatctcaactgaagcacttgccagaggcagccggttaagtgtttacctttaattttccataatataaagttgttgcgttttgtatttcagaccattgccctcttgaacatttaccgtaaccctcaaaactcttcccagtctgctgacggtttgcgctgtaagttcatacaagttccttccccggttccctgggcttgcgtgtcagagctcagtgtccactccatctggtctgccgtgctagtgtcaaggaccgcgtttcactagaggtggcaaggagctttcgtcccactgaccccatggaaacctcttttggagatttgaactcccaccgtgtgttaaaagggaaaaagtaactggaaagggtgccctttaaaacagtctagagctgggccgggcgcggtggctc

SEQ ID NO: 5332 - protein, 107 aa, Homo sapien [sequence omitted]

SEQ ID NO: 5333 - DNA, 809 bp, Homo sapien
  Unsure 631-660: Unknown base
cggacgcgtggcttgtctgtttctgcaaaaaaaaaacaacaacaactggggattttggtagggatttcattgaatctgtagatcattggccacttgattttaaacaaaatattgagatatctacttcttgaaatgattgcttgagacagtacctgtgtactccttgctatgaaaaatgaggaagttaacatactcatcttccacctttccttttccttactttttttgttgaagtatcattgtggacactttcccagttgacttccacttgatcccctgaattaactaactggcactggcgtttcctttgtaaaatgtacaatgtcagccaccatcttgctactaaagtgtggcctgtggaccacaacatggggggaatctcaggtctcacctcagacttgctgggtcagaacctgagttttgagaggctctgggcaaccggcacctctcagacctgctgttgggttctcatcgatggacccgatgcttcctagcaaatgatacctgttgtatgtgttattggtaataacatagtttacttagctattacattaattaataaaacatgagcgctgaaagagttgtttctgtgaaaataagctgattgctttaaaaagataagagacaaatnnnnnnnnnnnnnnnnnnnnnnnnnnnnnncttttgggtgagacagtagtaaggaaatacagtaaaaatccagaagggctctgtgctctgatgcttcaggagtgtgtctaagttcttgctcgctttaaagaagctgctactagaaattatagatcatgattatcgatgtggttcataca

SEQ ID NO: 5334 - protein, 42 aa, Homo sapien [sequence omitted]

SEQ ID NO: 5335 - DNA, 2848 bp, Homo sapien
aaacttcattgagcacctgggtcgttttcctgctcatatcctggactgtctttcagggatttactaccggcttccgggacttgagcaagtcttgaatacgcaggatgttcaggatgttcagaacgttcagaacattttagaaatgctgttgcgactcctggacacttaccgggacaagattcccgaggaggccttgtcaccatcctacctgactgtgtgtctgaaactgcatgaagccatctgcagcagcacaaagctacttaagttttacgagctgccagccttatctgccgagattgtctgcagaatgattagacttctatctctggtggattctgcaggacagagagatgaaactggaaataattcagtccaaacagtcttccaagggacccttgctgctacgaaaaggtggctccgagaagtttttacaaagaacatgctcacatcttcaggtgcctcattcacatacgtcaaggaaattgaggtctggaggcggctggtggaaatccaattccccgcggagcatggctggaaggagtcgttgctgggagacatggaatggaggctcacaaaggaggaacccctctcccagatcactgcctactgcaatagttgctgggacaccaaaggcttagaggacagtgtggccaagaccttcgagaaatgcatcattgaagccgtgagctcagcctgccaggtgaacaatctctcctcctgggaaacggattcgggctcacagctgtgttctgccatgacccagctaagggctatgaagcacccgctgggtctcagctcctccgctaactcagagattgggaagtgggcaccctcctccctcgccaagggcaatggcgctgagatctagttctctccggattcctcagtgtgctgcacagtccctgctgctcgcaccatcctgcatgtgttccatatggaatcacggccgtgcgcgtgtggcacaagtcacacgggcttgcaggccgttcctcagatggccctgtcgtcactgtggctgctggtttgattgattgttaacacttgctcagtaggtgtgcgggaagagactccaaaggttgacagaacatttatggaagcaaaatatgtgaaatggaaaattgtatcaatttatttagctcttttcggcaaaggggaagagattgtgcccccctgtctcccaggaacagtctcgcaggcaatgccacatgaggaagctccctgctggccatggctgccctgctcacatttcctaattggacacttaacccctgtacaagcacagccttgcggccacaggggaagtccagaaacattgaggtcattgaattccggggaccaaggggttctaattttttaagtgactgatacctttgataaggttttcctttccctttttcgttaactctttgttgagatattgttcgtatgccatacggtacatctgtcaaaagttccagttcagcaggttttggggtagtcacagatatgtacagtcatcaccacagttaatgacagagcattttcatcacttcaaagagaaacccggcccctttagccatcatcctcctcccctctagtcacccactcccctctgcaggcataaacaattgctgaacataaacaactgcttctgtggctttctctgttctgactgtcatatgaatggaatcatatcatatgtggccttttgggtatggcttatttcactgagcataatgtttttttgttgttggtggtggtggttgtttgttgtttttgggaccgagtttcactctttttgcccaggctggagtgcagtggtgcgatcctggcttaccgcaaccactgcctcccgggttcaagtgattctcctgcctcagcctcccaagtgctggaattacagctactttttgtttaaagagtcttttaattgtttaaagaacaatgtgccgccacactcggttccttttgtatttttagaagagacagggtttctccatgttggtcaggctggtctcgaactcccgacctcaggtgatccacccaccttggcctcccgaagtgccgagattgcaggtgtgagccaccgcgcccggccgagcataatgttttgaaagaccgctcaggctggacacggttgctcacgcctgtagtcacggcactttgggagcccaggagttcaagacaagcctgggtaacagagtaagaccctgtctctataaaaactaaaaaataaacaaaaaaaattagccaggcatggccgggcacacctgtggtcccagctacttgggaggctgaggtgggaggctcccttgggcccagaaggtcaaggcagcggtgagccatgatcgcaccactgcacttcaacctgggggacagagcaagaccctgtctcaaaaagcaataacaacaaaagtccatccatattgtagcttgtgtccgtttacgttaagtattccttacccaaaatgcttgagaccagaagtgttttggatttcagatgttttcaaattttggaatatttgcatttacataatgagatgtcttccagatgggacccagagtctaaccacaaaattcacttgtttcatatacatcttatacacatagcctgaaggtaattttatacaatatttttaacaattttgtgcatgagacaaagtttgtattaagtatttgtatgttgaatttttcacttgtggcatcattatactcaaaaagtttggattttgtagtattttggatttggggattaggaatgctcaacctatatttcatttttttccatggccaaatattccccgtttatccatgtgtccattgacggccatctatgttgcttcttcggctattataaatctgctgatac

SEQ ID NO: 5336 - protein, 241 aa, Homo sapien
MLLRLLDTYRDKIPEEALSPSYLTVCLKLHEAICSSTKLLKFYELPALSAEIVCRMIRLLSLVDSAGQRDETGNNSVQTVFQGTLAATKRWLREVFTKNMLTSSGASFTYVKEIEVWRRLVEIQFPAEHGWKESLLGDMEWRLTKEEPLSQITAYCNSCWDTKGLEDSVAKTFEKCIIEAVSSACQVNNLSSWETDSGSQLCSAMTQLRAMKHPLGLSSSANSEIGKWAPSSLAKGNGAEI

SEQ ID NO: 5337 - DNA, 1960 bp, Homo sapien; identical to SEQ ID NO: 92

SEQ ID NO: 5338 - protein, 430 aa, Homo sapien
MSSGDPRSGRQDGAPRAAAALCGLYHEAGQQLQRLKDQLAARDALIASLRTRLAALEGHTAPSLVDALLDQVERFREQLRRQEEGASETQLRQEVERLTERLEEKEREMQQLMSQPQHEQEKEVVLLRRSVAEKEKARAASDVLCRSLADETHQLRRTLAATAHMCQHLAKCLDERQCAQGDAGEKSPAELEQTSSDASGQSVIKKLQEENRLLKQKVTHVEDLNAKWQRYDASRDEYVKGLHAQLKRRQVPLEPELMKKEISRLNRQLEEKISDCAEANQELTAMRMSRDTALERVQMLEQQILAYKDDFKSERADRERAHSRIQELEEKIMSLMYQVSQRQDSREPGPCRIHTGNKTAKYLEMDALEHVTPGGWRPESRSQQMEPSAEGGHVCTAQRGQGDLQCPHCLRCFSDEQGEAFLRHLSECCQ

SEQ ID NO: 5339 - DNA, 15534 bp, Homo sapien
ccagccgtgtgtgatgagtggccacaccttgcctcctcttcccgtcccaggcaccaacagcacagagcaggccagtgtacccagagccatggcagccacgctgggagccggcacgccccccaggccccaggccaggagcatagctggggtgtatgtggaggcctcgggccaggcccagagtgtctacgccgccatggagcagggcctcctgcctgctgggctcgggcaggctctgctagaggcccaggcagccactgggggcctggtggacctcgcccggggccagctgctccctgtgtccaaggccctgcagcagggtctggtggggctggagctgaaggagaagctgctggccgctgagcgtgccactacgggctatcctgacccctacggcggtgagaagctggccctctttcaggccatcgggaaggaggttgtggacagggccctggggcagagctggctggaggtccaactggccactgggggcctggtggaccccgcccagggagtgctcgtggcccctgagccagcctgccaccagggcctcctggaccgggagacatggcacaagctgtcagagcttgagcctggcacaggtgacctgcgcttcctcaaccccaacacgctggagcggctgacataccaccagctgctggaaaggtgtgtgcgtgcccccgggtcggggctagccttgctgcccctcaagatcaccttccgctccatgggcggggcggtgagtgcagctgagctgctggaggtgggcatcctggacgagcaggctgtgcagggtctgcgggagggcaggctggccgcagtggacgtgagtgcacgtgccgaggtgcggcgctacctggagggtaccggcagcgtggccggggttgtcctgctgcccgaaggccacaagaagagctttttccaggctgccaccgagcacctgctcccaatgggcaccgcgctgccactcctagaggcccaggctgccacccacaccctggtggaccccatcacaggccagcggctgtgggtagacgaggcagtcagggcgggcctggtcagcccagagctccatgagcagctcctggtggctgagcaggccgtgacagggcaccacgaccccttcagtggctcccaaatcccccttttccaggccatgaagaaggggctagtggacaggccactagcactgcggctcttggatgcccagctggccacaggcgggctggtctgtccagcacgcaggctccggctgcccctggaggccgccctgcgctgcggctgcctggatgaagacactcagcggcagctctcgcaggctggcagcttctcagacggcacgcacggcggcctgcgctatgaacagctgctggccctctgtgtcaccgacccagagaccgggcttgccttcctgccactctcagggggaccccggggaggggagccccagggacccccattcatcaagtacagcactcggcaggccctgagcacggccacagccaccgtctctgtggggaagttccggggccggcccgtgtccctctgggagctgctcttctctgaggccatctcctcagagcagagggcgatgctggcccagcagtaccaggaagggaccctctccgtggagaagctggccgctgagctgagcgccacccttgagcaggctgcagccactgccagggtcaccttttctgggctgagggacaccgtgacaccaggagagctgctgaaagccgagatcatcgaccaggacctgtacgagcggttggagcatggacaggccacagccaaggatgtgggcagcctggcctcggcgcagaggtacctgcagggtacgggctgcattgctggcctgctgctccctggctcccaggaacgcctgagcatctatgaggcccgatgcaaggggctcctccggcccggcactgccctcatccttctggaggcacaagctgccacaggcttcatcatcgacccaaaagcaaacaaggggcactccgttgaggaggcactgagggctgctgtcattgggcctgatgtgttcgcgaagctgctgtcggctgagcgcgctgtcactggctacactgacccctacaccgggcagcagatctccctcttccaggccatgcagaagggcctcatcgtccgggagcacggcatccgcctgctggaggcccagatcgccacgggcggcgtcatcgaccccgtgcacagccaccgcgtgcccgtggacgtggcctaccggcgcggctacttcgatcagatgctgaacttgatcctgttggacccttctgacgacaccaagggcttcttcgaccccaacacgcacgagaacctcacgtacctgcagcttctggagcgctgtgtgcgtgaccccgagacgggcctgtacctcctgccactcagcagcacgcagtccccgctggtggacagtgccacccagcaggccttccagaacctgctgctctccgtgaagtatggacggtttcaggggcagagggtctccgcgtgggagctgatcaactctgagtacttcagcgagggccgcaggaggcagctgctgcgtcgctaccggcagcgcgaggtcacgctggggcaggtggcaaagctgctggaggcggagacgcagagacaggcggacatcatgctgcccgcactgcggagccgggtcaccgtccaccagctcctggaggccggtatcattgaccagcagctgttggaccaagtgctggccgggacaatcagcccggaggccctcctactcatggacggcgtccgcaggtacctgtgcggcctgggagctgtgggcggtgtgcggctgctgccctctggccagcggctcagcctctaccaggccatgaggcagaagctgctggggcccagggtggccctggccctgctggaggcccaggcggccaccggaaccatcatggaccctcacagcccagagagcctctcggtggatgaggccgtgcgcaggggtgtggtggggccggagctgtatggcaggctgaagcgggctgagggtgccattgctggcttcagagaccccttctctgggaagcaggtgtctgtgttccaggccatgaagaaaggtctcatcccttgggagcaagctgcccgcctcctggaggctcaagtggccacaggagggatcattgaccccaccagccaccaccacctccccatgccagtggccattcagcgtggctatgttgaccaggagatggagacagccttgtccagctcctccgagaccttccccacaccggacggccaggggcgcacgagctatgcccagctcctggaggagtgccccagggatgagacttctggccttcacctcctgcccctgccagaaagtgctcctgccctccccaccgaggagcaggtccagaggagcctgcaggccgtgccgggggccaaggatggcacatccctctgggacctgctcagctcctgccacttcaccgaggagcaacggaggggcctgctggaggacgtgcaggaggggaggaccactgtgccacagctgctagcctctgtgcagaggtgggtacaggagaccaagcttctggcccaggcccgcgtcatggtgcccggcccacggggtgaggtacccgctgtctggctgctggatgctggcatcatcacccaggagacccttgaggccctggctcagggcacgcagtcgcccgcccaggtcgccgagcagccggcggtgaaggcctgcctgtggggcacaggctgcgtggccggtgtgctgctacagccctctggggccaaggccagcatcgcccaggccgtgagggatggcctcctgcccacaggcctgggccagaggctgctggaagcccaggtggcatctggcttccttgttgaccccctgaacaaccagagactgtcagtggaggacgcggttaaggtcggcctggtgggcagggagctgagtgagcagctcgggcaggccgagagggcggcggccgggtacccagatccctactctagggcctccctctctctgtggcaggccatggagaaggggctcgtgccacagaacgagggcttgcccctcctgcaggtgcagctggccacagggggtgtggtggaccctgtccacggggtgcacctgccccaggcggcagcctgcagactcggccttctggacacacagacgagccaggtgctgactgcagttgacaaggacaacaagttcttctttgaccccagtgcgcgggaccaggtgacctaccagcagctcagggagcgctgcgtgtgcgactccgagaccggattgttgctgttgccactgccttcagacacagtgcttgaggtggacgaccacaccgcggtggctctgagggccatgaaggtgcccgtcagcacagggaggtttaaggggtgtagcgtgtcactctgggacctgctgctctccgaatacgttggcgctgacaagcggcgggagctggtggcactctgtcggtctgggagggctgcggccctgcggcaggtggtcagcgcagtcaccgccctggtcgaggctgcagagaggcagcccctgcaggccaccttcagagggctccggaagcaggtgtcagccagggacctgttcagggcgcagctgatcagcaggaagacgctggacgagctgagccaggggacaacgactgtgaaggaggtggcggagatggacagcgtgaagcggtccctggagggaggcaacttcattgccggggtccttatccagggcacccaggagaggatgagcatcccagaggccctgaggaggcacatcctgcggcctggcacagccctggtgctgctggaggcacaggcagctaccggcttcatcatcgaccccgcggagaaccggaagctgaccgtggaggaggcgttcaaagcaggaatgttcgggaaagaaacctacgtgaagctgctgtcggccgagcgcgccgtcaccggctacaccgacccctataccgggcagcagatctccctcttccaggccatgcagaaggacctcatcgtccgggagcacggcatccgcctgctggaggcccagatcgccacgggcggcatcatcgaccccgtgcacagccaccgcgtgcccgtggacgtggcctaccgctgcggctacttcgacgaggagatgaaccgcatcctggcggaccccagcgacgacaccaagggcttcttcgaccccaacacgcacgagaacctcacgtacctgcagcttctggagcgctgtgtggaggaccccgagacgggcctgtacctgctacaaatcataaagaaaggagaaaactacgtgtacatcaatgaggccacgagacacgtgttgcaatccagaactgcaaaaatgcgcgtggggaggtttgctgaccaggtggtctctttctgggacctgctgtcctctccatacttcacagaggacaggaagcgggagctcatccaggagtatggagcccagagtgggggcctggagaaattgctggaaatcatcaccacgacaattgaagaaacagagacgcaaaaccaaggcatcaaagtggcggccatcagaggggaggtgacagctgcagacctgttcaactccagggtcatcgatcagaagaccctgcacacacttcgtgtggggaggactgggggacaggcactcagcacgctggagtgtgtgaagccctatctggaaggcagcgactgcattgcgggggtcacggtgccctccaccagggaggtcatgagcctccatgaggccagcaggaaggagctcatccctgcagcatttgcgacttggctgctggaggcgcaggccgccaccgggttcctcctggacccctgcacccgccagaagctctctgtggatgaggctgtggatgtgggcctggtgaacgaggagctgcgggagaggctcctgaaggctgaaagagctgccacgggctacagggatccggccacaggagacacgatcccgctgttccaggccatgcagaagcagctcatcgagaaggcggaggcactgaggctgctggaggtgcaggtggccacggggggtgtcatcgacccacagcaccaccaccggctcccactggaaacagcctacagacggggctgtctgcacaaggacatctatgcgctcatttccgaccagaagcacatgaggaaacggtttgtggacccgaacacgcaagagaaggtctcgtaccgagagctgcaggagaggtgccgcccacaagaggacacgggctgggtgctgttcccagtgaacaaggctgcacgggactccgagcacatcgatgacgagacgagaagggccctggaggcagagcaagtggaaatcacagtgggaaggttcagaggccagaaaccaacactgtgggcactactgaattccgaatacgtgacagaggagaagaagctccagctggtgaggatgtatagaacacacaccagacgggcactgcagacggtagcgcagctcatcttagagttgatcgagaagcaggaaaccagcaacaaacacctgtggttccaaggaattagacgacagatcacagcttctgaactcctcagctcagccataatcacggaggaaatgctccaggacctggaaacgggacggagcacgacgcaagagctcatggaggacgaccgcgtcaagcgctacctggagggcaccagctgcatcgcgggcgtcctggtgcccgccaaggaccagcccggccgccaggagaagatgagcatctaccaggccatgtggaagggcgtgctgcggcccggcacggccctggtgctgctggaggcgcaggcggccaccggcttcgtcatcgaccccgtgcgcaacctgaggctgtcggtggaggagcccgtgcccgcgggcgtggtgggcagcgagatccaggagaagctgctgtcggccgagcgcgccgtcaccggctacaccgacccctacaccgggcagcagatctccctcttccaggccatgcagaaggacctcatcgtccgggagcacggcatccgcctgctggaggcccagatcgccacgggcggcgtcatcgaccccgtgcacagccaccgcgtgcccgtggacgtggcctaccggcgcggctacttcgacgaggagatgaaccgtgtcctggccgaccccagcgacgacaccaagggtttcttcgaccccaacacgcacgagaacctcacgtacgtgcagctgctgcgccgctgcgtgcccgacccggacaccgggctctacatgctgcagctggcaggccggggctccgccgtgcaccagctgagcgaggagctgcgctgtgccctgcgcgacgcccgcgtgacgccaggctcgggcgccctccagggccagagcgtctccgtctgggagctcctcttctaccgcgaggtgtccgaggaccggcgccaggacctgctgagcagataccgggcgggcacgctgaccgtggaggagctgggcgccaccctcacctcgctgctggcccaggcccaggcccaggcccgggccgaggccgaggccgggagcccgcgcccagacccccgggaggccctgcgtgcggccaccatggaggtcaaggtgggccgcctccgggggcgcgcggtgcccgtgtgggacgtgctggcgtccggctacgtgagcagggccgcccgggaggagctgctggccgagtttggctcggggaccctggacttgcccgcgctgacccgccggctgaccgccatcatcgaggaggccgaggaagcccccggggcccggccgcagctccaggacgccaggcgcggcccgcgggagccagggccagccgggcgaggggacggcgactcggggcgctcccagcgagagggccagggggagggcgagacccaggaggccgccgccgccgccgccgccgcccgccgccaggagcagaccctgcgtgatgccaccatggaggtgcagcgcgggcagttccaggggcggccggtctccgtgtgggacgtcctcttctcctcgtacctgagcgaggcccgccgagacgagctcctggcccagcacgcggccggcgccctgggcctgcccgacctcgtcgccgtcctcacccgggtcatcgaggagacggaggagcggctcagcaaggtgtccttccgcggcctgaggcgccaggtgtccgcctccgagctgcacacgtccgggatcctgggccccgagaccctgcgggacctggcccagggcactaagacgctgcaggaggtgacggagatggactcggtcaagcgctacctggagggcaccagctgcatcgcgggcgtcctggtgcccgccaaggaccagcccggccgccaggagaagatgagcatctaccaggccatgtggaagggcgtgctgcggcccggcacggccctggtgctgctggaggcgcaggcggccaccggcttcgtcatcgaccccgtgcgcaacctgaggctgtcggtggaggaggccgtggccgcgggcgtggtgggcggcgagatccaggagaagctgctgtcggccgagcgcgccgtcaccggctacaccgacccctacaccgggcagcagatctccctcttccaggccatgcagaaggacctcatcgtccgggagcacggcatccgcctgctggaggcccagatcgccacgggcggcgtcatcgaccccgtgcacagccaccgcgtgcccgtggacgtggcctaccggcgcggctacttcgacgaggagatgaaccgtgtcctggccgaccccagcgacgacaccaagggtttcttcgaccccaacacgcacgagaacctcacgtacgtgcagctgctgcgccgctgcgtgcccgacccggacaccgggctctacatgctgcagctggcaggccggggctccgccgtgcaccagctgagcgaggagctgcgctgtgccctgcgcgacgcccgcgtgacgccaggctcgggcgccctccagggccagagcgtctccgtctgggagctcctcttctaccgcgaggtgtccgaggaccggcgccaggacctgctgagcagataccgggcgggcacgctgaccgtggaggagctgggcgccaccctcacctcgctgctggcccaggcccaggcccaggcccgggccgaggccgaggccgggagcccgcgcccagacccccgggaggccctgcgtgcggccaccatggaggtcaaggtgggccgcctccgggggcgcgcggtgcccgtgtgggacgtgctggcgtccggctacgtgagcggggccgcccgggaggagctgctggccgagtttggctcggggaccctggacttgcccgcgctgacccgccggctgaccgccatcatcgaggaggccgaggaggcccccggggcccggccgcagctccaggacgcctggcgcggcccgcgggagccagggccagccgggcgaggggacggcgactcggggcgctcccagcgagagggccagggggagggcgagacccaggaggccgccgccgccgccgccgccgcccgccgccaggagcagaccctgcgtgatgccaccatggaggtgcagcgcgggcagttccaggggcggccggtctccgtgtgggacgtcctcttctcctcgtacctgagcgaggcccgccgagacgagctcctggcccagcacgcggccggcgccctgggcctgcccgacctcgtcgccgtcctcacccgggtcatcgaggagacggaggagcggctcagcaaggtgtccttccgcggcctgaggcgccaggtgtccgcctccgagctgcacacgtccgggatcctgggccccgagaccctgcgggacctggcccagggcactaagacgctgcaggaggtgacggagatggactcggtcaagcgctacctggagggcaccagctgcatcgcgggcgtcctggtgcccgccaaggaccagcccggccgccaggagaagatgagcatctaccaggccatgtggaagggcgtgctgcggcccggcacggccctggtgctgctggaggcgcaggcggccaccggcttcgtcatcgaccccgtgcgcaacctgaggctgtcggtggaggaggccgtggccgcgggcgtggtgggcggcgagatccaggagaagctgctgtcggccgagcgcgccgtcaccggctacaccgacccctacaccgggcagcagatctccctcttccaggccatgcagaaggacctcatcgtccgggagcacggcatccgcctgctggaggcccagatcgccacgggcggcgtcatcgaccccgtgcacagccaccgcgtgcccgtggacgtggcctaccggcgcggctacttcgacgaggagatgaaccgtgtcctggccgaccccagcgacgacaccaagggtttcttcgaccccaacacgcacgagaacctcacgtacgtgcagctgctgcgccgctgcgtgcccgacccggacaccgggctctacatgctgcagctggcaggccggggctccgccgtgcaccagctgagcgaggagctgcgctgtgccctgcgcgacgcccgcgtgacgccaggctcgggcgccctccagggccagagcgtctccgtctgggagctcctcttctaccgcgaggtgtccgaggaccggcgccaggacctgctgagcagataccgggcgggcacgctgaccgtggaggagctgggcgccaccctcacctcgctgctggcccaggcccaggcccaggcccgggccgaggccgaggccgggagcccgcgcccagacccccgggaggccctgcgtgcggccaccatggaggtcaaggtgggccgcctccgggggcgcgcggtgcccgtgtgggacgtgctggcgtccggctacgtgagcggggccgcccgggaggagctgctggccgagtttggctcggggaccctggacttgcccgcgctgacccgccggctgaccgccatcatcgaggaggccgaggaggcccccggggcccggccgcagctccaggacgcctggcgcggcccgcgggagccagggccagccgggcgaggggacggcgactcggggcgctcccagcgagagggccagggggagggcgagacccaggaggccgccgccgccgccgccgccgcccgccgccaggagcagaccctgcgtgatgccaccatggaggtgcagcgcgggcagttccaggggcggccggtctccgtgtgggacgtcctcttctcctcgtacctgagcgaggcccgccgagacgagctcctggcccagcacgcggccggcgccctgggcctgcccgacctcgtcgccgtcctcacccgggtcatcgaggagacggaggagcggctcagcaaggtgtccttccgcggcctgaggcgccaggtgtccgcctccgagctgcacacgtccgggatcctgggccccgagaccctgcgggacctggcccagggcactaagacgctgcaggaggtgacggagatggactcggtcaagcgctacctggagggcaccagctgcatcgcgggcgtcctggtgcccgccaaggaccagcccggccgccaggagaagatgagcatctaccaggccatgtggaagggcgtgctgcggcccggcacggccctggtgctgctggaggcgcaggcggccaccggcttcgtcatcgaccccgtgcgcaacctgaggctgtcggtggaggaggccgtggccgcgggcgtggtgggcggcgagatccaggagaagctgctgtcggccgagcgcgccgtcaccggctacaccgacccctacaccgggcagcagatctccctcttccaggccatgcagaaggacctcatcgtccgggagcacggcatccgcctgctggaggcccagatcgccacgggcggcgtcatcgaccccgtgcacagccaccgcgtgcccgtggacgtggcctaccggcgcggctacttcgacgaggagatgaaccgtgtcctggccgaccccagcgacgacaccaagggcttcttcgaccccaacacgcacgagaacctcacgtacgtgcagctgctgcgccgctgcgtgcccgacccggacaccgggctctacatgctgcagctggcaggccggggctccgccgtgcaccagctgagcgaggagctgcgctgtgccctgcgcgacgcccgcgtgacgccaggctcgggcgccctccagggccagagcgtctccgtctgggagctcctcttctaccgcgaggtgtccgaggaccggcgccaggacctgctgagcagataccgggcgagcacgctgaccgtggaggagctgggcgccaccctcacctcgctgctggcccaggcccaggcccaggcccgggccgaggccgaggccgggagcccgcgcccagacccccgggaggccctgcgtgcggccaccatggaggtcaaggtgggccgcctccgggggcgcgcggtgcccgtgtgggacgtgctggcgtccggctacgtgagcagggccgcccgggaggagctgctggccgagtttggctcggggaccctggacttgcccgcgctgacccgccggctgaccgccatcatcgaggaggccgaggaggcccccggggcccggccgcagctccaggacgcctggcgcggcccgcgggagccagggccagccgggcgaggggacggcgactcggggcgctcccagcgagagggccagggggagggcgagacccaggaggccgccgccgccaccgccgccgcccgccgccaggagcagaccctgcgtgatgccaccatggaggtgcagcgcgggcagttccaggggcggccggtctccgtgtgggacgtcctcttctcctcgtacctgagcgaggcccgccgagacgagctcctggcccagcacgcggccggcgccctgggcctgcccgacctcgtcgccgtcctcacccgggtcatcgaggagacggaggagcggctcagcaaggtgtccttccgcggcctgaggcgccaggtgtccgcctccgagctgcacacgtccgggatcctgggccccgagaccctgcgggacctggcccagggcactaagacgctgcaggaggtgacggagatggactcggtcaagcgctacctggagggcaccagctgcatcgcgggcgtcctggtgcccgccaaggaccagcccggccgccaggagaagatgagcatctaccaggccatgtggaagggcgtgctgcggcccggcacggccctggtgctgctggaggcgcaggcggccaccggcttcgtcatcgaccccgtgcgcaacctgaggctgtcggtggaggaggccgtggccgcgggcgtggtgggcggcgagatccaggagaagctgctgtcggccgagcgcgccgtcaccggctacaccgacccctacaccgggcagcagatctccctcttccaggccatgcagaaggacctcatcgtccgggagcacggcatccgcctgctggaggcccagatcgccacgggcggcgtcatcgaccccgtgcacagccaccgcgtgcccgtggacgtggcctaccggcgcggctacttcgacgaggagatgaaccgtgtcctggccgaccccagcgacgacaccaagggcttcttcgaccccaacacgcacgagaacctcacgtacgtgcagctgctgcgccgctgcgtgcccgacccggacaccgggctctacatgctgcagctggcaggccggggctccgccgtgcaccagctgagcgaggagctgcgctgtgccctgcgcgacgcccgcgtgacgccaggctcgggcgccctccagggccagagcgtctccgtctgggagctcctcttctaccgcgaggtgtccgaggaccggcgccaggacctgctgagcagataccgggcgggcacgctgaccgtggaggagctgggcgccaccctcacctcgctgctggcccaggcccaggcccaggcccgggccgaggccgaggccgggagcccgcgcccagacccccgggaggccctgcgtgcggccaccatggaggtcaaggtgggccgcctccgggggcgcgcggtgcccgtgtgggacgtgctggcgtccggctacgtgagcggggccgcccgggaggagctgctggccgagtttggctcggggaccctggacttgcccgcgctgacccgccggctgaccgccatcatcgaggaggccgaggaggcccccggggcccggccgcagctccaggacgcctggcgcggcccgcgggagccagggccagccgggcgaggggacggcgactcggggcgctcccagcgagagggccagggggagggcgagacccaggaggccgccgccgccgccgccgccgcccgccgccaggagcagaccctgcgtgatgccaccatggaggtgcagcgcgggcagttccaggggcggccggtctccgtgtgggacgtcctcttctcctcgtacctgagcgaggcccgccgagacgagctcctggcccagcacgcggccggcgccctgggcctgcccgacctcgtcgccgtcctcacccgggtcatcgaggagacggaggagcggctcagcaaggtgtccttccgcggcctgaggcgccaggtgtccgcctccgagctgcacacgtccgggatcctgggccccgagaccctgcgggacctggcccagggcactaagacgctgcaggaggtgacggagatggactcggtcaagcgctacctggagggcaccagctgcatcgcgggcgtcctggtgcccgccaaggaccagcccggccgccaggagaagatgagcatctaccaggccatgtggaagggcgtgctgcggcccggcacggccctggtgctgctggaggcgcaggcggccaccggcttcgtcatcgaccccgtgcgcaacctgaggctgtcggtggaggaggccgtggccgcgggcgtggtgggcggcgagatccaggagaagctgctgtcggccgagcgcgccgtcaccggctacaccgacccctacaccgggcagcagatctccctcttccaggccatgcagaaggacctcatcgtccgggagcacggcatccgcctgctggaggcccagatcgccacgggcggcgtcatcgaccccgtgcacagccaccgcgtgcccgtggacgtggcctaccggcgcggctacttcgacgaggagatgaaccgcgtcctggccgaccccagcgacgacaccaagggcttcttcgaccccaacacgcacgagaacctcacgtacctgcagcttctgcagagggccaccctggaccctgagacggggctcctatttctttctctctctctacagtgactgggcttcctccgtgcagttttctgcaactctggagaagttgaggcatacttgtgtgtctgggttgtttttttttttttttgtcattctttaattttgttgttttacccattcgttatctgtggaaaacgttttaagttgtcatgtgacagaaacttttcctttgtccatcgaggtgtttcataagttttttggtgtgttttctgggtcgtctatgtgtcatatggttttacttttctcccggaatt

SEQ ID NO: 5340 - protein, 2000 aa, Homo sapien
MAATLGAGTPPRPQARSIAGVYVEASGQAQSVYAAMEQGLLPAGLGQALLEAQAATGGLVDLARGQLLPVSKALQQGLVGLELKEKLLAAERATTGYPDPYGGEKLALFQAIGKEVVDRALGQSWLEVQLATGGLVDPAQGVLVAPEPACHQGLLDRETWHKLSELEPGTGDLRFLNPNTLERLTYHQLLERCVRAPGSGLALLPLKITFRSMGGAVSAAELLEVGILDEQAVQGLREGRLAAVDVSARAEVRRYLEGTGSVAGVVLLPEGHKKSFFQAATEHLLPMGTALPLLEAQAATHTLVDPITGQRLWVDEAVRAGLVSPELHEQLLVAEQAVTGHHDPFSGSQIPLFQAMKKGLVDRPLALRLLDAQLATGGLVCPARRLRLPLEAALRCGCLDEDTQRQLSQAGSFSDGTHGGLRYEQLLALCVTDPETGLAFLPLSGGPRGGEPQGPPFIKYSTRQALSTATATVSVGKFRGRPVSLWELLFSEAISSEQRAMLAQQYQEGTLSVEKLAAELSATLEQAAATARVTFSGLRDTVTPGELLKAEIIDQDLYERLEHGQATAKDVGSLASAQRYLQGTGCIAGLLLPGSQERLSIYEARCKGLLRPGTALILLEAQAATGFIIDPKANKGHSVEEALRAAVIGPDVFAKLLSAERAVTGYTDPYTGQQISLFQAMQKGLIVREHGIRLLEAQIATGGVIDPVHSHRVPVDVAYRRGYFDQMLNLILLDPSDDTKGFFDPNTHENLTYLQLLERCVRDPETGLYLLPLSSTQSPLVDSATQQAFQNLLLSVKYGRFQGQRVSAWELINSEYFSEGRRRQLLRRYRQREVTLGQVAKLLEAETQRQADIMLPALRSRVTVHQLLEAGIIDQQLLDQVLAGTISPEALLLMDGVRRYLCGLGAVGGVRLLPSGQRLSLYQAMRQKLLGPRVALALLEAQAATGTIMDPHSPESLSVDEAVRRGVVGPELYGRLKRAEGAIAGFRDPFSGKQVSVFQAMKKGLIPWEQAARLLEAQVATGGIIDPTSHHHLPMPVAIQRGYVDQEMETALSSSSETFPTPDGQGRTSYAQLLEECPRDETSGLHLLPLPESAPALPTEEQVQRSLQAVPGAKDGTSLWDLLSSCHFTEEQRRGLLEDVQEGRTTVPQLLASVQRWVQETKLLAQARVMVPGPRGEVPAVWLLDAGIITQETLEALAQGTQSPAQVAEQPAVKACLWGTGCVAGVLLQPSGAKASIAQAVRDGLLPTGLGQRLLEAQVASGFLVDPLNNQRLSVEDAVKVGLVGRELSEQLGQAERAAAGYPDPYSRASLSLWQAMEKGLVPQNEGLPLLQVQLATGGVVDPVHGVHLPQAAACRLGLLDTQTSQVLTAVDKDNKFFFDPSARDQVTYQQLRERCVCDSETGLLLLPLPSDTVLEVDDHTAVALRAMKVPVSTGRFKGCSVSLWDLLLSEYVGADKRRELVALCRSGRAAALRQVVSAVTALVEAAERQPLQATFRGLRKQVSARDLFRAQLISRKTLDELSQGTTTVKEVAEMDSVKRSLEGGNFIAGVLIQGTQERMSIPEALRRHILRPGTALVLLEAQAATGFIIDPAENRKLTVEEAFKAGMFGKETYVKLLSAERAVTGYTDPYTGQQISLFQAMQKDLIVREHGIRLLEAQIATGGIIDPVHSHRVPVDVAYRCGYFDEEMNRILADPSDDTKGFFDPNTHENLTYLQLLERCVEDPETGLYLLQIIKKGENYVYINEATRHVLQSRTAKMRVGRFADQVVSFWDLLSSPYFTEDRKRELIQEYGAQSGGLEKLLEIITTTIEETETQNQGIKVAAIRGEVTAADLFNSRVIDQKTLHTLRVGRTGGQALSTLECVKPYLEGSDCIAGVTVPSTREVMSLHEASRKELIPAAFATWLLEAQAATGFLLDPCTRQKLSVDEAVDVGLVNEELRERLLKAERAATGYRDPATGDTIPLFQAMQKQLIEKAEALRLLEVQVATGGVIDPQHHHRL

SEQ ID NO: 5341 - DNA, 1816 bp, Homo sapien
ggaggccgaggaggcccccggggcccggccgcagctccaggacgcctggcgcggcccgcgggagccagggccagccgggcgaggggacggcgactcggggcgctcccagcgagagggccagggggagggcgagacccaggaggccgccgccgccgcccgccgccaggagcagaccctgcgtgatgccaccatggaggtgcagcgcgggcagttccaggggcggccggtctccgtgtgggacgtcctcttctcctcgtacctgagcgaggcccaccgagacgagctcctggcccagcacgcggccggcgccctgggcctgcccgacctcgtcgccgtcctcacccgggtcatcgaggagacggaggagcggctcagcaaggtgtccttccgcggcctgaggcgccaggtgtccgcctccgagctgcacacgtccgggatcctgggccccgagaccctgcgggacctggcccagggcactaagacgctgcaggaggtgacggagatggactcggtcaagcgctacctggagggcaccagctgcatcgcgggcgtcctggtgcccgccaaggaccagcccggccgccaggagaagatgagcatctaccaggccatgtggaagggcgtgctgcggcccggcacggccctggtgctgctggaggcgcaggcggccaccggcttcgtcatcgaccccgtgcgcaacctgaggctgtcggtggaggaggccgtggccgcgggcgtggtgggcggcgagatccaggagaagctgctgtcggccgagcgcgccgtcaccggctacaccgacccctacaccgggcagcagatctccctcttccaggccatgcagaaggacctcatcgtccgggagcacggcatccgcctgctggaggcccagatcgccacgggcggcgtcatcgaccccgtgcacagccaccgcgtgcccgtggacgtggcctaccggcgcggctacttcgacgaggagatgaaccgcgtcctggccgaccccagcgacgacaccaagggcttcttcgaccccaacacgcacgagaacctcacgtacctgcagcttctgcagagggccaccctggaccctgagacggggctcctatttctttctctctctctacagtgactgggcttcctccgtgcagttttctgcaactctggagaagtggaggcatacttgtgtgtctgggttgtttttttttttgtttttttttttttttgttttgtcattctttaattttgttgttttacccattcgttatctgtggaaaacgttttaagttgtcatgtgacagaaacttttcctttgtccatcgaggtgtttcataagttttttggtgtgttttctgggtcgtctatgtgtcatatggttttacttttctctcctttttcgttttcagaacatttttctgtctgttttggattcactgcttccattttacagaatgtcactctttagactctcagtccatcatgccatcgggtactcttgttgcagtgtaatttttattacatgcggttatttccctaacgatgtgctattcacgttcatcttcaaactcattttccatcagccagtgtctactatttagtgccctggctctatttcggtcctcctccccgggctttccctggctgctgtgctggccaaaagcatgggctttattctctccattggctgctgctccaccttagaggtgtgacctcactagcgttgactgagcgagtctgttgtggagaagaactttttgtagtaatttactaggaaaaattctgaacaagtaaaatatgaaggaaaaaaaaaaaaaaaaaa

SEQ ID NO: 5342 - DNA, 2999 bp, Homo sapien
  Unsure 1568-1832: Unknown base
gcaattgcaccctgcctgccagagtagaaatactggtaggccccaggctctgctgccccttccatgtccttgtgtaagcatccatggacaaagctgactcacggggtgtgcacagctgcagggaggccaggaaacaggggttttattctagagggccttgtgctcagtgacagaccagagtcccatcactgagagagcagggctggggcagcacaaaggactggagagcatttgccatgatgccatgtgcacagccagtgcaagtccttcattgtagctgtggtcagaggtcatgagacactgccttcagcagccctgggagtccacctggtgtgtggttagagctgtgcatctgcagatttcagaaggacttacgtttggtgaggtgctttgaagtaacacttcacaaataccaagaagcaagaaatacacaaataagcaggtaatggttctttggtgtttacattagctagtgggcaacggttctttggtgttcacattagctatagtcccagaactcagtccatgaggtggaatcacaaaaatggaattcatttctggctgtcagtacacaaactgatttaagatatcaccttgaattttaagctgacaaacagtgatctaaactgaatttcactgattgccccacctgaaagtcagacctgatagataatgccctcccttaactcaaggccagcagcagatgtgttagaggggacccttgtgcctcgcagccctcatctcctaatggctgtggggtcactgtgtcgagttgtaatgcctaatgagctcctctaaaaacatcctgaaacttgtgtaaaaaaaacagcagactcccagtggaactcgccttcagatgcagcccagaataagagttctagaatgtgtgtgccatccttttgtctcaatctgcatgattgcaagtctcttcaacatgattgggtgcgtggagtgtctcggtcatgtgtcttcccctctgagcatgccttttgattcgcacctgtgtcacaattgtgccagcctgtgagatgtgtctgcctgtcaccagtatcggcacatttagttttccctttacgtgagttttggtaaaatagtgacaaaatgtaatgcagtgctcagtcacagaaaaatgtcaggcctacagaaatggagcatttggctggcgggtagcgtgatgaccataggctttatttggctggtgtggtaaacaagcagcagcttgtgcaggtgagaataaatggccatattgcatttcattttaaggactcccttaaaatgaaaatcttcgtgtgggacatgaacacaggctttcacgaaattgatcatctacactatatgtatgactgttgaaaggctgttgttcctcagaaattcttaaaatgttatgtaatgtacatgagtcccttcaggaagtcatcagctttgttcagtttcctcagattagatagtaaaactgagattatgaactataaagatgtgtgtaatttatctgtcagtgaacttgactttaataaaagctttttgaaaaagaactctgggtggggtgcattgggctcacacaaattaannnnnnnnnnnnnnnnnnnnnnnnnnnnnnnnnnnnnnnnnnnnnnnnnnnnnnnnnnnnnnnnnnnnnnnnnnnnnnnnnnnnnnnnnnnnnnnnnnnnnnnnnnnnnnnnnnnnnnnnnnnnnnnnnnnnnnnnnnnnnnnnnnnnnnnnnnnnnnnnnnnnnnnnnnnnnnnnnnnnnnnnnnnnnnnnnnnnnnnnnnnnnnnnnnnnnnnnnnnnnnnnnnnnnnnnnnnnnnnnnnnnnnnnnnnnnnnnnnnnnnnnnctctcgatgtcactggctttccatgtaagcagagcacatcatgtgagccccattcgtggatgtcagtcagcagaacagaatcttggacctggagcttgtttgtcctgtgctagaggttggaggtgtctctgtctttctgttggttcctgtcagttcaggtcacttagagattctgttacatacaccagctctgacaggttgggggagatgatcaaccttccgcctgcgcctgttcccttccctgactcatgccaaagtatccctgagatctgcaagggaccgaggacagtactggctggtggtctgggtacaggccacagaggcatctggaccccatgtgcatctggaccagtttggttggatccattcatggacacaaaacggatgtgaactcacagagctacattttctccctgcccctgttcaggcacagtgaggtgtcggggaatgtagctgccagagttgactgtcccgttctttggtgtaatgcctgaaggccacctttaccattggtctgtggtcctcactgaagaaagaaacattcttcctaaaagactttttttcctcagagttggagcccacagcgtggtcaggaaagagaagtagccactggtggctcctggcatcctcctgctgggcagccccttctcaaagtgtgaggggtccccttgtgtacaagcaggaaggctctgagaaagtcaggtttgctcctaccacaggataattccgatgaacctgaaaagcgggttttggcttgtgtgcagggactctggtggaagaaagggtgacagcacctggcctgggcatgacacaagttaggacccgtaccaagaggccctggaattgagggtgggggttgctgtggactctttctccctcttaggaaactctattgggtctccatctgtcacagaagcagtaaatgatgtaggggctgccaggtatagggtcctgtggggatgctggaacatgccgaggcaggacgtgccagccaccctctgcccatatgtgcagcagggccacagatgtgcttgtcggtaggagagaccaagctgtctgtgtgccgatgtcttgacacctgagacttcaggttcacccatcctggttctgccattccattgcagggtggcttccctcctttggggactcttaacgctttggtctgtt

SEQ ID NO: 5343 - protein, 154 aa, Homo sapien
  unsure 58: unknown amino acid
  unsure 59: unknown amino acid
  unsure 60: unknown amino acid
  unsure 61: unknown amino acid
  unsure 62: unknown amino acid
  unsure 63: unknown amino acid
  unsure 64: unknown amino acid
  unsure 65: unknown amino acid
  unsure 66: unknown amino acid
  unsure 67: unknown amino acid
  unsure 68: unknown amino acid
  unsure 69: unknown amino acid
  unsure 70: unknown amino acid
  unsure 71: unknown amino acid
  unsure 72: unknown amino acid
  unsure 73: unknown amino acid
  unsure 74: unknown amino acid
  unsure 75: unknown amino acid
  unsure 76: unknown amino acid
  unsure 77: unknown amino acid
  unsure 78: unknown amino acid
  unsure 79: unknown amino acid
  unsure 80: unknown amino acid
  unsure 81: unknown amino acid
  unsure 82: unknown amino acid
  unsure 83: unknown amino acid
  unsure 84: unknown amino acid
  unsure 85: unknown amino acid
  unsure 86: unknown amino acid
  unsure 87: unknown amino acid
  unsure 88: unknown amino acid
  unsure 89: unknown amino acid
  unsure 90: unknown amino acid
  unsure 91: unknown amino acid
  unsure 92: unknown amino acid
  unsure 93: unknown amino acid
  unsure 94: unknown amino acid
  unsure 95: unknown amino acid
  unsure 96: unknown amino acid
  unsure 97: unknown amino acid
  unsure 98: unknown amino acid
  unsure 99: unknown amino acid
  unsure 100: unknown amino acid
  unsure 101: unknown amino acid
  unsure 102: unknown amino acid
  unsure 103: unknown amino acid
  unsure 104: unknown amino acid
  unsure 105: unknown amino acid
  unsure 106: unknown amino acid
  unsure 107: unknown amino acid
  unsure 108: unknown amino acid
  unsure 109: unknown amino acid
  unsure 110: unknown amino acid
  unsure 111: unknown amino acid
  unsure 112: unknown amino acid
  unsure 113: unknown amino acid
  unsure 114: unknown amino acid
  unsure 115: unknown amino acid
  unsure 116: unknown amino acid
  unsure 117: unknown amino acid
  unsure 118: unknown amino acid
  unsure 119: unknown amino acid
  unsure 120: unknown amino acid
  unsure 121: unknown amino acid
  unsure 122: unknown amino acid
  unsure 123: unknown amino acid
  unsure 124: unknown amino acid
  unsure 125: unknown amino acid
  unsure 126: unknown amino acid
  unsure 127: unknown amino acid
  unsure 128: unknown amino acid
  unsure 129: unknown amino acid
  unsure 130: unknown amino acid
  unsure 131: unknown amino acid
  unsure 132: unknown amino acid
  unsure 133: unknown amino acid
  unsure 134: unknown amino acid
  unsure 135: unknown amino acid
  unsure 136: unknown amino acid
  unsure 137: unknown amino acid
  unsure 138: unknown amino acid
  unsure 139: unknown amino acid
  unsure 140: unknown amino acid
  unsure 141: unknown amino acid
  unsure 142: unknown amino acid
  unsure 143: unknown amino acid
  unsure 144: unknown amino acid
  unsure 145: unknown amino acid
  unsure 146: unknown amino acid
MSPFRKSSALFSFLRLDSKTEIMNYKDVCNLSVSELDFNKSFLKKNSGWGALGSHKLXXXXXXXXXXXXXXXXXXXXXXXXXXXXXXXXXXXXXXXXXXXXXXXXXXXXXXXXXXXXXXXXXXXXXXXXXXXXXXXXXXXXXXXXXSRCHWLSM

SEQ ID NO: 5344 - DNA, 920 bp, Homo sapien
atttcaggatacttgggcttttcctagagtgacagacaaggagggggaatttcacatctttcatattttctgtgcaattcatctgcctccaattttataacactgactttgtgttacaaagaatttaatattgtaatgagcaaataagacaaaattagaaagagttctttgactcctggaagtacctgtatctttagctaagtagccctaggatgtacattaatattataccatctgaagcatatctttgtaaattaaataaacaagagacagaaaaattggcatatgatgtggttttaggttgcagcttcagtgtctgaaggtaattggcttttcagctttgttttatatccagtttgatttgtgaaagaatccttaggccttgactaggactcctctgttactatttgggagccagttggtgcagaaaagggacagtttctttttgctcctttggcgagaaggaatatactaagcaggtggtggaagtaaacctcagattgattgaatctgaggagcttcttacagtagctccccccggagtgctcttgacattttgggtatgccactttttcattgttcagtactttcccacatactacaggacatttataggtccttcacccaccaaatgccatttgagcctgcaaatcctcgtaacagccaaaaaatgcacagcatattttcagatgccccttagactgctaatactacctctggttgaaaaccactatcagggaaaatatttctaatccctgcctctgtaataccatattctgtacttttcttcctattttactctgccatgccctcatgttttcattgttatctctttttcatctttcatctttactaggcaataagaatcttagggatcacagattgactcttggctgggtgcggtagctcacacctataat

SEQ ID NO: 5345 - protein, 32 aa, Homo sapien
FQDTWAFPRVTDKEGEFHIFHIFCAIHLPPIL

SEQ ID NO: 5346 - DNA, 1360 bp, Homo sapien
  Unsure 502-713: Unknown base
tcgagccaccatgctaggccagtctatcttccttagttctccattttcttctataagacagaactaatcatgttacttagagaattaaattcaaacatggctcttcacagtttggccataacctatctctttaattttttctttccttgaattttttgagatattccagacccttggatggctttttgtttgcccccgtccctaagccgccttgatcatttttaatagcttaaaaagtacttttaagtattttatttcatcatgcctttaactgtcttttactatgtgctgtcatgttgtatgctaggatacgtagatgagtaaggcatgatctctgcctttgatccttactattaggaaataaggtgtattttatagttatgttagtattgagaaaatgaattctaagaatatgagttatagctaatttaaaaagtaccgtattcccagacatcagtccagagctatataatccgtgtccatgcctcttttaaaaaaaacnnnnnnnnnnnnnnnnnnnnnnnnnnnnnnnnnnnnnnnnnnnnnnnnnnnnnnnnnnnnnnnnnnnnnnnnnnnnnnnnnnnnnnnnnnnnnnnnnnnnnnnnnnnnnnnnnnnnnnnnnnnnnnnnnnnnnnnnnnnnnnnnnnnnnnnnnnnnnnnnnnnnnnnnnnnnnnnnnnnnnnnnnnnnnnnnnnnnnnnnnnnnnnnnnnnntcaaacgatcttcccaccttagctgttttgggtttgagtaacatgtaattgttacttgcctttaagtgcctctctttcagctcatgtggacaagaaaataatccctatcctgttgtttaaaagtgggtatacacacatttttgtgatttttagacttttttgcctgattttcacacagttttgactttaattttcttctttattagaagatatgggtaactttagaacctctgagttcaaggaaggatctaagcaatgaggccagaggagtgagatgtcctatggtaaccaagcataccatttctttgtcaagtgggcttttgtttatggctgcttaggggcttaaaagctccatggactggtgaggattatcatttgaatggaatttccccaattcaagaaccttactattatcctccaatcagttctacactgttggggaaaatcccctggaccttatataacatactttgtaaccatgcagttagttactcttacactcttgtcattataaatgcttgatcaatagttgatagactagctcttgatcagagtacccttgtatggagagaaggaaaaaatgccatacatttcacttgattctgtgaaccataatgcttaggacagtagtggtttgggtttgattt

SEQ ID NO: 5347 - protein, 90 aa, Homo sapien
  unsure 8: unknown amino acid
  unsure 9: unknown amino acid
  unsure 10: unknown amino acid
  unsure 11: unknown amino acid
  unsure 12: unknown amino acid
  unsure 13: unknown amino acid
  unsure 14: unknown amino acid
  unsure 15: unknown amino acid
  unsure 16: unknown amino acid
  unsure 17: unknown amino acid
  unsure 18: unknown amino acid
  unsure 19: unknown amino acid
  unsure 20: unknown amino acid
  unsure 21: unknown amino acid
  unsure 22: unknown amino acid
  unsure 23: unknown amino acid
  unsure 24: unknown amino acid
  unsure 25: unknown amino acid
  unsure 26: unknown amino acid
  unsure 27: unknown amino acid
  unsure 28: unknown amino acid
  unsure 29: unknown amino acid
  unsure 30: unknown amino acid
  unsure 31: unknown amino acid
  unsure 32: unknown amino acid
  unsure 33: unknown amino acid
  unsure 34: unknown amino acid
  unsure 35: unknown amino acid
  unsure 36: unknown amino acid
  unsure 37: unknown amino acid
  unsure 38: unknown amino acid
  unsure 39: unknown amino acid
  unsure 40: unknown amino acid
  unsure 41: unknown amino acid
  unsure 42: unknown amino acid
  unsure 43: unknown amino acid
  unsure 44: unknown amino acid
  unsure 45: unknown amino acid
  unsure 46: unknown amino acid
  unsure 47: unknown amino acid
  unsure 48: unknown amino acid
  unsure 49: unknown amino acid
  unsure 50: unknown amino acid
  unsure 51: unknown amino acid
  unsure 52: unknown amino acid
  unsure 53: unknown amino acid
  unsure 54: unknown amino acid
  unsure 55: unknown amino acid
  unsure 56: unknown amino acid
  unsure 57: unknown amino acid
  unsure 58: unknown amino acid
  unsure 59: unknown amino acid
  unsure 60: unknown amino acid
  unsure 61: unknown amino acid
  unsure 62: unknown amino acid
  unsure 63: unknown amino acid
  unsure 64: unknown amino acid
  unsure 65: unknown amino acid
  unsure 66: unknown amino acid
  unsure 67: unknown amino acid
  unsure 68: unknown amino acid
  unsure 69: unknown amino acid
  unsure 70: unknown amino acid
  unsure 71: unknown amino acid
  unsure 72: unknown amino acid
  unsure 73: unknown amino acid
  unsure 74: unknown amino acid
  unsure 75: unknown amino acid
  unsure 76: unknown amino acid
  unsure 77: unknown amino acid
  unsure 78: unknown amino acid
MPLLKKTXXXXXXXXXXXXXXXXXXXXXXXXXXXXXXXXXXXXXXXXXXXXXXXXXXXXXXXXXXXXXXXXXXXXXXXKRSSHLSCFGFE

SEQ ID NO: 5348 - DNA, 976 bp, Homo sapien
atcttataaacgatatctttgggctacagttacaattcagaggcattggcgtgcttatttaagaagaaaacaagatcaacaaagatatgaaatgctaaaatcatcaactcttataatccaatctatgttcagaaaatggaagcaacgtaaaatgcaatcacaagtaaaagctacagtaatattgcaagagcttttagagaatggcatttaagaaaacaagctaaagaagaaaattctgctattatcatacaatcatggtatagaatgcataaagaattacggaagtatatttatattagatcttgtgttgttatcattcagaaaagatttcggtgctttcaagcccaaaagttatataaaagaagaaaagagtccatactaaccatccagaagtactacaaagcatatctgaaaggaaagattgagcgcaccaactatttgcagaaacgagctgcagccattcaattacaagctgcttttaggagactgaaagctcataatttatgtagacaaattagagctgcttgtgttattcagtcatactggagaatgagacaagacagagttcgatttttaaaccttaagaagactattatcaaatttcaggcacatgtaagaaaacatcaacaacgacagaaatataagaagatgaagaaagcagctgttataattcagactcatttccgagcttatatttttgccatgaaagttctagcatcttaccagaaaacacgctctgctgtcattgtgctgcagtctgcatatagagggatgcaagccaggaaaatgtatattcacatcctcacatctgttataaagattcaatcatattatcgtgcttatgtttctaaaaaggaatttttgagcctaaaaaatgctacaataaaattgcagtcaactgttaagatgaaacaaacacgtaacaatattgcatttaagagcagctgcactatttatccagcaatgttaccgttcc

SEQ ID NO: 5349 - protein, 324 aa, Homo sapien
SYKRYLWATVTIQRHWRAYLRRKQDQQRYEMLKSSTLIIQSMFRKWKQRKNAITSKSYSNIARAFREWHLRKQAKEENSAIIIQSWYRMHKELRKYIYIRSCVVIIQKRFRCFQAQKLYKRRKESILTIQKYYKAYLKGKIERTNYLQKRAAAIQLQAAFRRLKAHNLCRQIRAACVIQSYWRMRQDRVRFLNLKKTIIKFQAHVRKHQQRQKYKKMKKAAVIIQTHFRAYIFAMKVLASYQKTRSAVIVLQSAYRGMQARKMYIHILTSVIKIQSYYRAYVSKKEFLSLKNATIKLQSTVKMKQTRNNIAFKSSCTIYPAMLP

SEQ ID NO: 5350 - DNA, 2384 bp, Homo sapien
gaacctctactttgactgttcaagaccaagaggagttgtgtaatgggaaatgcaagtcaaaacagctttgtaggtctcagagtttgcttttaagaagtagtacaagaaggaatagttatatcaatacaccagtggctgaaattatcatgaaaccaaatgttggacaaggcagcacaagtgtgcaaacagctatggaaagtgaactcggagagtctagtgccacaatcaataaaagactctgcaaaagtacaatagaactttcagaaaattctttacttccagcttcttctatgttgactggcacacaaagcttgctgcaacctcatttagagagggttgccatcgatgctctacagttatgttgtttgttacttcccccaccaaatcgtagaaagcttcaacttttaatgcgtatgatttcccgaatgagtcaaaatgttgatatgcccaaacttcatgatgcaatgggtacgaggtcactgatgatacataccttttctcgatgtgtgttatgctgtgctgaagaagtggatcttgatgagcttcttgctggaagattagtttctttcttaatggatcatcatcaggaaattcttcaagtaccctcttacttacagactgcagtggaaaaacatcttgactacttaaaaaagggacatattgaaaatcctggagatggactatttgctcctttgccaacttacccatactgtaagcagattagtgctcaggagtttgatgagcaaaaagtttctacctctcaagctgcaattgcagaacttttagaaaatattattaaaaacaggagtttacctctaaaggagaaaagaaaaaaactaaaacagtttcagaaggaatatcctttgatatatcagaaaagatttccaaccacggagagtgaagcagcactttttggtgacaaacctacaatcaagcaaccaatgctgattttaagaaaaccaaagttccgtagtctaagataactaactgaattaaaaattatgtaatacttgtggaactttgataaatgaagccatatctgagaatgtagctactcaaaaggaagtctgtcattaataaggtatttctaaataaacacattatgtaaggaagtgccaaaatagttatcaatgtgagactcttaggaaactaactagatctcaattgagagcacataacaatagatgataccaaatactttttgtttttaacacagctatccagtaaggctatcatgatgtgtgctaaaattttatttacttgaattttgaaaactgagctgtgttagggattaaactataattctgttcttaaaagaaaatttatctgcaaatgtgcaagttctgagatattagctaatgaattagttgtttggggttacttctttgtttctaagtataagaatgtgaagaatatttgaaaactcaatgaaataattctcagctgccaaatgttgcactcttttatatattctttttccacttttgatctatttatatatatgtatgtgtttttaaaatatgtgtatattttatcagatttggttttgccttaaatattatccccaattgcttcagtcattcatttgttcagtatatatattttgaattctagttttcataatctattagaagatggggatataaaagaagtataaggcaatcatatattcattcaaaagatatttatttagcaactgctatgtgcctttcgttgttccagatatgcagagacaatgataaataaaacatataatctcttccataaggtatttattttttaatcaagggagatacacctatcagatgtttaaaataacaacactacccactgaaatcagggcatatagaatcattcagctaaagagtgacttctatgatgatggaacaggtctctaagctagtggttttcaaactggtacacattagactcacccgaggaattttaaaacagcctatatgcccagggcctaacttacactaattaaatctgaattttggggatgttgtatagggattagtattttttttaatctaggtgattccaatattcagccaactgtgagaatcaatggcctaaatgctttttataaacatttttataagtgtcaagataatggcacattgactttattttttcattggaagaaaatgcctgccaagtataaatgactctcatcttaaaacaaggttcttcaggtttctgcttgattgacttggtacaaacttgaagcaagttgccttctaatttttactccaagattgtttcatatctattccttaagtgtaaagaaatatataatgcatggtttgtaataaaatcttaatgtttaatgactgaaaaaaaaaaaaaaaaaaaaaaaaaaaaaaaaaaaaaaaaaaaaa

SEQ ID NO: 5351 - protein, 278 aa, Homo sapien [sequence omitted]

SEQ ID NO: 5352 - DNA, 1867 bp, Homo sapien
  Unsure 1630: Unknown base
  Unsure 1826: Unknown base
gtttcataatacagcatggtctggtagtttgcaaaatggtgtgcttttggggagatacactagcaatttttttaaaaaatggaacagtgtgataggaagcctgctggatgatttcttaaatattctaaaatgtaagtcaaatatgttttaataacaaagacttaaatggcttttctccctagagactgaaactagtattcattgtgttcagaacttaattgggcttgaactgagatttaaatctaataaacaagttaataaatgtgtatgttttgttgtgggtttggtagtgatctgtggttctatagggtttaataggaattgcttttgatttgtttctggctttagaatgtgaggcaaattttacattcttggttctattaagattttcttaggcatgctaacatgccaacaaaaagccatgtaagtattgtataaaaagattcacattgttaatttagccattttgaaattcagatgagtgagcaagttgataatggcctcatctctgacctgagaaaaaacaactttgacccttgttcttaaaatgctttaaccttgaagttgcttgagacttaagaggtcatgttgctttaggtttaataaatagccttaactatttggaggggaaaaaatgggtccacttttttttttttttggcgtttgcatgtacaactttctatttttagcctatatttggaaagaaagcacttaacattttaggaattctttttaaagctgcttgcaaagtgttggtgattttactgaaaacttttgagatcttcattttacaggcagacctgtctaactacaagccagacttgggttttctcctgtagtttgaagacacactgactcctgacaaaatgcagcctgcaacttcctggagaacaactcagtgtcacattaaagtttattatgtatttaatgatacactgtttaattgacagttttgcatagtttgtctaactttagagaattaagagcctctcaactgagcagtaaaggtaaggagagctcaatctgcacagagccagtttttagtgtttgatggaaataagatcatcatgcccacttgagacttcagattattctttagcttagtggttgtatgagttacatcttattaaagtcgaaattaatgtagttttctgccttgataacatttcatatgtggtattagttttaaagggtcattaggaaaatgcacatattccatgaattttaagacccatagaaaagttgaagaatgcttaattttcttatccagtaatgtaaacacagagacagaacattgagatgtgcctagttctgtatttacagtttggtctggctgtttgagttctagcgcatttaatgttaataaataaaatactgaattttaaagctgttaagaaattgtccagaacgagaatattgaaataaaaacttcaaggttattatcgcagtttttatggcgtttttgttttgtcactacagatggtctaaaggttacttattaattaattggggaagtggagacaaggaccaaagtttatctggattttcttatttaatcttcattacctgtgaaatatgtatttgtattcttactttacatatgagatcagaagttcattttcaagcagantggaaaggtggtaaatggactctgaattaaaatatgtcagtattttaaaaggttatcttctgcctagtatttttatggaatctgacaagttctcagatcacacttgtttccttaaatcttggtaagtctgaagcattcttcattttgtttatattatacacgttagtaaggtgggagttcttttgttttttgtgtnttttggccagttgataacatgaaagtttaagagaggaggcc

SEQ ID NO: 5353 - protein, 49 aa, Homo sapien [sequence omitted]

SEQ ID NO: 5354 - DNA, 736 bp, Homo sapien
acatgttatggagaaatggtcataagatctgaacaacaaaagtatgtttactacttagcaaacatgtctgttggacaggttctgctaacataatgagagtgcatttgtacattcaggtagctaagacttaacaaatctaaaaattccttacttcaaaagttcagctatttaaagtgtttggttcacaattaaaggagattgtgttttaaacaatacatactgtactttttaaaggttgtattagcacatgcaaacagttcaccttaaaaaaacagaatgagtcataaggagtcagacatgccattaatcagctcttaattatcttccataaaagagggaaggaaaaaaatagagataacacgaatctgtgtataatccaaaaggttctctgtgacttggaatgaagccagaaaaagaatctcattttgtttcacacactggcacctggtatggagatcaacagttgctcaaaggaattttaaataattataatgtgttaatagataattaattgggaattgattctgcaaggcaaagtcaaacatttgttttataattgtgcagttcttgcaagagatcacctatactttttttcccccatcaggtataatgggtctctcccaaatggcgatagaggaaggaggaaaagtaggtttgctttgtttaaaagacctaaggcaaatggggtgaagcccagcactgtgcatattgcttgtactcctcaggctgcaaaggt

SEQ ID NO: 5355 - protein, 111 aa, Homo sapien
MKPEKESHFVSHTGTWYGDQQLLKGILNNYNVLIDNNWELILQGKVKHLFYNCAVLARDHLYFFSPIRYNGSLPNGDRGRRKSRFALFKRPKANGVKPSTVHIACTPQAAK

SEQ ID NO: 5356 - DNA, 530 bp, Homo sapien
ccactttgtaattgttacgctgcttactgaagtaaactggaccatgcagtaggcatacagcatacagccagggtggttttggcaatgctgagcccactgttttacaagtgacataaaatggatgtcatatgtacaaagaatctactgagagggaaactggattacaggagagctcccttatagtcctttgtcaggggacagaatacctgggtcacactgggcttcagattgagagttgattcatgttctgagtccatatgatgagacacattacgatggaattgtcacttttgttgcctctggaactttaaaatacccgtttagtgacgtggaattaatctttattttttccgtcaccctcagccctcatttaagctatcagttggtaaccacttgggtaatctaaacctaagttgcatttatttggtcacattggtaaccaacattgcttcttaaaagttccttgcaacagaatgactataattgagataaaacattaattttgaggctttaattttgtaatatggatt

SEQ ID NO: 5357 - protein, 16 aa, Homo sapien
HFVIVTLLTEVNWTMQ

SEQ ID NO: 5358 - DNA, 1477 bp, Homo sapien
gattcggaacgaggacacaaatcatcatgagagatataataacaataaattttaaaatattgtgagaattaccaaaatgtgacaaagacacaaagttagcacatgctgttggaaaaatgactctgatagactcaacatagggttgccacaaaccttcaattttaaaaaactgaagtatctgcaaagtaccatacaacaaagtgcaataaaacaacctatgcctgtacttattaacacaacatatcaaagtactaatagtgaccttagggctgagccctgatttcatctgcctgtttcctcaatggaccagttttaacatctgcaaccaatatatacttcagtcattaaaggaacaatacacctagtatatatcagtggtagatgacctgggctgatggggataagagggaaaatggccatttacacaaacaggtcatttccctgctgcatttcttcaagtcaaagctgtactcttctgtgtacccttctacacattttcacattacattcatggttacattcatcaagctgcataaagattattgcagtggatgccaacagtgttagttaccatagtttcttggattgttacactgtgcccaaatttggagttctgataagtcagaggatcttgcagcattgtcaaagacaacccaaaggaatgtagtttcagaacaaaagccaggttctttctgacaatgacatgaaaattactgaatctgtcatgtgtttttagttgaagtgagaggctcatttgaaaccagcctaggtgctgttggataaagtcaaagtattgctactctaatagcaaaattactcagtacacagaagaaaaactattactttatttccttatttaaaaggacaaacaggagtgatgaatagagttagaagatattaatattccattcgcctgacttccatatagaaaccccaagcatttccagggtgaaaattttattattgtctggagatttcctgcttattttgattcattagatccttaaaaggaatggaagctttgactccagaataaaagacatttatttcctttggagtcttattcttttaagtacttcttaaaacataaccatcaccatcaccagaattttttaaacatgagaataagacagacagaacttttctttggtagtgttaacacaaaaggtgtctgatcttcatacaagcaatctttgctcacatacatcaaaatggaatgacacaaggaaagaaccattttgcaaaaggaaacaagacaagctgccgtcagctagatacgtttcgattgttcaggaaagtctgtacaggaactttgattggcatcctgcttgtctaccttctttcctactttaaagtggtagctctgatcattgttgtcagtgttttctgacccctcagatctggtctttgcctatcatgtctgatgtaggcacttggttcgattaccttgatttgcaggtgaattggtcctcaatcc

SEQ ID NO: 5359 - protein, 19 aa, Homo sapien
MSDVGTWFDYLDLQVNWSS

SEQ ID NO: 5360 - DNA, 891 bp, Homo sapien
  Unsure 647-687: Unknown base
  Unsure 750-795: Unknown base
cgtgctgtagctggttcttacgtccaacctgggggcagtctgcccagatcgcctgcctggcctcgcctctgcccatcagacacttggtgctggaatctccgaggctgggagggactgggagcgccccagttctgtgtcctccccacacagccccttttatgtaacttgactaagatcaagcagttagtaaatggtagaaagaatatttgaatctacctagtgagtctctagtgcatgcttttgtccggtatcctggaaagcctcccacaaaaagctaatctttgccccattcaaaacatgcaccctgaagaagctgtttgtacaggattgggtttattctgttattaagacaaaggcatcatggcctttgggtgagaggcccgtatgtgtttgggatttggcaatcagcattccatctctgtcatcaccattattgagaaaatagatggattggttccctctctgcagtcctgtggagcagttggactgctctctctgctctcaggatgatactgtgagaacaatttaaatatgctaagcacatgtcaggaaacagttttgtggtctttggacactcgctgtagccattccgttccatttcaggtgattttattcatttcatttgtagaataaaataaatccatttnnnnnnnnnnnnnnnnnnnnnnnnnnnnnnnnnnnnnnnnntatacaccactaaagcctcccattaaacccatagaagacttaaagagctaaaagaggctattnnnnnnnnnnnnnnnnnnnnnnnnnnnnnnnnnnnnnnnnnnnnnnattattaggcacggcatcttgttttacacaacgtgtttgatcttcacttcttcttaatatttggtgtttgatcttctcacaagtggttttgcttgc

SEQ ID NO: 5361 - protein, 69 aa, Homo sapien
RAVAGSYVQPGGSLPRSPAWPRLCPSDTWCWNLRGWEGLGAPQFCVLPTQPLLCNLTKIKQLVNGRKNI

SEQ ID NO: 5362 - DNA, 1952 bp, Homo sapien
taatgctgcagttgctgattataccagcatatataagaataaagtctgatttatttatccattgatttagaaggcaattggatgaaagggtcttagaagtctatactatccattaatatttatcatattaaatttattttaaatcctgttttattgtgccgctttaaaaacgcagattacttgtttattcattcccctttccccttattctctttcagattaccttataaggaatatagtttttaacatgaaactcagtttcttgtctgtacccctacacataaaaatacatacgtgcatacacacatacttccagatgtggttaataatattcagatccctaggttactcaaacaaaactaaaggagagaactatttaggggccatctgctttaaagtttaaggtgttttgttgttgttttagtgcctgtacaaattgaccataaaacccagattgattagtgagtgtggatttgagttgcctaagttgaggctattaaggtacttctttacttaaaagataagtttaaaagactctattcatcagttcatgatgatcttggaaatgctgtttctctactcaaaggatatacccacaggcaggtccatggggacttgctctggtgatctctgctattaaggcaaattccagcctgtttgtgccaagaacagagtcaagtgagagagaatgaagactcagagatgtgcagcactggcttgtatgttgtcaggcagaagccttgttcctttctcaagaaaacttcaggcctatcaagcttggaaggaaatacatttttttatgctgatttgcagcctacaccagctgatgaatatgctaggactttgagagaacacaaagcatggtaagttttggtcaggtggaaaggagcctgacatctgaacataatgcttcctctctcaacatctgggatacttttgaaaattcagtaaggcttaatgtaggaaaaattctttacaggaaaagctaattgatctgtttgtctaacctcatagccactccaaaatatgccttttataatggaaaaaaacagtgaacagagagaagagatttggggataagttagaaggtaccctcaaaactactgccgtaaacctacaggtgggcaaggaggaattactgtagtgtctctggagaaagttcttgaacatccaaatcatctcttttctaagcagtttttcccctaatctcataccttacatcttccagcatcatttgctacatcaatgtcttttcatcctcttcatcagccccattgagctgactccagcttatttttgcactgatttccaccatttccttcccacacccatcctttccctctatttaaagcctccatctcaccctcagtaatgctgctgatttactctcagatgtctcaagtctagcttcctttttgaatccttctcctactccaggggctgtcaaaggcagccttaaagttcagtgactgttaggtggctcaggccatttttcattgggtggtctttggtgtttgcatactgaatttgaattcagtttaaaagcaaactgttggatatgaggaagaaagggatatggccttagccctttttccaatatttggaatatgaaagcatattgtgctttgtgtaaaaaatgttttcttctcctattctgctcttgtctttactgaaggtaaaagtattccttaagtagcttttgcaaatttctagtctgatttccacattcattaagttgatttagcagacatgtaagtcagaagtttcacatatcccttgtatcaaacattttatagggaaacctagtaaatttatgatgcttcattttgggctttccagactatttgagttattcaagatagccataatgttttagtagcgacattcttttattacttctaattgccttgtaaaatgcattgttatggcccggcacggtgggtggatcacaa

SEQ ID NO: 5363 - protein, 20 aa, Homo sapien
MLQLLIIPAYIRIKSDLFIH

SEQ ID NO: 5364 - DNA, 1588 bp, Homo sapien
  Unsure 334-369: Unknown base
gggccaagtccttctgttgccctcctctgtcaccaagtaagctaggtcctttctgaggctcaggtttgctgtgatgatgatcacttttaggcagaaggttagaggcctcatgagtgctatatggactttattaggctttagatttgatggggaataagggatgtgatttgtcttttgggaactcatctttgattcatcattgtctcttggtatcttggaatttccatgtcattacagtctacagaatgaaagagtaacctgtcccagaggagaggcaggtgaaagactccacagcatgctcattctcattctgtcttctcagtgacaccgaggnnnnnnnnnnnnnnnnnnnnnnnnnnnnnnnnnnnncagggctttctttgtatgcatgatctcagtgaatctcaccaagcctcatctggaaaacggggacaaattaacaacaggatggcaaattgaaaaacacgtaaccatgttctacagatggaaaggggtgcttggttattatgaaggccccctcgcaagcgtgtgggacatgggtgtgttctctgggttgtactgatcagatcaaggacctcccccacccttctcacactctgcccacttccgccctttgcttatcagacccttagccagtgactcattccagaaccagaaccttggtgaaatctcaaccgacaccagagatcggtgtcttcagtcctagactgatggagaaaatccagaatatatactagaagctccaaatgctctgggtttcagctcctctgtgctgtggacactgactttggctcagaactccgatttagtacaaaaggctcatttttatttcaggggcactcttcctaaagcaaacctaataaatgaaatatggaattcacagatacacacacacaattaaaaaattaacctagtgtatctgtgaggagtaggcagaaattcactgtataaaagaatgcttcatttcatagagaatttgtgttaagattccattagatagtacatttctcaaagatttttgaggttgtatttgctttaccaaaacttggtttatgtaagtggaaaaagcatgttgcaaaataacttggtgtctatgattcagtttatgtaaaataataaatgtatgtaggaatacgtgtgttgaaagatgtacatcaatttgctaacaatggttatctctgacgtggtgggatttgagatgtgtttttctttttggttgtatttttctctattgtttgacttaacacagaacatgtttggttacaacaataaagttattgaagacaatataacacccaattgtgatgagtccagacagtactcatgctgtgcatttattagacagtatgccatagaggtgggtcatggaggagtggagagagagccctgatttgttgtcccatgaagaagataggcacagggtaatatgtagtgtgattcttttttttttttgcacgaggagaagtgtgtgtgtatccgtgtaagtgtatggatatccagtgggtagtgggtgttaagattgcaagtgatttttttcccctctcccttaatcatgcttttctgcctaaataaaaaaagaactctctcc

SEQ ID NO: 5365 - protein, 11 aa, Homo sapien
MLFCLNKKRTL

SEQ ID NO: 5366 - DNA, 1918 bp, Homo sapien
gggaacgatagatttgagctgctggtgggaaattctggtttagtgcccagctggctgtacaggctggttggactttaggagggaggtttgagctggaaaataaagatggagagttgtctttcagttttagatcatcagtgaggtcataagggtagatggagtttacctgggaaaattaagtagctattcgatttggcttattattatgttaaaataatacttctctagtgaagtacttaatatgccagatactgtgccaagcattttatatacatcctctcttttactaagccctcatagggcagatattttgattccaatcatactgattggaactcctaagaaggtatcttgcttaaggtcccacaacgaacaggtggcagatccaggtaattcaggtctgtcagaacagtgattcttaattttttccctcctcagactccaggagtcacatgaagttatgcatcctgtctgaccgaggcacaggcacaccacatttttatattccgcttccagcgatatcacaaacctgaagccccatcctccatggcccagagagaaaacccgggacaaaaccttggagaagactattttcatgaaagacaaatggagaaggagcagtagagtaaaaagagaggtaagggaaggcattgagatggtttacagggttagatgttttgagtcaatcccattataattaccaatgctatctacctatttagttaacgttttattgccctgctgttttctccaggataattggaatagcatgtattggttgggtggaaaagatagaacttgagcagggagattgccaaagagtgaagatgtggctgagtgattgatgatggtctgaactgggtattcagggaagagaactagaagccaaccatgtagaatctatgcaggtgctcttaagacattggtttgactggaattatcttcttgttaggtcttaggaatctccttccaggtaactttttctatgattagacaattgatttgttcagggtcatagagcaaagtccacatttaattccacatggccaataaaagtgaggggctacaaggtgagatccaggggccagagttatcaaagtgatacagcacttttaggaataggacagggaatggaggaattggaattccagtattactttcaaaagcagaactggccagaggaattggaattccagtattattttcaaaagcagaactggccagaggtgcttgtgattcctgggtggaaaccatggcagtggacagaagcagcatggaggaaaagagcactggaattcaggctgaggaactgtgaagccaagggtgttgtataggttgtccatttcaaattagggttgcttggttctgggatgatttgcatggaagaggggagagtgacttggagatgtgtgattgaggacagtgagcacagtgagttgatggtgttgctgggttataagcagcttcaaagagaaggcattttgaatgaaggtggaaacataatggccaggagaacaagcaaaggactaggaaacagtgaacttcatcttggcctcaagttcctgaggtgcatatgaataaacagtctctaacccagagggtttcaagaaaagcagagtcctcaaaatccaaaggtagagtttccccacattgatattatactaattacacgtataacagtactttggaaaagcacaggtctctggtcacctctaaaaggcaaggttggtaaggaggtcagggtgtcacctgttggtagtcttaactaaatggtctcttcaagggatctaaggatggaaaggggatatataatggttggattaaaggctcatcattgattagcaaattgtcccttttgtttcttaaacccaatttgtacagggaaagttatgccactgtaagatatttttaaatgggg

SEQ ID NO: 5367 - protein, 25 aa, Homo sapien [sequence omitted]

SEQ ID NO: 5368 - DNA, 722 bp, Homo sapien
gggaaggagacacggtgcccagctttttgcggctctgcattgctgctgtggataaaagaggtctagatgtggatggcatttatcgggtgagcgggaacttggcagtggtccagaagcttcgctttctggtggacagagagcgtgcggtcacctccgatgggaggtatgtgttcccagaacagccaggacaagcactctccgaatcagagcagtgcctctctcagatacaagaattaataggctcaatgccaaagcccaaccatgacactctacggtacctcctggagcatttatgcaggtgatagcacacttcagataagaatcgcatgacaccccacaacctgggaattgtgtttggaccaaccctgtttcggccagagcaggagacatctgacccagcagcccatgctctctacccagggcagctggtccagctgatgctcaccaacttcaccagcctcttcccctgatgcagggaaggaagaagagaaaacatatttccggtcatctctggtggtgagaggctggtgttctgttttgaggatatccctttaaatctcccaaatgactgtctctatcttcatgagtgtgacttgaggtgttgggatgggtgagggagcttctctaaagaggaaagtgagtggattaacccctgcttctcttcttgttccctgttatcattcctccccaacataataatacataaagtggcatggtatttt

SEQ ID NO: 5369 - DNA, 879 bp, Homo sapien
  Unsure 187-247: Unknown base
  Unsure 338: Unknown base
atttcccagactttgttttctcattagcaaaacagacctaataaaaggactcatttcataggttttttatgaggattaattgagataaaccagataatacgcttaacaccgtggtacttgcaatgaagaaaatggtgaatggtacatacatggtaagtggtcaatacattttagtcattctattaannnnnnnnnnnnnnnnnnnnnnnnnnnnnnnnnnnnnnnnnnnnnnnnnnnnnnnnnnnnncccttctgggtagttgggagaagtcaagcattaataccagtgaagcacttcaaatggtgctttgcatacagcgagtgctcaattaaatgtnaaaattcttaaaatcatcaccacgattctgaccttatggactttgaagggcagatgttgtgtctcattgctttcgtgtccacaagacctggcacatagacgatgctcaataaatattatttgaaggagtgaatgatggtgacatggttcttaggagttaaaatgagaaaacccaaggagccgaaagcatgtctctacggggaaaggttagagagcactgactcaaaccatcgtctccaattatgcagttttaatgaggaagcaagcccaaccttgaacattatttaagccagagttatcccaataagcattttcctaccatgagtggtagattaagtagcattgagtcatgtagtgaaagtaatgtcccttcttcataccatttcaatgcctctggtaagtcaagagaaagtctttgataatagcctatttttaacacctctcacccttgtttgtcagaaagagcagacctcagattcagagactttagcaagcaaagatatccagtaaagaaatgaaataatggccgggcacagtggcta

SEQ ID NO: 5370 - protein, 51 aa, Homo sapien
MMVTWFLGVKMRKPKEPKACLYGERLESTDSNHRLQLCSFNEEASPTLNII

SEQ ID NO: 5371 - DNA, 1809 bp, Homo sapien
ctcaaagtaaatccagtgcatctgtatatatgtgtagatagcagcaacaaacaatcctgaaacattatttttggctgttaggtaagtaaacgtgatgataattataaacaacattcaaataaccttggaccttggtgaaatgacttgtggtggccagaatggtgcaacaagatgttatttgcaagtttttttaagacacaaatatctcagatactaataatgagaataaagactgttgaatatgaaattaaagccaagcaataatgtgccaaaaagaggcagttataccagcaaatgcatctattatgggcacaccattatataatgatggtttgctttatgaagactgactgtaacccacaggataaaataagcaaaggcatagtttctgctttcttcctggaaaaacttgtttagaagcttcataaagaggtacagcactaatgagcattagtcaggatacagttggcatctatgtttttatgtgagcccagagggaagaggagccactcaaagtcttgctggcttaaaactcaagacagctgcaaccagaagttttgttgaaatggagactttaaacttatggtaattactctttctggacactagcatgtagaaagcaattcagttaactctgcccagaggattaccagctttagctgtgaaaaaatgggctcccggatgtaaaatcactaaaacatgagatcttgtatccaaagaggcttcaaatgatgccttacagaaaacgatgctccagatgggcacttctaaatgctaactcttcatcaagtatctttctggattcaagctcaaaattaattggctgcaaaatagtaggaataaaaatcacatattttacactttagaaaaggatattgatgatcaacctgcatggtgataattatgatgagataccccagtgatttaatgatgttagaaagaattaaatgggagagaattgctaacagctttcttgatctcttaactatggagatgtcattcatttatttctggggtgaaaattatagcttgctttttgacattgctgctagtattgttctttgttgctttaaaaattgtctctctttagaaaaactcttgagcagttaaacagttttttttctgattcatatcattgcttttaataacatgtaaaggctgtgtgtagagcaaactatataaaatgagtagaaagggcttactcatgttaattggcatccttgatgattttagttgagattccttaacatttattttagatcacatctttacgtaacttatttttcctaatgttttccatcgtgtcttaaaatgatgctggtatatcaggagattgcagtattatagtcatactccccaatccctagaggagaggaaagactaattcttgttttaagggcccctggagataccttttattaaggttgaaaaaggtcaacacagcctgaaaataagaaaaatatatactagcaattactaattttctaaatgtgtgtatctctgctgtactaatgtgtgaacaatatgtcgtgcataatactgtagctggtcgtggtatgtcaatacattctgtgagtgtgtacagtctgagtgatcagttttctatttttatgtgtaaaaaaaataacttgtcgtatcccatttaaaggccaatttctgtattcaggcaggcatatgtacatacatgaataaagccaacaaaagtgtgcacatgtattcagtaacagaatttgtccttttatttttgaaggtcagaaagggctgtttgatttgtgtttttgttttatcatctccttgagtaggtaacat

SEQ ID NO: 5372 - protein, 67 aa, Homo sapien
MRYPSDLMMLERIKWERIANSFLDLLTMEMSFIYFWGENYSLLFDIAASIVLCCFKNCLSLEKLLSS

SEQ ID NO: 5373 - DNA, 603 bp, Homo sapien
  Unsure 551-552: Unknown base
  Unsure 554: Unknown base
  Unsure 559: Unknown base
  Unsure 566: Unknown base
tcacacacagagaaggcagcagaactggttccagagcctttatgctagaatagaaagtgcctgttattttgttcattctcctcctcgtccagtgtacagctgtagtgatggggaaacaggaaatcaattactaggttgccactaagtctacaaactattgaagaccagaatttacataaatcgtatgcagtcccacatctgacaggcttgcaaaaccttccacatttccatgagtaagcctatccaaatagtactacttctcaattgcaaatcataacaacctcttgtgtggccgtcagagctgactaagcagaaactatgatcctctgaatttagtatttttcctgtttgccaaaaatgatgtgtcattagtgacgaagttattcttaaagttcctttaacaaaactgtgatttatatcaaataacaatggcttggagggggtatggaaaattgattattcttcctaacaaatctattaattttattaaacttggtctccctccctttttcttggatgtttataaaatttaagtctttctaaaaaaaatnnanaaatnaaaaatntgtatcccactgccttctggcctccatggattctgat

SEQ ID NO: 5374 - protein, 47 aa, Homo sapien
HTQRRQQNWFQSLYARIESACYFVHSPPRPVYSCSDGETGNQLLGCH

SEQ ID NO: 5375 - DNA, 468 bp, Homo sapien
  Unsure 54-144: Unknown base
tctttatctagaagtttgatgatttttttgtgaccagaaatatgccgtaggaannnnnnnnnnnnnnnnnnnnnnnnnnnnnnnnnnnnnnnnnnnnnnnnnnnnnnnnnnnnnnnnnnnnnnnnnnnnnnnnnnnnnnnnnnngataacgttgagtgagtacttaactgtatgttgcaatattgcattgttcttctgtttgacatcctacatttgtgtcatacatcctaatatctggtaggtaaaatagtgaaagaaactgtaggcaattaatggtagtgccaatgtatgaattctttcttcctgttctttgtcagataaacaaagatatttagtatacacaattttacgaaagtagggcttaggaaaagcagagtaatgatgcctgtggtatagtagtgtggcttgtaattacactgtgtttagcctgactctccatttcactcttttgggtttaataatatactc

SEQ ID NO: 5376 - protein, 10 aa, Homo sapien
SLSRSLMIFL

SEQ ID NO: 5377 - DNA, 3032 bp, Homo sapien; identical to SEQ ID NO: 3663

SEQ ID NO: 5378 - protein, 134 aa, Homo sapien; identical to SEQ ID NO: 3664

SEQ ID NO: 5379 - DNA, 510 bp, Homo sapien
atgagtttcttttttaaaactggattcaggatcagtgtaatgttactgatcttcaatagtaaccacaaacttaaaaaatctttacatattgccgtatgtattagatattctgatatttaatagctgagacagtcataccttatagtattattatcccaattttactagtgaggaaacaagcagttaataactgttagagctcagattcacattctgaaagttatagaaattaagaacatagagcctatgttcttaatttcaccaaaatatctcctcccaaattatacataccctttcaaacctaccttcctctcttagtaattaatgataccgtctttcaatttacatgaatcagtatcactattagtaaatgtattttatgccattatataacagactaatttatttattctgtactctactgtgatattttcctctatcttctgcaagattttcatttttaaaaattactgtcttggctgggtgcagtggctcatgcctgtaatcctc

SEQ ID NO: 5380 - protein, 39 aa, Homo sapien [sequence omitted]

SEQ ID NO: 5381 - DNA, 4196 bp, Homo sapien
caatgctacatatgtacagcctagaagaaaacagagagatgagcagcttctgacaaatgtcctggaaacacttcgaggtgatggaaatgtgttaatagcagtggacacagcaggcagagttttggaacttgctcaacttcttgatcagatttggaggactaaagatgcaggattgggtgtttactcattggcactcctaaataatgtcagttacaatgtggtggagttttctaagtcccaggtagaatggatgagtgataaattgatgagatgttttgaagacaaaagaaataatccgtttcagtttcgccatctctctttatgtcatggtctttctgacttggcccgtgtacctagccctaaagttgtacttgccagccaacctgacctggaatgcggattttcaagggatctctttattcagtggtgtcaggaccctaaaaactcaatcattctaacctacagaactactcctgggactttagcacgtttcctaattgataatccttctgaaaaaattacagaaatagagttgaggaaacgtgtgaagcttgaagggaaagaacttgaagaatacttggaaaaagagaaactaaagaaagaagctgccaaaaagcttgagcagtcaaaagaggcagatatagattccagtgatgagagtgatattgaggaagatattgaccagccatcagctcataagacgaagcatgacttgatgatgaaaggtgaaggcagtcgtaaaggaagttttttcaaacaggcaaaaaagtcctatcctatgtttcctgccccagaagaaagaattaaatgggatgaatatggagagattatcaaaccagaggatttcttagtgccagagcttcaagctactgaagaagaaaaaagcaaattagaatctggtttgacaaatggagatgaacctatggatcaggatttatctgatgttcctactaaatgtatttctacaacagagtctattgaaataaaagcccgggttacctacatagactatgaaggacgctctgatggggattccattaaaaaaatcattaatcagatgaaaccacgacagttgatcatcgtccatggcccaccagaggccagtcaagatctggcagagtgctgtcgcgcctttggtgggaaagatattaaagtgtacatgccaaagctacatgaaacagttgatgccactagtgaaactcacatctaccaggtgaggttaaaagactcacttgtcagctctcttcagttttgtaaggcaaaagatgctgaattagcttggatagatggtgtcttagatatgagagtttccaaagtggacacaggggttattttagaagaaggagaactaaaggatgatggagaagactcagagatgcaagtggaagctccctcagattctagcgttatagcacaacaaaaggccatgaaaagtctgttcggagatgatgaaaaagaaacaggtgaagaaagtgagatcattcctactttggaacccttgccacctcatgaggttcctggacatcagtcagtttttatgaatgaaccaaggctgtcagacttcaagcaagttctcttacgggaggggattcaagctgaatttgtaggaggtgtacttgtttgcaacaatcaagtagcagtccgcagaacggaaactggacgcattggattagaaggctgcctttgtcaagatttttataggataagagaccttttatatgaacaatatgccattgtataaaggacatgatgtcaagaagtatctgcttgacctttctaagaaaaagggattcttatcttactctgagcttttgatgttttgttttgtaacatacaaaaagaatctgccagaaaaacttacatgtatcagatttttaaaaatataaatagagaacattttgcaaatgctcaaatgagcattctatcttttggctttcagagtgatagagctcctaacaggtgtacaggcccaagagttgaaggtgattggttttctttacagactccttgttctctagaagggctttttacttgaataaaacaatgcaacttagcaaaccaatttatggccttagagaaacatttttgcatgagttcttacaaactgtttgttatattttctggaatgataagtgagaattatttagaaaagacatgctccaaaaaaaaaacaaaactgataaaacagtttttcgaaacttacttttaaaagcatacgtgctatgactctctccagtttgaatatgcaattgttttcacaggcaggatgtctgttttctgcctgtatttcccagtgatttactctagggtaaggtagtacacatttggttcagaaattaatttttatttctcctatatcttgttttatcaagattttgttgtggcatttcaatgtaaattataacaccatcatttgagtatacataattcaaaagaactacttgatgcagtatagtcttaagggttctgcatacattttagaaacatcttagccgtaagttaggtcctgtgttaaactgtttagtgctctgtttttaagaaaacaaatgttgaacctcacacttttatgtggtgacagtgtaatttaattaaaaggtgtaaatgttttcatctcttaggcttgctgtctcctaaggtcacccaagcagtggttggattttatacacattactactaaaataatactgaagttggataaggttatcctttctgtatttgcgtctttcttgtgactaaccaccctgatatagtattaaccactgtgttcaagagtaaaaacaatatatgcaattttcattgaacttaaagagtgaaaaccatgtaaactattgaaactattgtaatccattaatgcttttttagaatggcagaccttgatgtttatttctcaaatggttaagccctcttctttactcttaatttttttttgagacagagtcacccaggctggagtgcagtggtgagattttggctcactataacctcttcctccagggttcaagtgattctcccacctcagcctcccaagtagctgggactacgggcacatgccactgcacctggctaatttttatatttttggtagagacagggtttcaccatgttggccaggctggtctcaaactcctgacctcaagcgatccacccacctaggcctcccaaagtgctgggattacaggcatgaatcaccacaactagcctacccttagatttttggaaggatcgatcttatttaactatgtgtggaacaacccagtaatatcagactcgaattactatttcattctatttcaaatgcttataaagctactattgtagattatagtgttaatgcaaagtttacagacttttgatatggaaaaccagataaaacaatgttacaaaaggcaaatataaagagtatgttttctttttagtgctttggaaaaatttcacttaaactcttattactgtatagattaagccctataatgctatttatattccaggggaacgaaaatctgaatttgttttatgatttaaagcatctggtttgcatattgtattgtaatactgatacagtttggctgtgtccccaccaaattgaattgtgttaatagttcccataatccctacgtgttgtgggagggacccagtgggcagtaatttaatcatggtggtggttaccctcatgctgttcttgtgatggtgagttctcatgagatctgatgggtgtttttttttgttttgttttttgttttttgagatggagttttgctcttgttgcccagactggagtgcaatggcacacgatctcggctcaccgcaacctctgcctcctgggttcaagcgattctcctgcctcagcatctcgagtagctgggattacaggcatgcaccaccacgcccagctaattttgtatttttagtagagacggggtttctccatgttggttaggctggcctcaaactcccgacctcaggtgatccgcccgcctgggcctcccaaagtgctgggattacaggcgtgagccactgctcctggcccaagatctgatggttttgtaagggaattttccccctttgcttggcacttcttcctgctgccatgtgaagaaggatgtgtttgcttccccttccaccatgattgtaagtttcatgaggcctccccagcctgtgggactgtgagtcaattaaacgtgtttactttataaatt

SEQ ID NO: 5382 - protein, 579 aa, Homo sapien
NATYVQPRRKQRDEQLLTNVLETLRGDGNVLIAVDTAGRVLELAQLLDQIWRTKDAGLGVYSLALLNNVSYNVVEFSKSQVEWMSDKLMRCFEDKRNNPFQFRHLSLCHGLSDLARVPSPKVVLASQPDLECGFSRDLFIQWCQDPKNSIILTYRTTPGTLARFLIDNPSEKITEIELRKRVKLEGKELEEYLEKEKLKKEAAKKLEQSKEADIDSSDESDIEEDIDQPSAHKTKHDLMMKGEGSRKGSFFKQAKKSYPMFPAPEERIKWDEYGEIIKPEDFLVPELQATEEEKSKLESGLTNGDEPMDQDLSDVPTKCISTTESIEIKARVTYIDYEGRSDGDSIKKIINQMKPRQLIIVHGPPEASQDLAECCRAFGGKDIKVYMPKLHETVDATSETHIYQVRLKDSLVSSLQFCKAKDAELAWIDGVLDMRVSKVDTGVILEEGELKDDGEDSEMQVEAPSDSSVIAQQKAMKSLFGDDEKETGEESEIIPTLEPLPPHEVPGHQSVFMNEPRLSDFKQVLLREGIQAEFVGGVLVCNNQVAVRRTETGRIGLEGCLCQDFYRIRDLLYEQYAIV

SEQ ID NO: 5383 - DNA, 4800 bp, Homo sapien
gaggagagccgggccgccgccgtctctgcagcccgcgggtaactgggccgttgccgccgtccgcgctcggcccccgcggagagatcgagctgaaggactgcgcggctggctctcctctagtatggccaatgaagaggatgacccagttgtacaggagatcgatgtgtacttggccaagagtctggcggaaaagctgtatctatttcagtaccctgtgcgtccagcctcgatgacctacgatgacattccgcacctctcagccaagatcaagcccaagcagcagaaggtagagcttgagatggccatcgacaccctgaaccccaactattgccgcagcaaaggggagcagattgcgctgaacgtggacggggcctgcgccgacgagaccagcacgtattcctcgaagctgatggacaagcagaccttctgctcttcccagaccaccagtaacacatcccgttatgccgctgcactctacaggcaaggtgagctccacctgacacctttacatggcatcctgcagctgcggcccagcttctcctacctggataaggctgacgccaagcaccgggagagggaggcggccaacgaggcaggggactcttcacaggatgaggcggaagacgatgttaagcagatcacggtgcggttctcccggccggagtcagagcaggcccgccagcgccgtgtgcagtcctatgagttcctgcagaagaagcacgcagaggagccctgggtccacctgcattactatggcctgagggacagtcgctctgagcatgagcgtcagtacctgctgtgccccggctcaagcggggtggagaacacggagctcgtcaagtcacccagtgagtacctgatgatgctgatgccacccagccaggaggaggagaaagacaagcctgtggcccccagcaacgtcctgtcgatggcccagctgcgcacgctgcccctggccgatcagatcaagatcctgatgaagaatgtgaaggtcatgccttttgccaacttgatgagcctcctgggcccctccatcgattccgtggctgttctgcggggcatccagaaggtggcgatgttggtccaagggaactgggtggtgaagagtgacatcctataccccaaggactcgtccagccctcacagcggcgtgcctgctgaggtgctctgcaggggccgagacttcgttatgtggaagttcacgcagagccgctgggtggttaggaaagaggtggcaaccgtgaccaaactctgcgccgaggatgtgaaggacttcctggagcacatggccgtggtgaggatcaacaaaggctgggagttcattctgccttatgatggggagttcatcaagaagcacccggatgtggtccagcggcagcacatgctgtggacgggtatccaggccaaactggaaaaagtctataatcttgtaaaggaaaccatgccaaagaagccggatgcacaatcagggcctgccgggctggtctgtggggaccagcggatccaagtagccaaaaccaaggcccagcagaaccacgcgttgctggagcgggagctgcagcggcggaaggagcagctgcgggtgcctgcggtcccgcccggtgtgcggatcaaggaggagcccgtgagcgaggagggcgaggaggacgaggagcaggaggcggaggaggagcccatggacacttcccccagcggcctccacagcaagctggccaacgggctgcctctcgggcgggctgcgggcacagacagcttcaacgggcacccgccccagggctgcgccagcacccctgtggctcgggaactgaaggccttcgtggaggccacctttcagagacagtttgtgctcacgctgagcgaactcaagcgcctcttcaatctgcacttggccagcctgccccccggccacacactcttcagcggcatctcggaccgcatgctacaggacacggtgctggccgccggttgcaagcagatactggtgcctgtaagtagagccctgcctgccaggggcatggggggtggggggtggggagaaccagctgttgggaggccacgtggggacacgggaggccatgcttggtgagcatctgctctcacgtgggcctaggtgtgacatgggcaagtcagcctctctgaggctctattctcatgaaatgggatcatgttgggttttatgtcacaggactgtggtaggggctaaatacggtgtctgaaggcccggcctattgcctggcctgcagcagggcctagtgaaacagggcccctgcctggtttctcaccctgtcccccaccaagaacacctgtttcctactagctttgccattgtttggaatgatttaacttctaagatcgtttgatcttctttgcaatctgcagatgaagaaactgaggctccaaggaatgaaatgtacgtttaaaggtcactacctaggaggtagtagagctggaatttggacctcagtatagtggcctggagttttgaatcctttctgctcagctaagatgagctgcttccccacagctgcgccacgccccagcttgggcctgggtcctggcggcctccctgtgcatcagaagcaagctgaccagctcagcgctgtgctctcagcacttccagtgccaggccttgagtgtggtattgcaagcctcctgccccttccccctgggctgcttttctgtcactgggaggggccctgacgggggagcagagtgcttgctggggaccgtttccctgcgctgaggatagagagcgccaggtgctgcctgaggcacgcctttcccgtgctccttttccacaaggctctgcccagacctggcagcaaaatggggtgaggtggggctgtggtggtctctaagaaagcattgatgttttcattgccaaggtcaggagcgggcctgcagccttgggtgatgatctgaggccaaggcccatccctgtgtatgaggaatagaaactaggacaggaggccttgtggagcctaggctgtctcaggggatcggccctgctggcaggcagccccctgtgggaggtactggcagagttcggagctcctgcccacccagcacatgggtctgggtctccacaagctcacctttcttcatgagctgggccaggacaggcaggacacctgcctgacattagttgttttgggccgctggagtggacagaggtgaggggtgggacatggccaccctcagacaccctcacccctccttccggaccccctctgtccatgttgctttggggtggggccagcgtctccaggagacaccatggccctaactgtaatgctctccttgccatcctgacaaggagactgtattgtagtcacatccaagacgtaagagacctccgatcccagccacctctgtgttgtacatgagggagctgaggtccagggcaagtgaatagatcgagaacttgacttgaactcctggttctgctgcttattagctgtgtgaccatggacagtgagcaaacctctctgagcttacttttccccatgtactacctccccagtttctaatgctcaaatgcaaatgtgtattggaggcctcacagggcttttactggtagtaaccattattgctacttgtgtgatggaaccaggactggaaactaccatcccagatgccccctcccctgtccccttctctccaggacccaggcctgtgtcacacttgtcctggtctacctttggaccaagtggcctggattgcttgggagtcaggcagtgcctctaacccacactgacatggtacatgtgggaagcagttgaaaagaacccccagggtaccccaagagttatggggaagggggcgcccctccatcagggttggcatcttcaggagggaggactctgggtgttaaagcacagttgagttggtgccaggctgatgggaaacagacgcagcttccccactgtacggaggatatctgcagactcgaagccgggcatttcactgggcccatcacactccccctctcgctgaagccctgtcaggccctggggggtgtgctggcctcctccccatggtgaggtgagaggcacaggtttgtggctgcccaaggccctcagagatggtgagtagcagaagctgggattggaacccatgttcctgcatctgggctggggcagacagggagggatgaggcaagcaaatggatccatggggtagagatggacaagcaactcacccctgggccttggtcagtttcccccccagactgctgcttccccggatgagcagaaggtgtttgccctctgggagtctggagacatgagtgatcaggtgaggtgaactttgctgccatcttcccgaagagccaggggggtttcctgcagcgttggaggccttgggggacatgtgcacccaaagtgcagccacacatttcagattttctggcacactcggttttaaatatcctgctccaactctgtacgctaacaaaataagctgtatgtgccaatagtttgaacctaaaccagtggttcccagatgccagtctgtgagccagctccatcagaatcatcttttaaaaaatacaggctgggcgtagtggctcacgcctgtaatcccagcactttgggaggccaaggtgggtggatcacctggggttgggagtttgacaccagcctggccaatatggtgaaaccccatctctactaaaaatgcccatagtcgtgggaggctgagacagaattgcttgaacctgggagagagaggttgcagtgagccgagattgcaccactgcactccagactgggcgacagagcaagactgtgtctcagaaag

SEQ ID NO: 5384 - DNA, 2786 bp, Homo sapien
ggaacctttcaaacttccccgaaatgcacttgtggtcagcagctagcggtcttttgtttggggaaaaaaggagtagcggctaagagcggaaccctgacttctcaaaaagcactgcacagaggaggaggcagcagaaccccatgggctgttttgggagagggactgagtacagtgcaacactactcaaactgtggttcacaaagcagcaacattggcatcacccaggtagaaaggctcattcttgagcctaccgaaggccttctgatttagcatttttgcagataggacccagaaatctgcatttcaacaaaatcccaagttcagcttcttaggactctgcacttccccagaaggaagaattaaaaatgaatatgttcaaggaagcagtgaccttcaaggacgtggctgtggccttcacggaggaggaattggggctgctgggccctgcccagaggaagctgtaccgagatgtgatggtggagaactttaggaacctgctgtcagtggggcatccacccttcaaacaagatgtatcacctatagaaagaaatgagcagctttggataatgacgacagcaacccgaagacagggaaatttaggagagaaaaatcaaagtaagttaattactgttcaagacagagaatcagaagaagagctttcttgttggcaaatctggcaacaaattgcaaatgacttaaccaggtgtcaagactccatgatcaataattctcagtgtcacaaacaaggtgatttcccttaccaggtagggacagaactgtctattcaaatttctgaagatgagaactatatagtaaataaagcagatggtcccaataatactgggaatccagagtttcctatcttgagaacccaggattcttggaggaaaacattcctgactgagtcacagagattgaacagagatcagcaaatttccataaaaaatgaattatgtcaatgtaagaagggtgttgatcccatcggttggatttcacatcatgatggtcatagagtacacaaaagtgaaaaatcttatagacccaatgattatgaaaaagacaacatgaagattttgacatttgatcacaatagcatgattcacacaggacagaaatcgtaccagtgtaatgagtgtaaaaaacccttcagtgatctctccagctttgatcttcatcagcagttacaatcaggagagaagtctcttacatgtgttgagcgtggaaaaggcttctgttacagcccagttcttcctgttcatcagaaagtacatgtgggagaaaaacttaagtgtgatgagtgtggtaaggaattcagtcagggcgctcatctacagacccatcagaaagtccacgtgatagagaaaccatacaaatgtaagcaatgtgggaaaggtttcagtcgtagatcagcacttaatgttcattgcaaggtccacacggcagagaaaccttataattgtgaggagtgtgggagggccttcagtcaggcctctcatcttcaggaccatcagagactccacactggggagaagccattcaaatgtgatgcatgtggtaagagcttcagtcggaattcacatcttcaatcccatcaaagagttcatacaggagagaaaccatacaaatgtgaggagtgtggtaagggcttcatttgtagctcaaatctttacattcatcagagagtccacacaggagaaaaaccctataaatgtgaggaatgtggtaaaggctttagtcggccttcaagtcttcaggcccatcagggagttcacactggagagaagtcatacatatgtactgtatgtgggaaaggctttactctgagttcaaatcttcaagcccatcagagagtccacactggagagaagccatacaaatgcaatgagtgtgggaagagcttcaggaggaattcccattatcaagttcatctagtggtccacacaggagagaaaccctataaatgtgagatatgtgggaagggcttcagtcaaagttcgtatcttcaaatccatcagaaggcccacagtatagagaaaccttttaagtgtgaggagtgtgggcagggtttcaatcagagctcacgacttcagattcaccagctgatccatacgggtgagaaaccatacaaatgtgaagagtgtggcaagggatttagtcgtagagcagatcttaaaattcactgtaggatccacacaggagagaaaccatataattgtgaggagtgtgggaaggtcttcaggcaggcctcaaatcttttggcccatcagagagtccacagtggagaaaaaccattcaaatgtgaagaatgtgggaagagtttcggtcggagtgcacatcttcaagcccatcaaaaagtccacactggagataagccatacaaatgtgatgagtgtgggaagggcttcaagtggagcttgaaccttgacatgcatcagagggtgcacacaggagaaaaaccatataaatgtggggagtgtggtaagtacttcagtcaggcctcaagtcttcaacttcatcagagtgtccacacaggagagaaaccatacaaatgtgatgtgtgtggtaaagtcttcagtcggtcttcacaactacagtctcatcagcgagttcacactggggagaaaccttataaatgtgagatatgtggtaagagcttcagttggcgatcaaatcttacagttcatcacagaatccatgttggtgataaatcctataaaagtaataggggtggtaagaacatcagagaatccacacaggaaaaaaaatctataaaatgattctttgtg

SEQ ID NO: 5385 - protein, 803 aa, Homo sapien
MNMFKEAVTFKDVAVAFTEEELGLLGPAQRKLYRDVMVENFRNLLSVGHPPFKQDVSPIERNEQLWIMTTATRRQGNLGEKNQSKLITVQDRESEEELSCWQIWQQIANDLTRCQDSMINNSQCHKQGDFPYQVGTELSIQISEDENYIVNKADGPNNTGNPEFPILRTQDSWRKTFLTESQRLNRDQQISIKNELCQCKKGVDPIGWISHHDGHRVHKSEKSYRPNDYEKDNMKILTFDHNSMIHTGQKSYQCNECKKPFSDLSSFDLHQQLQSGEKSLTCVERGKGFCYSPVLPVHQKVHVGEKLKCDECGKEFSQGAHLQTHQKVHVIEKPYKCKQCGKGFSRRSALNVHCKVHTAEKPYNCEECGRAFSQASHLQDHQRLHTGEKPFKCDACGKSFSRNSHLQSHQRVHTGEKPYKCEECGKGFICSSNLYIHQRVHTGEKPYKCEECGKGFSRPSSLQAHQGVHTGEKSYICTVCGKGFTLSSNLQAHQRVHTGEKPYKCNECGKSFRRNSHYQVHLVVHTGEKPYKCEICGKGFSQSSYLQIHQKAHSIEKPFKCEECGQGFNQSSRLQIHQLIHTGEKPYKCEECGKGFSRRADLKIHCRIHTGEKPYNCEECGKVFRQASNLLAHQRVHSGEKPFKCEECGKSFGRSAHLQAHQKVHTGDKPYKCDECGKGFKWSLNLDMHQRVHTGEKPYKCGECGKYFSQASSLQLHQSVHTGEKPYKCDVCGKVFSRSSQLQSHQRVHTGEKPYKCEICGKSFSWRSNLTVHHRIHVGDKSYKSNRGGKNIRESTQEKKSIK

SEQ ID NO: 5386 - DNA, 902 bp, Homo sapien
gactcttacctacttcggggcccactttgctgtcatccgccgagcgtccctggagaagaacccgtaccaggctgtgcaccaatgggccttctctgcggggttgagcctggtgggcctcctgactctgggagccgtgctgagcgctgcagccaccgtgagggaggcccagggcctcatggcagggggcttcctgtgcttctccctggcgttctgtgcacaggtgcaggtggtgttctggagactccacagccccacccaggtggaggacgccatgctggacacctacgacctggtatatgagcaggcgatgaaaggtacgtcccacgtccggcggcaggagctggcggccatccaggacgtgtttctgtgctgtgggaagaagtctcctttcagccgtctggggagcacagaggctgacctgtgtcagggagaggaggcggcgagagaggactgccttcagggcatccggagcttcctgaggacacaccagcaggtcgcctccagcctgaccagcatcggcctggccctcacggtgtccgccttgctcttcagctccttcctgtggtttgccatccgctgtggctgcagcttggaccgcaagggcaaatacaccctgaccccacgctctccagggcagaagtcgcggtgggctcagtgggtgccctgagcggggtctctcagactgacgtcaggccttggtgggctgcactctcacctggaggctccggggaagcatctgcctccaggaccattcaggctgttgacaagtcaactcctcatggctgtaggactgaggttcccaagtccttgtccctggtcctgtggtccctccaccttcaaaccagcaatggtgcattgagcaaattgtggtcaaatatacatcacatcaaatttaccatctt

SEQ ID NO: 5387 - DNA, 744 bp, Homo sapien
gtactcaatcactgtcattttagtaaccttgaatcagaacctcagttgttaaaggcttaactgcttgtggcaactactatagtgctctagtggggacagtggttaaatctgcagaatcccttgctttgtcatcttatccagaaggactgatagcttgttaaactgtggtatgattagaatgttggtggttgtgtagtgcatttggggtgctacaacgttaatcaaatataattgagctgttctgtttccagtcagtgtaaccatttaaaaataccttggcaaaacaagctaggagctagttcatgctaatattcttaaggacaaaaatagtttacagcttttttttttttaatctgaaatcctgaaggctatgcttaaaagttagagataaacctgttggaaataagtgattcatttatagactgaagcctctatgacttcaaaaagatactcaacagtctctggcatttgaagaacaaaatattttctctgtaaatacacctcatttccattctagttaggagcaatggcgcccaggacggcacacagaatggagaaaactggatagctggtaactcatttagctcttggcactctaaaaaacctcaaatacagccatccaagccagtaattctattgctgcgttatttctgtgtttaactgtgaaacttgcttcttgtctgtacccttgaaatggaataaaatttcatgagactccttgcttagaaaaaaaaaaaaaaaggg

SEQ ID NO: 5388 - protein, 19 aa, Homo sapien
VLNHCHFSNLESEPQLLKA

SEQ ID NO: 5389 - DNA, 1527 bp, Homo sapien
ctagttggcggcggggtcgggtccgcgtgagccgcgatggagctgcgcatcctagaacaccgggtgcgggtgctgagcgtcgcccgtcccggtctctggctctacacccacccgctcatcaagctgctcttcctgccccgccgcagccggtgcaagttcttcagcctgacggagacccctgaggattacacgcttatggtggacgaggagggctttaaagagctgcccccatctgagttcctgcaagtagctgaggccacatggctggtgctgaacgtgtcgtctcacagcggtgcggcagtgcaggctgctggggtcaccaagatcgcccgttcggtcatcgcgccactggccgagcaccacgtgtctgtgctgatgctgtccacttaccagacggacttcatcctggtgcgggagcaggacctgtccgtggtgatccacacgctggcccaggagttcgacatttaccgcgaggtgggcggagagcctgtgcctgtgacgagggatgattccagcaatggctttccccgcactcagcatgggcccagccccacggtgcatcccatccagagcccacagaaccgcttctgtgtcctcacactggaccctgagacgcttccagccatcgccaccaccctcatagatgtcctcttctactcgcacagcacccccaaggaggcagcctctagcagtcctgaacccagctccatcacgttctttgccttctccctcatcgagggttatatctccattgtcatggatgctgaaacacagaaaaagttccccagtgacctcctgctgaccagctcctcgggggagctgtggaggatggtgcgcatcggtggacagcccctgggctttgatgaatgtggcatcgtggcacagattgcaggtcccctggctgccgctgacatctctgcctactacatcagcaccttcaacttcgaccacgccctggtgccctaggacggtatcggcagcgtcatcgaggtcctccagcggcggcaggaaggcctggcttcctgaggcccatgggcaacagagcagcctccctgctctcccctcgacccaggcttccaaagacttctctaagctatttccttaagctctggaacgagccccctgttctgctggggaccctcgttccgctctctgtatgtaagctgcgtgcaggcaccggcttttacgcggacacctgtgtacactcacaggtggagtgggcaggtgctagcctgactgcgtgtctgcccatgcaggggaacacggtgctcggggcttaagcccccaacccatcactccctgcgcagcctcggcgtttgcacagtccctgcctgaggcctgagccattccccaaaggcttcctgggccagctgcccccctgacctccgttctgcctctggtggggttgccttccctggccaggtgagtcctgacagtgcctctccctcctggggcctccaaggaaagtattttgacatctctctctcttctgtttttattgacttgttaataaaggactttgtagtg

SEQ ID NO: 5390 - protein, 309 aa, Homo sapien [sequence omitted]

SEQ ID NO: 5391 - DNA, 2754 bp, Homo sapien; identical to SEQ ID NO: 3230

SEQ ID NO: 5392 - DNA, 390 bp, Homo sapien
atggcggagctgatccagaagaagctacagggagaagtggagaaatatcaacagctacagaaggacttaagtaaatccatgtcggggaggcagaaacttgaagcacaactaacagaaaataatatcgtgaaagaggaactggccctgctggatgggtccaacgtggtctttaaacttctgggtccggtgctagtcaaacaggagctgggggaggctcgggccacagtagggaagaggctggactatatcacagctgaaattaagcgatacgaatcccagcttcgggatcttgagcggcagtcagagcaacagagggagacccttgctcagctgcagcaggagttccagcgggcccaggcagcaaaggcaggggctcctggcaaggcctga

SEQ ID NO: 5393 - protein, 129 aa, Homo sapien
MAELIQKKLQGEVEKYQQLQKDLSKSMSGRQKLEAQLTENNIVKEELALLDGSNVVFKLLGPVLVKQELGEARATVGKRLDYITAEIKRYESQLRDLERQSEQQRETLAQLQQEFQRAQAAKAGAPGKA

SEQ ID NO: 5394 - DNA, 8281 bp, Homo sapien; identical to SEQ ID NO: 4675

SEQ ID NO: 5395 - DNA, 1349 bp, Homo sapien
agaaggcctcgcacaaaacactgtacaaacccgaaaggaagtctgagagacgaaccgccttcctccctgaagcttctagaactggagcagaaagaaggtgtggcccagggccagccccgcctcctccccgggcggaagctgtgtcagttgccggaagtcggcgtgaggtggggcttatgcggcggcgtggtgaaatagatatggcgaccgagggggatgtggagctggagttggagactgagaccagtggaccagagcggcctccggagaagccacggaaacatgacagcggtgcggcggacttggagcgggtcaccgactatgcagaggagaaggagatccagagttccaatctggagacggccatgtctgtgattggagacagaaggtcccgggagcagaaagccaaacaggagcgggagaaagaactggcaaaagtcactatcaagaaggaagatctggagctaataatgactgagatggagatatctcgagcagcagcagaacgcagtttgcgggaacacatgggcaacgtggtagaggcgcttattgccctaaccaactgatgcgtgctttctcaaatatacctactggattaatttatggcaataaaatttttttttgtctttttcagttttatcatcttgggtcaagtagagtgtatactatatcctatgttgtggagaatttatatgttggagactaactgaatttaagtgacccattaaaatctagcacacctgtatgaaaaatcagtgtagaagaatacctcatgtgcagatgctaggtggcaggccagtctcattcatctgactagctctcaacagtattcaaggtacatctggagtctcagcagagttactgtactcaaatggcatgtgtctccaagacagcttatgaatatctaaaaggccagctacctgcctaggagccactatatatatagatagatgtaggttatgaacccagttcataggccaccttgagttagaattttggtacctacaacatgcttgattttgagtgattaaaaaaaaataatttggctgggtgctgtggctcacgcctctaatcccagcactttgggaggtcgaggcaggtagatcacgaggtcaggaattcaagaccagcctggccaacatgtgaaaccccgtctccactgaaaatagaaaaattagctgggcatggtggtgggcgcctataatcccagctattctggaggctgaggcaggaatcgcttgaaattggaaagcagaggttgcagtgagctgagatcacactactgtactactgtactccagcctgggggaaagagtgaaactccatctcaaaaaaaaaaaaaaaaaaaa

SEQ ID NO: 5396 - protein, 121 aa, Homo sapien
MATEGDVELELETETSGPERPPEKPRKHDSGAADLERVTDYAEEKEIQSSNLETAMSVIGDRRSREQKAKQEREKELAKVTIKKEDLELIMTEMEISRAAAERSLREHMGNVVEALIALTN

SEQ ID NO: 5397 - DNA, 2742 bp, Homo sapien; identical to SEQ ID NO: 4999

SEQ ID NO: 5398 - protein, 587 aa, Homo sapien; identical to SEQ ID NO: 5000

SEQ ID NO: 5399 - DNA, 3445 bp, Homo sapien
aagtgctggtgccctctgccgctgctcccgtctctttggttacgctcgtcagccggtcggccgccgcctccagccgtgtgccgctatgggagtcccggcgttcttccgctggctcagccgcaagtacccgtccatcatagtcaactgcgtggaagagaagccaaaagaatgcaatggtgtaaagattccagttgatgccagtaaacctaatccaaatgatgtggagtttgataatctgtatttggatatgaatggaatcatccatccctgtactcatcctgaagacaaaccagcaccaaaaaatgaagatgaaatgatggttgcaatttttgagtacattgacagacttttcagtattgtaagaccaagaagacttctctacatggcaatagatggagtggcaccacgtgctaaaatgaaccagcagcgttcaaggaggttcagggcatcaaaagaaggaatggaagcagcagtcgagaagcagcgagtcagggaagaaatattggcaaaaggtggctttcttcctccagaagaaataaaagaaagatttgacagcaactgtattacaccaggaactgaattcatggacaatcttgctaaatgccttcgctattacatagctgatcgtttaaataatgaccctgggtggaaaaatttgacagttattttatctgatgctagtgctcctggtgaaggagaacataaaatcatggattacattagaaggcaaagagcccagcctaaccatgacccaaatactcatcattgtttatgtggagcagatgctgatctcattatgcttggccttgccacacatgaaccgaactttaccattattagagaagaattcaaaccaaacaagcccaaaccatgtggtctttgtaatcagtttggacatgaggtcaaagattgtgaaggtttgccaagagaaaagaagggaaagcatgatgaacttgccgatagtcttccttgtgcagaaggagagtttatcttccttcggcttaatgttcttcgtgagtatttggaaagagaactcacaatggccagcctaccattcacatttgatgttgagaggagcattgatgactgggttttcatgtgcttctttgtgggaaatgacttcctccctcatttgccatcgttagagattagggaaaatgcaattgaccgtttggttaacatatacaaaaatgtggtacacaaaactgggggttaccttacagaaagtggttatgtcaatctgcaaagagtacagatgatcatgttagcagttggtgaagttgaggatagcatttttaaaaagagaaaggatgatgaggacagttttagaagacgacagaaagaaaaaagaaagagaatgaagagagatcaaccagctttcactcctagtggaatattaactcctcatgccttgggttcaagaaattcaccaggttctcaagtagccagtaatccgagacaagcagcctatgaaatgaggatgcagaataactctagtccttcgatatctcctaatacgagtttcacatctgatggctccccgtctccattaggaggaattaagcgaaaagcagaagacagtgacagtgaacctgagccagaggataatgtcaggttatgggaagctggctggaagcagcggtactacaagaacaaatttgatgtggatgcagctgatgagaaattccgtcggaaagttgtgcagtcgtacgttgaaggactttgctgggttcttagatattattaccagggctgtgcttcctggaagtggtattatccatttcattatgcaccatttgcttcagactttgaaggcattgcagacatgccatctgattttgagaagggtacgaaaccgtttaaaccactagaacaacttatgggggtatttccagctgcaagtggtaattttctacctccatcatggcggaagctcatgagtgatcctgattctagtataattgacttctatcctgaagattttgctattgatttgaatgggaagaaatatgcatggcaaggtgttgctctcttgccattcgtggatgagcgaaggctacgagctgccctagaagaggtatacccagacctcactccagaagagaccagaagaaacagccttggaggtgatgtcttatttgtggggaaacatcacccactccatgacttcattttagagctgtaccagacaggttccacagagccagtggaggtaccccctgaactatgtcatgggattcaaggaaagttttctttggatgaagaagccattcttccagatcaaatagtatgttctcctgttcctatgttaagggatctgacacagaacactgtagtcagtattaattttaaagacccacagtttgctgaagattacatttttaaagctgtaatgcttccaggagcaagaaagccagcagcagtactgaaacctagtgactgggaaaaatccagcaatggacggcagtggaagcctcagcttggctttaaccgtgaccggaggcctgtgcacctggatcaggcagccttcaggactttgggccatgtgatgccaagaggctcaggaactggcatttacagcaatgctgcaccaccacctgtgacttaccagggaaacttatacaggccgcttttgagaggacaagcccagattccaaaacttatgtcaaatatgaggccccaggattcctggcgaggtcctcctccccttttccagcagcaaaggtttgacagaggcgttggggctgaacctctgctcccatggaaccggatgctgcaaacccagaatgcagccttccagccaaaccagtaccagatgctagctgggcctggtgggtatccacccagacgagatgatcgtggagggagacagggatatcccagagaaggaaggaaataccctttgccaccaccctcaggaagatacaattggaattaagcttttgtaaagctttcccaaatcctttcatcattctacagttttatgctatttgtggaaagatttctttctcaagtagtagtttttaataaaactacagtactttgtgtatttcttttaactgtgtatatttctactgatctgatctcactgtttatgttgctttccaaagatgtatgttgcataatacagtggatctgaatttattattgcttataaaacacatttgatggaataggagtactggtttttcataatggttaaaaatgaaaccagctgtggatttcaaaacacagtgtattctagatcatctaagatccatgctgatttttattgcacaagaattaggtttgaactcttgagctggaacctcagcaaactagagtatatattgttcagtatttctttggaaacatttcattaatgtacttgtcttacagaaatttctgaactttagtaaaaaaaaataaagttaaacttttaaaactcaaaaaaaaaaaaaaaaaa

SEQ ID NO: 5400 - protein, 950 aa, Homo sapien
MGVPAFFRWLSRKYPSIIVNCVEEKPKECNGVKIPVDASKPNPNDVEFDNLYLDMNGIIHPCTHPEDKPAPKNEDEMMVAIFEYIDRLFSIVRPRRLLYMAIDGVAPRAKMNQQRSRRFRASKEGMEAAVEKQRVREEILAKGGFLPPEEIKERFDSNCITPGTEFMDNLAKCLRYYIADRLNNDPGWKNLTVILSDASAPGEGEHKIMDYIRRQRAQPNHDPNTHHCLCGADADLIMLGLATHEPNFTIIREEFKPNKPKPCGLCNQFGHEVKDCEGLPREKKGKHDELADSLPCAEGEFIFLRLNVLREYLERELTMASLPFTFDVERSIDDWVFMCFFVGNDFLPHLPSLEIRENAIDRLVNIYKNVVHKTGGYLTESGYVNLQRVQMIMLAVGEVEDSIFKKRKDDEDSFRRRQKEKRKRMKRDQPAFTPSGILTPHALGSRNSPGSQVASNPRQAAYEMRMQNNSSPSISPNTSFTSDGSPSPLGGIKRKAEDSDSEPEPEDNVRLWEAGWKQRYYKNKFDVDAADEKFRRKVVQSYVEGLCWVLRYYYQGCASWKWYYPFHYAPFASDFEGIADMPSDFEKGTKPFKPLEQLMGVFPAASGNFLPPSWRKLMSDPDSSIIDFYPEDFAIDLNGKKYAWQGVALLPFVDERRLRAALEEVYPDLTPEETRRNSLGGDVLFVGKHHPLHDFILELYQTGSTEPVEVPPELCHGIQGKFSLDEEAILPDQIVCSPVPMLRDLTQNTVVSINFKDPQFAEDYIFKAVMLPGARKPAAVLKPSDWEKSSNGRQWKPQLGFNRDRRPVHLDQAAFRTLGHVMPRGSGTGIYSNAAPPPVTYQGNLYRPLLRGQAQIPKLMSNMRPQDSWRGPPPLFQQQRFDRGVGAEPLLPWNRMLQTQNAAFQPNQYQMLAGPGGYPPRRDDRGGRQGYPREGRKYPLPPPSGRYNWN

SEQ ID NO: 5401 - DNA, 3328 bp, Homo sapien; identical to SEQ ID NO: 4341

SEQ ID NO: 5402 - protein, 1003 aa, Homo sapien; identical to SEQ ID NO: 4342

SEQ ID NO: 5403 - DNA, 2600 bp, Homo sapien
gcagctgggaggaggtggtgacggtggcaacggcagcgtcggggacgatggcgcgactcgtggcagtgtgcagggacggggaggaggagttccccttcgagaggaggcagattcccctctacatagacgacaccctgacgatggtgatggaatttcctgataatgtgttaaatctcgatggacatcagaataatggtgcacagctaaagcagttcattcagcgacatggtatgcttaagcaacaggatctaagtattgccatggtggtgacatcacgcgaagtcctgagtgcactttctcagcttgtcccatgtgttggttgtcgtcgcagtgtggagcgtctcttttcccagcttgtagagtctggaaatcctgctcttgaacccctaacagtagggcccaagggagtcctgtctgtaactagaagctgcatgactgatgcaaagaagctttatacattattttatgtacatgggtccaaactaaatgacatgatagatgctattccaaaaagtaagaagaataagagatgtcagttgcactccttagatacgcacaagccaaaacctttgggaggttgttggatggatgtatgggaactaatgtcgcaggaatgcagggatgaagtagttttaattgactcgagttgtcttttagaaacactagaaacatatctgcgaaaacacaggttttgcactgattgcaaaaataaagtcctccgagcatacaatatccttattggtgaacttgactgcagcaaagaaaagggctactgtgctgcactttatgaaggcttgcggtgctgtccacatgaacgacacatacatgtttgctgtgaaacagacttcattgcacatcttttgggtcgtgctgagccagagttcgcaggagggcgaagagaaaggcatgcaaagacaatagatatagctcaagaagaagttctgacctgcttgggaattcatctttatgaaagactgcatcgaatctggcagaagctacgggcagaagagcagacatggcagatgcttttctatcttggtgttgatgctttacgcaagagttttgagatgaccgtggaaaaagtacagggtattagcagattggaacaactttgtgaggaattttcagaagaggaacgagtaagagaactcaagcaagaaaagaaacgccaaaaacggaagaatagacgaaaaaataagtgtgtgtgtgatattcctactcccttacaaacagcagatgaaaaggaagtaagccaagagaaggaaacagacttcatagaaaatagcagctgcaaagcctgtggcagcactgaagatggtaatacttgtgtagaagtaattgttaccaatgaaaatacatcatgtacctgtcctagcagtggcaatcttttggggtcccctaaaataaagaaaggcttatctccacactgtaatggtagtgattgtggatattcatctagcatggaagggagtgaaacaggttctcgggagggttcggatgttgcctgcactgaaggcatttgtaatcatgatgaacacggtgatgactcttgtgttcatcactgtgaagacaaagaggatgatggtgatagttgtgttgaatgttgggcaaattctgaagagaacgacacaaaaggaaaaaataaaaagaagaaaaagaaaagcaagatactgaaatgtgatgaacatatccagaagcttggaagctgtattacagatccaggtaatcgagagacctcaggaaataccatgcacacagtgtttcaccgtgacaagaccaaagatacacatcctgaaagctgttgcagctctgaaaagggtgggcagccattgccttggtttgagcataggaaaaatgtaccacagtttgcagaacctacagaaacgttgtttggtcccgattccggaaaaggtgccaagagcttagttgaactccttgatgagtctgaatgtacttcagatgaggaaatctttatctcacaagatgaaatacagtcatttatggctaataaccagtctttctacagcaatagagaacaataccgacagcatctgaaggagaaatttaataaatactgccggttaaatgatcacaagaggcccatttgtagtggctggttgacaacggctggagcaaattaaataaataaaatagctctgtctttcaatgaaacactcacgatgactactgcgccttctctttcgaaaaactcttaatttagtgacttatggcaaaattttatcttaaatcaatgtgattctttcttgttttgggagacggtggaggtatcctcattagttctttcttcaggcttgtgtctttagttgcgtggctgcgcaggcctgccatatgatttaagccatctcttttcattaaatgtttctcttcctgtgagacttactaaagcaacttagtggcaaaaagtaatgttgtacttataattctgtacagaaatgacaatgagctgaatatatggttttacaaagtagacatccacttgcaaaatgtttggatgtaatgttaaagcgcaatgtgcaaaatttaaaataaagaatatttattaatacgcacagtaaaaaaaaaaaaaaaaaaaaaaaaaa

SEQ ID NO: 5404 - protein, 697 aa, Homo sapien
MARLVAVCRDGEEEFPFERRQIPLYIDDTLTMVMEFPDNVLNLDGHQNNGAQLKQFIQRHGMLKQQDLSIAMVVTSREVLSALSQLVPCVGCRRSVERLFSQLVESGNPALEPLTVGPKGVLSVTRSCMTDAKKLYTLFYVHGSKLNDMIDAIPKSKKNKRCQLHSLDTHKPKPLGGCWMDVWELMSQECRDEVVLIDSSCLLETLETYLRKHRFCTDCKNKVLRAYNILIGELDCSKEKGYCAALYEGLRCCPHERHIHVCCETDFIAHLLGRAEPEFAGGRRERHAKTIDIAQEEVLTCLGIHLYERLHRIWQKLRAEEQTWQMLFYLGVDALRKSFEMTVEKVQGISRLEQLCEEFSEEERVRELKQEKKRQKRKNRRKNKCVCDIPTPLQTADEKEVSQEKETDFIENSSCKACGSTEDGNTCVEVIVTNENTSCTCPSSGNLLGSPKIKKGLSPHCNGSDCGYSSSMEGSETGSREGSDVACTEGICNHDEHGDDSCVHHCEDKEDDGDSCVECWANSEENDTKGKNKKKKKKSKILKCDEHIQKLGSCITDPGNRETSGNTMHTVFHRDKTKDTHPESCCSSEKGGQPLPWFEHRKNVPQFAEPTETLFGPDSGKGAKSLVELLDESECTSDEEIFISQDEIQSFMANNQSFYSNREQYRQHLKEKFNKYCRLNDHKRPICSGWLTTAGAN

SEQ ID NO: 5405 - DNA, 1108 bp, Homo sapien; identical to SEQ ID NO: 4140

SEQ ID NO: 5406 - protein, 198 aa, Homo sapien; identical to SEQ ID NO: 4141

SEQ ID NO: 5407 - DNA, 2272 bp, Homo sapien; identical to SEQ ID NO: 4081

SEQ ID NO: 5408 - protein, 497 aa, Homo sapien; identical to SEQ ID NO: 4082

SEQ ID NO: 5409 - DNA, 2102 bp, Homo sapien
aaacgttcccaggatccctaagcctccggccccagacaaacgggactcgcagcttctgcgcctcctgctccgctcactcttctttgtctcagcctttccatctttttcgccaggactctgctgggccgctcagccatgcctgagggagcccaaggactgagcctctccaaacctagcccaagcctcgggtgtggccgaagaggtgaagtgtgtgactgtggcaccgtgtgtgagactcggacagctcctgcagcccccaccatggcctccccccgaggttctgggagctccacatccctgagcacagtgggctctgagggggatccagcccctgggcccactccagcctgctcagcctccaggccagagccccttccagggcccccatccgcctacatctctctccggtggggatcccaggttcagccagaccctcaaggctggagcgtgtggcccgggagatcgtggagacagaacgggcctatgtcagggacctccgcagcatcgtggaggactacctgggccctctgctggacggcggggtcctggggctgagcgtggagcaggtgggcacgctgtttgccaacattgaggacatctacgagttcagcagcgagctcctggaggacttggagaacagcagcagcgccgggggtattgctgagtgcttcgtgcagaggagcgaggattttgacatctacacattgtactgcatgaactacccgagctccctggccctgctccgggagctgtcgttgtctccgccagcagccctgtggctgcaggagcgccaggcccagcttcgccactcgctgcccctgcagagcttcctgctgaaacctgtccagcgcattctcaagtaccatctgctgctgcaggaactagggaagcactgggcggagggcccaggcactgggggtcgcgagatggtggaggaagctattgtgtccatgacagcggttgcctggtacatcaacgacatgaagcgcaagcaggagcatgcagcgcgcctccaggaagtgcagcggcggctgggtggctggactggaccagagctcagtgcttttggggaactggtgttggagggcgcgttccgaggaggcggagggggtggcccccggctacgagggggtgagcggctgctcttcctgttctctcggatgctgctggtggccaagcgcagggggctggagtacacctacaaaggccacatcttctgctgcaacctgagcgtgagcgagagtccccgagaccctctagggttcaaggtgtctgatctgaccattcccaagcacagacacctgctccaggccaagaaccaagaagagaagaggctgtggattcactgtctccagcgcctcttctttgagaaccaccctgcctccatccctgccaaggcaaagcaagttctccttgaaaacagcctgcattgtgcccccaaaagtaagcctgtcctagagcccctgacacccccacttgggtctcctcgacctcgagatgctagaagttttacccctgggcgaaggaacacagctccatctcctgggccctctgtgattcgccgaggccgcaggcagtctgagccggtgaaggacccttatgtcatgttcccacagaacgctaagcctggattcaagcacgctggcagcgaaggggaactctaccctccagaatctcagccaccagtttcaggctctgcaccccctgaggacctggaggatgctggacccccaacactggacccctctgggacctcaatcactgaagaaatcctggaactgctgaatcagcgaggccttcgagatccaggggaatctatgggccttcacagggcccagggggctcctgatgcccccttccacatgtgagccaggacatgaggcttccctgaagcaaggatttcagccagatgccatagaccctcagaacttgacctggaagtccagacactgaacgcaggcctcaaaactgctgcggccttccaactcctggtatctgcatcggcgaatggcccttcttgccttgatccacagggatggggaagggaatgtcattaatgttttgttaatactgattctttcatgcaaaaaaaaaaaaaaaaa

SEQ ID NO: 5410 - protein, 384 aa, Homo sapien
MNYPSSLALLRELSLSPPAALWLQERQAQLRHSLPLQSFLLKPVQRILKYHLLLQELGKHWAEGPGTGGREMVEEAIVSMTAVAWYINDMKRKQEHAARLQEVQRRLGGWTGPELSAFGELVLEGAFRGGGGGGPRLRGGERLLFLFSRMLLVAKRRGLEYTYKGHIFCCNLSVSESPRDPLGFKVSDLTIPKHRHLLQAKNQEEKRLWIHCLQRLFFENHPASIPAKAKQVLLENSLHCAPKSKPVLEPLTPPLGSPRPRDARSFTPGRRNTAPSPGPSVIRRGRRQSEPVKDPYVMFPQNAKPGFKHAGSEGELYPPESQPPVSGSAPPEDLEDAGPPTLDPSGTSITEEILELLNQRGLRDPGESMGLHRAQGAPDAPFHM

SEQ ID NO: 5411 - DNA, 1113 bp, Homo sapien
atggagaatcaggtgttgacgccgcatgtctactgggctcagcgacaccgcgagctatatctgcgcgtggagctgagtgacgtacagaaccctgccatcagcatcactgaaaacgtgctgcatttcaaagctcaaggacatggtgccaaaggagacaatgtctatgaatttcacctggagttcttagaccttgtgaaaccagagcctgtttacaaactgacccagaggcaggtaaacattacagtacagaagaaagtgagtcagtggtgggagagactcacaaagcaggaaaagcgaccactgtttttggctcctgactttgatcgttggctggatgaatctgatgcggaaatggagctcagagctaaggaagaagagcgcctaaataaactccgactggaaagcgaaggctctcctgaaactcttacaaacttaaggaaaggatacctgtttatgtataatcttgtgcaattcttgggattctcctggatctttgtcaacctgactgtgcgattctgtatcttgggaaaagagtccttttatgacacattccatactgtggctgacatgatgtatttctgccagatgctggcagttgtggaaactatcaatgcagcaattggagtcactacgtcaccggtgctgccttctctgatccagcttcttggaagaaattttattttgtttatcatctttggcaccatggaagaaatgcagaacaaagctgtggttttctttgtgttttatttgtggagtgcaattgaaattttcaggtactctttctacatgctgacgtgcattgacatggattggaaggtgctcacatggcttcgttacactctgtggattcccttatatccactgggatgtttggcggaagctgtctcagtgattcagtccattccaatattcaatgagaccggacgattcagtttcacattgccatatccagtgaaaatcaaagttagattttccttttttcttcagatttatcttataatgatatttttaggtttatacataaattttcgtcacctttataaacagcgcagactgaaaatgagggcaggcgcagtggctcatgcctgtgatcccagcgctttgggaggctga

SEQ ID NO: 5412 - protein, 370 aa, Homo sapien [sequence omitted]

SEQ ID NO: 5413 - DNA, 330 bp, Homo sapien
atgatatccttgagagttttactggtgatcctgtggcttcagttaagctgggtttggagccaacggaaggaggtggagcaggatcctggacccttcaatgttccagagggagccactgtcgctttcaactgtacttacagcaacagtgcttctcagtctttcttctggtacagacaggattgcaggaaagaacctaagttgctgatgtccgtatactccagtggtaatgaagatggaaggtttacagcacagctcaatagagccagccagtatatttccctgctcatcagagactccaagctcagtgattcagccacctacctctgtgtg

SEQ ID NO: 5414 - protein, 109 aa, Homo sapien
MISLRVLLVILWLQLSWVWSQRKEVEQDPGPFNVPEGATVAFNCTYSNSASQSFFWYRQDCRKEPKLLMSVYSSGNEDGRFTAQLNRASQYISLLIRDSKLSDSATYLC

SEQ ID NO: 5415 - DNA, 213 bp, Homo sapien
atgtccaacaacatggccaagattgccgaggcccgcaagacggtggaacagctgaagctggaggtgaacatcgaccgcatgaaggtgtcgcaggcagcagcggaactcctggctttctgcgagacgcatgccaaagatgacccgctggtgacgccagtacccgccgcggagaaccccttccgcgacaagcgcctcttttgtgttctgctctga

SEQ ID NO: 5416 - protein, 70 aa, Homo sapien
MSNNMAKIAEARKTVEQLKLEVNIDRMKVSQAAAELLAFCETHAKDDPLVTPVPAAENPFRDKRLFCVLL

SEQ ID NO: 5417 - DNA, 2672 bp, Homo sapien; identical to SEQ ID NO: 4096

SEQ ID NO: 5418 - protein, 335 aa, Homo sapien; identical to SEQ ID NO: 4097

SEQ ID NO: 5419 - DNA, 2025 bp, Homo sapien; identical to SEQ ID NO: 3894

SEQ ID NO: 5420 - protein, 223 aa, Homo sapien; identical to SEQ ID NO: 3895

SEQ ID NO: 5421 - DNA, 492 bp, Homo sapien
atgacagtgaagaccctgcatggcccagccatggtcaagtacttgctgctgtcgatattggggcttgcctttctgagtgaggcggcagctcggaaaatccccaaagtaggacatacttttttccaaaagcctgagagttgcccgcctgtgccaggaggtagtatgaagcttgacattggcatcatcaatgaaaaccagcgcgtttccatgtcacgtaacatcgagagccgctccacctccccctggaattacactgtcacttgggaccccaaccggtacccctcggaagttgtacaggcccagtgtaggaacttgggctgcatcaatgctcaaggaaaggaagacatctccatgaattccgttcccatccagcaagagaccctggtcgtccggaggaagcaccaaggctgctctgtttctttccagttggagaaggtgctggtgactgttggctgcacctgcgtcacccctgtcatccaccatgtgcagtaa

SEQ ID NO: 5422 - protein, 163 aa, Homo sapien
MTVKTLHGPAMVKYLLLSILGLAFLSEAAARKIPKVGHTFFQKPESCPPVPGGSMKLDIGIINENQRVSMSRNIESRSTSPWNYTVTWDPNRYPSEVVQAQCRNLGCINAQGKEDISMNSVPIQQETLVVRRKHQGCSVSFQLEKVLVTVGCTCVTPVIHHVQ

SEQ ID NO: 5423 - DNA, 2270 bp, Homo sapien
agtgtaagcagtgtgcaaacaaggtgttacagcacatgaaggccgtgcaggcagatcaggagcgggagaggcagcggcggctggaagtagaacgtgaggcagagaagaagcgtgaggctaagcagcgagctaaggaagctcaggagcgggaactgcggaagcgggagaaggcggaagagaaggagcgccggagaaaggagtatgatgccctcaaagcagccaagcgggagcaggagaagaaacctaagaaggaagcaaatcaggccccgaaatctaagtctggctcccgtccccgcaagccaccaccccggaagcacactcgttcctgggctgtgctgaagctgctgctgctgctgctgctatttggtgtggcgggagggctggttgcttgtcgggtgacagagctgcagcagcagcccctctgcaccagcgtgaacaccatctatgacaatgcggtccagggtctacgccgccatgagatcctccagtgggtccttcagaccgactctcagcagtgagcttgttcccagcacctgctgcctcccagccttggagtttggattcctatggaattgggttctgctggacacaacctctttttagcatcagacctacctgccatcatcaaatggctgcagattggtacatgagacctcctctttgtaggacttcttcattccttagtcagggttccctgaaggaatgaggagaaatgggaggtggcgggggggcgtggggggcagttacctgcatgcctaaaggagtaggcttgggggtggggagagagaaaacatagccttttctagttgttatataaagctgtgtaaaggcaaggctcgtttctactaaatggtcagctgtcactacatttatacttttgtatgccacaaaccctttcattcctccctgggaatcagggtagatcaggaggaactgggggggactagaacaccacgctcagtaaatccagtctaaactgggaggtaggggtattcctgttttctttaggacctcagagatgtaagcattttagcagccacacaaaatctctggctatgaaagggacttcatgaccatccagtccaatataacacttgcagacagagaaactgaggtcttccatgacttgcctagtctcccagctagtttgaggcaaaactggattcccactctggtattctttcttccctttacatcattttccctcctttataatgtcctgagagaccagaactcacaccagaatcgattattcctcaggtgaagcatagactctttcatggtagacagatttcacgactcagagatagaaatctcttgctatcatcaggtcacgggcagctcctgtggagtcctgcccaacttatgtggcttccataaaatggcaacagtccaggctccttgcctaattttagagcattaactccctaattgccagtaagcaaggaggtggatctctgcaaacctacactgtctatgacagctctagttgtacttggtgtgactaaatacctcaaaggcaacctgcttctgcaggttttgaagtgtcagcttcataagacactgaggtttagaattgtttgattctagaccataactgaagggcataaatggaaacaggatatgaagggaaacaagtagcatcatggagctgaaaagtggtgcatcacccaatggctagcacaaacaaggatcacactgtccattctcttgtctgctaaattaagcattttcttgcctcctttgcttcatcttttcacaacagctggatagagggatcagaaatgactgtgtcatggtgctcattcactgcaaactcccagttgcaagctccttggctcccccggagggagcaagaatctcatagttcagagacacagagggccttttagccctaatgaccttttggatgggactgcaactcatgactatcctgatattggaagaaaggactttgttaatcttctcccccatagctctgctgcgtaggtctacatcttactcagaatcactacacattcctttagtcttcctccaagctccagagccattggtacaaatgctttattgaaactaaatacataatacacacaatgagatgaagacaatatagaagtccgcatagtcatcataatcccgttccttggccggttgaggcagctcagtggctgagcccagtcaagccaacccgcagcttcactcacgacttcaagatttgatgctaattcttttggatttctacagttattaaataagtgtctgagtggaca

SEQ ID NO: 5424 - protein, 160 aa, Homo sapien
MKAVQADQERERQRRLEVEREAEKKREAKQRAKEAQERELRKREKAEEKERRRKEYDALKAAKREQEKKPKKEANQAPKSKSGSRPRKPPPRKHTRSWAVLKLLLLLLLFGVAGGLVACRVTELQQQPLCTSVNTIYDNAVQGLRRHEILQWVLQTDSQQ

SEQ ID NO: 5425 - DNA, 2082 bp, Homo sapien; identical to SEQ ID NO: 3555

SEQ ID NO: 5426 - protein, 447 aa, Homo sapien; identical to SEQ ID NO: 3556

SEQ ID NO: 5427 - DNA, 2667 bp, Homo sapien
gcctggaatagcctggctactacccctgcacctgttcccctgctgtccccaggcctctctgcctgaatctgcctctctctgcctcttttctcctgtccctccaggagtctctctgcctcaaccactctctctgccccttcatctctctgagctggtgtgtctggtcctaccctctgtttggggagctgtctggctctgtcccccacctcttggccagcctgtgtctcctgtctatgactgagcccaattgcctgttgcctttctgcaggtgtttccacgagcctatccctacccacctgtttgtttctgagtctgcctgtgtgtccctttctccctgtctctgcctgtcttccaagctcccctagcatcccctcctcccgcccatctgtctttctgtcccttctgtggtctgtctgttcctgtgctgtttctcatgcctgctttctttgtaacttcagttctcctactctctctctgtctcctctctgcacctttttctgccatccatcccatcctgctgtccgtctgctctgtgagtcatcccctctgtctgcctgtcactctctctagctgtgggtctacaccctcaatctttcaggccatttcccccaccatcaacacacaaacaaaccgctgtctccctccaagtgggtccagatagggggcgccccttctccacctcttcccccgcccagggccagaaggagggaaacgaaattaaaattaacatttcttctcaggaaaaaaaaaaaagtaccgctccagagcaggagcctaggcagccgagagggtgcccgaacctgagtctgagttgcggccacttcaggagctgagaggagcaggatggaactgcaggatccaaagatgaatggagccctcccttcggatgctgtgggctacaggcaagaacgtgagggcttcctgcccagtcgtggtcctgctcctgggagcaagccggtccagttcatggatttcgaggggaagacatcgtttggaatgtcagtgttcaacctcagcaacgccatcatgggcagcggcatcctggggctggcctatgccatggcccacacgggggtcatcttcttcctggccctgctgctgtgcattgcgcttctgtcgtcctactccatccacctcctgctgacctgtgctggtattgcaggcatccgagcctatgagcagctgggacagagggcattcgggcctgcggggaaggtagtggtggccacagtcatctgtctgcacaatgttggggccatgtccagttacctgttcatcatcaaatctgagctccccctggttatcggcaccttcctgtacatggaccccgagggggactggttcttgaagggaaacctcctcatcatcatcgtcagtgtgttaatcatcctgcccctcgccctcatgaaacacttgggctacctggggtacaccagtggtctctctctgacctgcatgctgtttttccttgtttcggtcatctacaagaagttccaacttggctgtgctataggccacaatgaaacagcaatggagagtgaagctctcgtgggactccccagccaaggactcaacagcagctgtgaggcccagatgttcacagttgactcacagatgtcctacacagtgcccattatggcttttgcttttgtctgccaccctgaggtgctgcccatctatacggagctctgccggccctccaagcgcaggatgcaggccgtggccaacgtgtccattggggccatgttctgcatgtatgggctcacagcaacctttggatacctcaccttctacagcagtgtgaaggcggagatgctgcacatgtacagccagaaggacccgctcatcctctgtgtgcgcctggccgtgctgctcgcggtgaccctcactgtgccagtcgtgctgttccctatccgccgggccctgcagcagctgcttttcccaggcaaggccttcagctggccacgacatgtggccatagctctgatcctgcttgttttggtcaatgtccttgtcatctgtgtgccaaccatccgggatatctttggagttatcgggtccacctcagcccccagcctcatcttcatcctccccagcatcttctacctccgcattgtaccctctgaggtggagcctttcttatcctggcccaagatccaggccctgtgctttggagtcctgggagtcctcttcacggccgtcagtctaagctttatgtttgccaactgggccacaagccagagccgcatgtctggacactgataaggcctgctggcccaggtccctgtgcgcatgcacatggaggggtcagggccgctccctagggtccctcctgcccaacatgtggaggtggctggttcccatgaacgtggttgtcagaggcgggggacagcagaggctgcagactggcccacttccctcctccccagggatgccaagcttggatcatggccctaatcccaaccccaaccccatgggaggaggaggaagaagaggaggaggaggaggaggaggaggaggaggaggaggccaggtcctggtggagcctttgcccagcccagtcctctctgcctcctcctggctgaagctgtttgtcaggattaccctcgggctaaagaggaaaaataaagatgttgagctaccaaaaaaaaaaaaaaaaaaaaaaaa

SEQ ID NO: 5428 - protein, 472 aa, Homo sapien
MELQDPKMNGALPSDAVGYRQEREGFLPSRGPAPGSKPVQFMDFEGKTSFGMSVFNLSNAIMGSGILGLAYAMAHTGVIFFLALLLCIALLSSYSIHLLLTCAGIAGIRAYEQLGQRAFGPAGKVVVATVICLHNVGAMSSYLFIIKSELPLVIGTFLYMDPEGDWFLKGNLLIIIVSVLIILPLALMKHLGYLGYTSGLSLTCMLFFLVSVIYKKFQLGCAIGHNETAMESEALVGLPSQGLNSSCEAQMFTVDSQMSYTVPIMAFAFVCHPEVLPIYTELCRPSKRRMQAVANVSIGAMFCMYGLTATFGYLTFYSSVKAEMLHMYSQKDPLILCVRLAVLLAVTLTVPVVLFPIRRALQQLLFPGKAFSWPRHVAIALILLVLVNVLVICVPTIRDIFGVIGSTSAPSLIFILPSIFYLRIVPSEVEPFLSWPKIQALCFGVLGVLFTAVSLSFMFANWATSQSRMSGH

SEQ ID NO: 5429 - DNA, 1074 bp, Homo sapien
  Unsure 691-721: Unknown base
tttgtaaatctgaaaactcaggattgagtagtctttccttagctgcagttgcctgtctggccacacctgccagctgttgcttgtacccctgtaatttgcacggccttccgggcctttctcacaagatcactgcaggtcacattcatgaggaaaatgcaggcagttcctgccatcagacccctcaggatgtcatggtttggcctgaaaacaagattcctgcaactctaattttcctttgctagatcaaatgaaggatttgatctaatgtttgcattctagcagcaaaatcattgaatattttatttcttaagagccctgcctaaccaccgcccccctcctcccccgcgatcacacacacctgggttaggccctgcctctcacgcctgtgcctcctgccaagtcctcagaggtctctgatcccatgtgcctccaggcatggcatagggggactgtgacacagcctctcggcccacagacccctgattgtgggcttgctcactgccccagtcagtcctcttattgaggattccgtgccagttcctgcctctgccttcctgagattacaggtatgagccactgtgttaagcaaaaaaacttttttaaatgaaaatcattttttaaaagacaggctttccaggggagggtattattccacttatatgaagtgtcaacagagcaaaactcgatctcnnnnnnnnnnnnnnnnnnnnnnnnnnnnnnngcagctctctctctcgggagagggaggggacttccgagaggaaaaggcctgcaagagcctttgggttaactgagaaagcacagcccggccaacgcttgggaagaaagacaggcaagcactggaaacaggagctattagggtgaggagagagccttgcctttcacagcacagtgaggatgacattgcaccagggacagagattgtatgtgacaaggctggggctccttctttcctagacaatcaaagtatcagtgatgggttttggttggtgattttgaaaaaaaaaaaaagtatgttatgttatactagtgtatgctgtactgaattgaaataaaaccaaaatctgcatcttc

SEQ ID NO: 5430 - protein, 79 aa, Homo sapien [sequence omitted]

SEQ ID NO: 5431 - DNA, 1782 bp, Homo sapien
atttgcctgggaaaacttgtttagatattgagctacttatgccttctagcctttatattaattgtatgtaatgttattaaatatatatatagttcatctttacatttggaaatgcccaacatttttttcatataagtccttaaacaagcgttcattttattttaaatctatacagtgaactggccaagatattttaagagggaactttaatatcccatttattgtttttataaccctggacttataaaaatgggttgtttgaagggttattttgaaagtgggggaaaaaaaaacttagttgctaatgtatctaaacttcagcagagctttttggtgatctcctacctgcaccctcaactcttgacaaagaagcaagactatagattcattttctgaaggggatcatgtatggaattttttgatgagtttttacttttacctctctactcttgattttctattattgaatactcttttaaaacactgatttttaaggctttatatatgttttccaggctgatgttcacatctttttttcatgaactatcagaatatagtgaacacttttcaaatatttaaggacttaatgtttaaaaagccataaaatagagagtggtaatactaccaaataattacttaaaactgaaagctaagttatcaatagtttatataagagatgttttctgaggagatgtgcatccagtgagaccaaggtagaaagtttatataattgttttttttccagtaaatatgaaaaaaaaagctgtagcttgtttattacatgtccaaaatacagtggagccttactttaacacaatgtactgtaacttggaatttgttctgttatgagtctatcttgaattcccatccatgaaactgtagtcaccaaaagcaacaagtattttcacatgatgtaaaagaccatactatgatggccattgctagaaattgaatcacaaataatagctaataatttttcatttttcaaaaaagatcatttggatagcagctatgtataaaatggaaaataaaaaattattctattttgcatgaatagttcagactttcccataccacagccaagcagtaactaaaattaggatcttaattttcaatgataaaaggtctaaggttcatttaattatgctcctttaacactgtctttctagatttttcacccagtattttcaaaatttgggaatgtaaacaattgatatatttattgtatgttggctagcagttcatccttctgcaaaatatgcattcagagaaatgtgaagcttgttttaatgaagacttaaaccatttgtgtcatttgtgttttcatattcaaatacaccaaattaaaattctgaacctatatttttcatcattaacttcctaatataccagaacatatacctttttcatgtaaagttggcaatgggatatggcagttttatttttgaaaaatatgtaacatgactttaatatttttatagttttcagaattagaaacataggaagggaaaatgttttaattagataagtcaactttttatgtgtctgtagtggtgtactataatagcaaattataaagcattattaaatgtttataataatttttaatattacctacattatgaatttaactaaaataaagtgtgagttgtatattttttaattgggttgtttcaatagctggaagcatcctgaagcattatattgatttttgaactatttgaactcaaactgagtatgatttgaaaataaattaataatttaaaaacatccaaatcataa

SEQ ID NO: 5432 - protein, 22 aa, Homo sapien
LPGKTCLDIELLMPSSLYINCM

SEQ ID NO: 5433 - DNA, 3639 bp, Homo sapien
  Unsure 1790-1863: Unknown base
  Unsure 2494-2669: Unknown base
gtctagttcacgcactgggtgaaaaacaaaccagaggctgcagataagtgaacgagatgttctctgtgttcagatgctggactttgtcatgatctcggtcatgggccattttctcacatgtttgatggacgatttattccacttgctcgcccggaggtgaaatggacgcatgaacaaggctcagttatgatgtttgagcaccttattaattctaatggaattaagcctgtcatggaacaatatggtctcatccctgaagaagatatttgctttataaaggaacaaattgtaggaccacttgaatcacctgtcgaagattcattgatttggtgcctatcctaaaacttccagtgggttttcttgccttccagtggccatataaagggcgtcctgaaaacaaaagcttcctttatgagatagtatctaataaaagaaatggcattgatgtggacaaatgggattattttgccaggactgccatcatcttggaatccaaaataattttgattacaagcgctttattaagtttgcccgtgtctgtgaagtagacaatgagttgcgtatttgtgctagagataaggaagttggaaatctgtatgacatgttccacactcgcaactctttacaccgtagagcttatcaacacaaagttggcaacattattgatacaatgattacagatgctttcctcaaagcagatgactacatagagattacaggtgctggaggaaaaaagtatcgcatttctacagcaattgacgacatggaagcctatactaagctgacagataacatttttctggagattttatactctactgatcccaaattgaaagacgcacgagagattttaaaacaaattgaataccgtaatctattcaagtatgtgggtgagacgcagccaacaggacaaataaagattaaaagggaggactatgaatctcttccaaaagaggttgccagtgctaaacccaaagtattgctagacgtgaaactgaaggctgaagattttatagtggatgttatcaacatggattatggaatgcaagaaaagaatccaattgatcatgttagcttctattgtaagactgcccccaacagagcaatcaggattactaaaaaccaggtttcacaacttctgccagagaaatttgcagagcagctgattcgagtatattgtaagaaggtggacagaaagagtttgtatgccgcaagacaatattttgttcagtggtgtgcagacagaaatttcaccaagccgcaggatggcgatgttatagccccactcataacacctcaaaaaaaggaatggaacgacagtacttcagtccaaaatccaactcgcctccgagaagcatccaaaagcagagtccagctttttaaagatgacccaatgtgaatgtctgtagtcagttgtttacaaactccctctcctgcacaattcatttagaggcttcaatcatagaattctgcaaattaatgacaactcatgctttaattttgtattttgaatgtacacgcatgctgaagctaagtaacttttaatcaaagaaataagatggtattaggcaaatcttactatactatgaaaagcattaccttgcctatttttaatattattaaagcctttctccttcagtagtctattttcttagaataacaactcttttatctattctgaactctatttcttgttttcttttgtttgaagagacaaggtgtttggctgctgttcgcccaagtcttgggatctcagaactttcacttgggctcaatgcgaccactcctcnnnnnnnnnnnnnnnnnnnnnnnnnnnnnnnnnnnnnnnnnnnnnnnnnnnnnnnnnnnnnnnnnnnnnnnnnncagatgattgttttttgtttttaatgtagaaatgagacaagggtacaaattggaactagaaattgacattgtcattgacaaacatggctaaaaacaaaacatcaaatcctgcccccgtgaagagttccctgtcacctcaagtttgaggatagtcctctaagagtgacctaagcataagtgaaagacacctcccctcacccttctagccccctacaaggtgccaggttggggtaaagagttggagatgatggccaggagtggcctccaacacgctggtgagaggcctgattaggttttggggaagatctgagagctctggcctcttcgtgagtggaacataaagccgcctcttgttgggagatcctaccccagtgacagaggaatcccccaaactaggctgtgccctggctccgtggcggctccagacccgggtagtgcctttgtcccctgaatactcactcccccggtccagagggccttcccactgcccagcctggagaaggcctcccctgacctgctctctcagtatcctggagagctggccagaggccatcacaggcatcatcctcagagctcctcagacctgggactttgtttttgctggttcagtgcattttgtgtatttaagagnnnnnnnnnnnnnnnnnnnnnnnnnnnnnnnnnnnnnnnnnnnnnnnnnnnnnnnnnnnnnnnnnnnnnnnnnnnnnnnnnnnnnnnnnnnnnnnnnnnnnnnnnnnnnnnnnnnnnnnnnnnnnnnnnnnnnnnnnnnnnnnnnnnnnnnnnnnnnnnnnnnnnnnnnnnnnnnnctgcactgcctgtgctgaaattagtgaccacccagtgggctccaggctccgctaggtaacttcgttttcccagcagtggagtgggcaccaccttggtggggcagtgcccctgtgcccagggcacacctcattcccagttctatagcaattcaccaagaacaaagtctgcagttagagccaaagctggtggtggccagagggtgctgaagatacaggccagtggggatgggagccatgagccccgaatgtcttctgctctgatgctccccggactaagcctccctggcacactgggagtgaggggcagcctgagcaagtaggggaactcagaccacaggccagcagatttcccagcagtccatcactggccaccgtgtagccagattctgttccgtccacactggggtgaagagtacttggaatgtctgccatcctgtatgatcaccccaccccctgtccatccatcagtagataataagggttggttacaattcataagagaatagttaaaacacttctcctctcatgcctaccatggtgctgtatcaaggggatttgttcacatatgggctcagcaacgcacaagtgaggtcagccatggcactaggtcatttccattttagccaaggtgcctctataggggtcagacatcatgtgcccagacctaaggtcaggaatgtcatatttttctgttaaaatcattttatttctgtgtatcttacctttaaatcattgtggtttactctgagattctgtagtcctaatattgtatcattgtgctgtctgcaaaacaacttgaatctattttgtttgcatcttttgttacatgtaacgcagctgtactttatgttctttgcaactgtttccattatgagaacgctgtgctatttacaaggttacatttttcttggccaggcgaggtggtcatgcctgtaatcccagcactttggaggccaggtgggcggatcac

SEQ ID NO: 5434 - protein, 314 aa, Homo sapien
MGLFCQDCHHLGIQNNFDYKRFIKFARVCEVDNELRICARDKEVGNLYDMFHTRNSLHRRAYQHKVGNIIDTMITDAFLKADDYIEITGAGGKKYRISTAIDDMEAYTKLTDNIFLEILYSTDPKLKDAREILKQIEYRNLFKYVGETQPTGQIKIKREDYESLPKEVASAKPKVLLDVKLKAEDFIVDVINMDYGMQEKNPIDHVSFYCKTAPNRAIRITKNQVSQLLPEKFAEQLIRVYCKKVDRKSLYAARQYFVQWCADRNFTKPQDGDVIAPLITPQKKEWNDSTSVQNPTRLREASKSRVQLFKDDPM

SEQ ID NO: 5435 - DNA, 2492 bp, Homo sapien
caaagatggaatacgtctgaatcttattttgatacgatacactggagacaattcaccctattccccaactataatttattttcatgggaatgcaggcaacataggtcacaggttgccaaatgcattacttatgttggttaacctcaaagttaaccttttgctggttgattatcgaggatatggaaaaagtgaaggagaagcaagtgaagaaggactctacttagattctgaagctgtgttagactacgtgatgactagacctgaccttgataaaacaaaaatttttctttttggccgttccttgggtggagcagtggctattcatttggcttctgaaaattcacataggatttcagccattatggtggagaacacatttttaagcataccacatatggccagcactttattttcattctttccgatgcgttaccttcctttatggtgctacaaaaataaatttttgtcctacagaaaaatctctcagtgtagaatgccttcacttttcatctctggactctcagatcaattaattccaccagtaatgatgaaacaactttatgaactctccccatctcggactaagagattagccatttttccagatgggactcacaatgacacatggcagtgccaaggctatttcactgcacttgaacagttcatcaaagaagtcgtaaagagccattctcctgaagaaatggcaaaaacttcatctaatgtaacaattatataatgtttccctttttgattattgcattgtattttaatttgtgcagaatgataaagaatgttccttttagaagtgtgttatgtctgtacctgtctgaagagtgacattaaactttgaaaggacttcactgctcctttacgatattccaaatagttttttacattggaaaaactaattcttgggattctttcatacattttcatcaaaactttcagtgtgattatgtattcatatcttcagtttaatatgtcagtataatagatattgttcaaaagtttcttgttgctaaagtggtgtaatctgttacacagatgaatagctagatgtggaaagagatatgtaaacaagaaacctttgggtattgtttcttaagtaaatattgggacaatcatggtaagcaaacttagttctgtaactgcatttttcaccttaaaagttaaatgaaatgcatgatggtattttattccttgaattatgcaatgcaacattttacatgtaaatagcactggtcatatactgatgtatatggttatctgggttatatctatttttatgtaaactctattttgtttttggcaagaagtgaaattgagacttatgtgcaggttgccattgaattttgctctggtgaatgctgagatccagctttttcttacaaataaatgggaccctgttttccaatacaaatgtaccgtgtttttgttaggtacagtctggatcatggcatgtagaaatagaaatttagaattttactgcagctttgatgtgcatatttgaactttttaacatttgtaactttggtggcaaagagaattttagcttctatcgattttgtaagtcttcagctgaaccactaatagcagtcatagtgaagattagcactacttagaattaaattaggaagtcttttatcattgcaggattgtacatactactttataaaaattctcacctttgattttaaatcccagtacctagttatatctaacctatcaaaggcaagatatcatttattggacttcttgaaaataaaagttacaaaatccaacaacaacaacaacaaaacaatgttcttggttttaatgttccagttgctgtgaaatagaactcctacaatcaaaagacagttttaggaagtcttatttattgattttaaaagttttacatgtaggagtgtgggaatgaaggaattctggagctttttgacacaaaacctattaccacatttagcagttaaatggctataggtgggaagtaggatttagatgtatagaaaagtaagaaaatcttacttagaaaaaagccccttgaaacttgcaggatttacttaataaaaatacacgctatgagtcataattgtgccaagttgtttcatgcagtcctcaaaaattagatgtaattgagctttgtgtaatattatgtcagctttaacatataatattttgaatattttagctatatttagtggctttctgcaagcaactagaacagagaagtaatgggtcaataatcttgaccttaatttaaaactttcaatggagatagggctagaaatacttttgccaaatagcattcttattcactttatgccggtatttagaaaaaataaattatagcaagtatgatttctaagaatgtttttctataaattactaattgtaaaaagtcttgctttttaaaacaagttggtaatgcatatcatggaaggcatattttgtatgtataaattcaccacaattaaagattattcttgtcagtc

SEQ ID NO: 5436 - protein, 201 aa, Homo sapien
MLVNLKVNLLLVDYRGYGKSEGEASEEGLYLDSEAVLDYVMTRPDLDKTKIFLFGRSLGGAVAIHLASENSHRISAIMVENTFLSIPHMASTLFSFFPMRYLPLWCYKNKFLSYRKISQCRMPSLFISGLSDQLIPPVMMKQLYELSPSRTKRLAIFPDGTHNDTWQCQGYFTALEQFIKEVVKSHSPEEMAKTSSNVTII

SEQ ID NO: 5437 - DNA, 1941 bp, Homo sapien
gcagaagcttcactgagcgggcactggaggtcgcgagcacgttgctagtgggcgcggctggcggggccgggggcggcagggggctagcgtccggctgagcccggcgggttcctgcacgcggacccacgctttgtcgggctgctctgctgagtgacaccgccgtggcatccgaggagctgtggtccagcctgcgcggcgggaagcggcggcggcggctccagcgtcctaagagagtctcactctgtctcccaggctgcaacatccacctcccaggttcaagtgattcttgtgcctcagcctctccagtagctgggattacaggtgtgtgccagcatgcctggccaattgttggattgtatgaagctgaaacctatcaacactcttcaaaatgcaatggaatgtaccacggactgtatctcgactggcacgcaggacatgcttggaaccacataatgctggtctctttggacactgtcaaaatgtaaagggacctttacttttatacaatgctgaatccaaagtggttttggtacgaggccctcaaaaacaatggttgcatttatctgctgcccagtgtgttgcaaaggaaaggaggccattggatgctcatccaccccaaccaggagtccttcgccataagcaagggaagcaacatgtttcattcaggagggttttttcatccagtgccacagctcagggaactccggaaaaaaaggaagagcctgatcctttgcaagacaaatctattagtctttatcaacgattcaagaagacatttagacagtatggaaaagttctgattccagtgcatctaataacttctggtgtttggtttggaacattttattatgcagccttgaaaggagtgaatgtcgttccttttctagaactcattgggttacctgacagtgtggtaagcatcctgaaaaactcccagagtggaaatgccctcacagcatatgccttgtttaagattgcaacacctgctcggtataccgtgactttgggaggaacatctgtcactgtgaagtatctgcgcagtcatggctacatgtccacgccgccacccgtcaaggagtatctgcaggacaggatggaagagacaaaggagcttatcacagagaaaatggaagaaacaaaagatagactcactgaaaagttacaagaaaccaaagaaaaagtttcctttaagaaaaaagtggaataaggtgccttatatagcagtatagaaaattcctgcactttaaccctttggaaactatgggcaaagatacatgtgtctgattatttttttggttagttgccgaaatatactagttctctgagggttaaagaagtaaaatacctttttaaagttaaatatcactagaaaaatcagtgttattacaagggaagaaatgaacccagtttaagaatttgccatcagtagcagtattaagcagtggttaatgtcttagaagtcagacttctttttcaaggtcttcagaaccacacttgatttctgttttgttgcagctgtaattgacacacactaggcagctgactccttgaatatccagtgtgacccataaaatagtctgttaataccggatcttaatttttatgttattcattaagattttaactatattcagtacgtaatttggagacaaactagcatcatcaaaactgcctgtaaataaggtgtttagtctttctataaaaacagaatagagcagttacctaccagttaaaatatcttatatgaagaaaatagaataaagatccagtcatatatgtaaataagatgtactgattgtacgtaaatgaaaaatggaccctttaaaaattatttttacctgaagcttgtcataatttttttaaagcaaatatatatatggtgatggtacttttcaaagtgtgtattagtggtgatcacctcaaacataaacctctgttgtg

SEQ ID NO: 5438 - protein, 272 aa, Homo sapien
MQWNVPRTVSRLARRTCLEPHNAGLFGHCQNVKGPLLLYNAESKVVLVRGPQKQWLHLSAAQCVAKERRPLDAHPPQPGVLRHKQGKQHVSFRRVFSSSATAQGTPEKKEEPDPLQDKSISLYQRFKKTFRQYGKVLIPVHLITSGVWFGTFYYAALKGVNVVPFLELIGLPDSVVSILKNSQSGNALTAYALFKIATPARYTVTLGGTSVTVKYLRSHGYMSTPPPVKEYLQDRMEETKELITEKMEETKDRLTEKLQETKEKVSFKKKVE

SEQ ID NO: 5439 - DNA, 2942 bp, Homo sapien
cccgaagttgtgtggattgtcacattgcactaaggcataaccaagtgctgtgaatcctgggaatgccttcgaataacaatccactcgtgttcagcaccagagaatccacagcagagaaagcccttatgaatgcagcaaatgtggaatcttcttcgacttacgccgctgacctcactcaacaccagaaagttcacaatagaggaaaaccgtatgagtgctgtgaatgtggaaaattcttcagccagcactccagccttgttaaacatcgcagggttcacaccggtgaaagccctcacgtgtgtggtgactgtgggaaattcttcagccgaagctccaacctcattcagcataagagggttcacactggtgaaaagccatatgagtgcagcgactgtgggaagttcttcagccagcgttccaacctcattcatcataagagggttcatacgggcagaagtgcccatgagtgcagtgaatgtgggaaatctttcaactgcaactccagcctaattaaacattggagagttcacactggagaaagaccttacaagtgtaacgaatgtgggaaattcttcagccacattgccagcctcattcaacatcagatagttcacactggcgagcggcctcacgggtgtggtgagtgtgggaaagccttcagccgaagctctgacctcatgaaacatcagcgagttcacactggtgagcggccttatgaatgcaatgaatgtgggaagttatttagccagagctccagcctcaatagccatcggagacttcacactggtgaacggccttaccagtgcagtgaatgtgggaaattctttaaccaaagctccagcctcaataaccaccggagacttcacaccggcgagcggccttatgagtgcagcgaatgtgggaaaaccttcaggcagaggtccaatctgaggcagcacctgaaagttcacaaaccagataggccttacgaatgcagcgaatgtgggaaagccttcaaccaaaggcctaccctcattcggcatcagaagattcacatcagagaaaggagcatggagaatgtgctccttccctgttcacagcacacaccagagataagctctgagaacagaccttatcagggcgctgtcaactacaagttgaaacttgttcatccaagtacccaccctggggaggttccctaggaatgctagctgtgttggaagctttctggagacaagttacattctcttactgtagagtttatcagcgttttttcactgctggggttgtgatagaagccatgtcagcaccacacactgcagctctccaaagagtgtgtccaccactccactgtgctcagggaaggcagacctctcctctctctttccaatccctaaagggaattaggagtagtctgaagccttgggaagatgtcattcccgccctgtatggctggtttagccatggacatgaccagcttttggctgtgaagacctgagcagggttttgccaacagcttgttctagagaaggtttccctttttctgggacattgttggtctcatgttatgcctgtgaaggatttgtccagccttcatgttactctacacaacaacttatctcctgtgtattgccctggttcatgtgatgataatggccttatgataaagccgcctttagtcttccatgttctgatcactgtgtggggtggttcaagagcagagttaagatctaccaaactgaaggggtctccagattatcttggaggggacaggaggatggcagagaaacaactgtcaatccagatttgacctcatttgcattgccaccaaggcctcctaggaaaaattgtaggaatttatgggtataatattgtggtctgaatggcgtgaatttttatcccgaggagggggcagttgtgacaacctccagtgcatgtgggaacagcatgaattgggtcccttattcccagggggtgccccatattccccaatactgtaaagcagatgctgtttagcacctgccaaggagccatatgccctgaagttcagcattaggcaggtatctcttaactgtaagacataccaggcccagctgggaccataatttgtacagaaacactggatgtgattaatagggagtaggcgagattatagcaaaccagcagaaatggaactctgctaaatgtgcatccgtgaatgctcccttgaatgtggctgtgcaggattccagggtttgcagaaattctcaggacctcagacctctgtcctatgactaatgttactggcagagcaaataatcctaaaggttttggttttgtggattaccatcctccgtgctgtgcatctgaaggcccagtgctgtgctggcaggaaaatagggactgagaaaaagcagatcctatactatagggactgtagtatctatgacgtagccagccattctttgctcccaaggcaagaagaaagagatgacagagtcaatatagggttgccaaatcggattttctaaaatgagtaggaagttggatttttatgtgcaacagtttcttttaatgctttgttgatatgtgattgtcatgcaataattattcatatttggtaagttttgtacatatattatgtacactcagggaaccaataccataatcatgataatgaacgtatccatcacctgcaaagctacctcatgcccctttacattccctccttgccttccctaggaaaccgttgatttacattttttactttagatttgtttgccttttctagaattaacacaattggaatcataaagtatttatactctcttttggtctggtttctttcatgcagcataattatcttgagaatcatccatgctgtgtgtatatatagttcattccttttactactgagtagtgctatactgggtgagtgcaccatagttttttatggttcatttaaaaatgttaaaaaaatctga

SEQ ID NO: 5440 - protein, 392 aa, Homo sapien
  unsure 17: unknown amino acid
RSCVDCHIALRHNQVLXILGMPSNNNPLVFSTRESTAEKALMNAANVESSSTYAADLTQHQKVHNRGKPYECCECGKFFSQHSSLVKHRRVHTGESPHVCGDCGKFFSRSSNLIQHKRVHTGEKPYECSDCGKFFSQRSNLIHHKRVHTGRSAHECSECGKSFNCNSSLIKHWRVHTGERPYKCNECGKFFSHIASLIQHQIVHTGERPHGCGECGKAFSRSSDLMKHQRVHTGERPYECNECGKLFSQSSSLNSHRRLHTGERPYQCSECGKFFNQSSSLNNHRRLHTGERPYECSECGKTFRQRSNLRQHLKVHKPDRPYECSECGKAFNQRPTLIRHQKIHIRERSMENVLLPCSQHTPEISSENRPYQGAVNYKLKLVHPSTHPGEVP

SEQ ID NO: 5441 - DNA, 650 bp, Homo sapien
ctatctgaaatgcagagattaagccaaatacctgatgtattgtgaaagccactgattttaagaatggagagaaagggattttttactgcatccctctgtatgaatatgaaatcagagaccagggcatgatgttgctaggattagagcctctcagtctggcctcttcacccaagtgcaagaactcagtctcttactgttcaaagaaagaatcttaacagttgaattatggagggaaattcccttttgccccaagcgtttctatatttaaagcaatatcccaggagaatatgtcagacttaggatgataccttcagccacttgaagaagaaatagaaggcgctcattccaatatagtctttatttcccattcagatacaggttgagcatccctaatctgaacagttaaaacccccaaatgccccaaaatccaaaccttcctgaacgctatgacaccatgagtggaaaattccacacctaacaaacacatttgctttcttatggttcaatgtacacaaactgttttatatagaaaatgatttcaaatatcataaaattaccttcaggctatgtgcataaagtatatatgagccataaatgaattttgtgtttagactttgtgtccatccccaagatctctcattatatatata

SEQ ID NO: 5442 - protein, 17 aa, Homo sapien
MNFVFRLCVHPQDLSLY

SEQ ID NO: 5443 - DNA, 2034 bp, Homo sapien
gaatttccagcaggcaaggcagtggccgctttgactgcttgcttcggagatccgagacgacggagaaggcactcttatttaccgaccaagaaagctcctcccccgtcctccgttagctaattaaaacatttttcagggacgtagccatccagagacattccattattgttccattgacctttccctcatcactgagtcctttggagctgagttatgtcaacagctgccttaattactttggtcagaagtggtgggaaccaggtgagaaggagagtgctgctaagctcccgcctgctgcaggacgacaggcgggtgacacccacgtgccacagctccacttcagagcctaggtgttctcggtttgacccagatggtagtgggagtccagctacctgggacaattttgggatctgggataaccgcattgatgagccaattctgctgccacccagcattaagtatggcaagccaattcccaaaatcagcttggaaaatgtggggtgcgcctcacagattggcaaacggaaagagaatgaagatcggtttgacttcgctcagctgacagatgaggtcctgtactttgcagtgtatgatggacacggtggacctgcagcagctgatttctgtcatacccacatggagaaatgtattatggatttgcttcctaaggagaagaacttggaaactctgttgaccttggcttttctagaaatagataaagccttttcgagtcatgcccgcctgtctgctgatgcaactcttctgacctctgggactactgcaacagtagccctattgcgagatggtattgaactggttgtagccagtgttggggacagccgggctattttgtgtagaaaaggaaaacccatgaagctgaccattgaccatactccagaaagaaaagatgaaaaagaaaggatcaagaaatgtggtggttttgtagcttggaatagtttggggcagcctcacgtaaatggcaggcttgcaatgacaagaagtgttggagatttggaccttaagaccagtggtgtcatagcagaacctgaaactaagaggattaagttacatcatgctgatgacagcttcctggtcctcaccacagatggaattaacttcatggtgaatagtcaagagatttgtgactttgtcaatcagtgccatgatcccaacgaagcagcccatgcggtgactgaacaggcaatacagtacggtactgaggataacagtactgcagtagtagtgccttttggtgcctggggaaaatataagaactctgaaatcaacttctcattcagcagaagctttgcctccagtggacgatgggcctgattaccagctgggacttagagtttctgtgcaacagtttttcactgagcatgtcaagaaactgataagatcaaaaaggtctcctaactcactagatcagcgcacaagtcagtgtaaaccacttagatagtagttttttcataaatgctcatcatatttatgttccgctgtacatgttcagtataaatatatgtgtagtgaagctactgtgagtctttaaatggaaagagcaaatgagaagtggtttggatacacttgatgagagatgagagtgtcacattaataatttttaagactcttaggcagctatgggtttcttttgatcatttttgttctttattcatttgaacacgtttttgaagttcttcaaaactagtcagtttgaattttgacagctattcaatatgtgatctccaagtttaaaaaaatttttttccagacttccctaatcctaaaatgcgagtttttatttttaataactgtaccaaggaataagtatgaaaacagttctctgttaccatattttgtattctggaccacttactggtgaaagcaaccatgcaaaagaaattaatttggccaggcacagtggctcatgcctgtaatcccagcactttgggaggccgaggtgggtggatcatctgaggtcgggaattcgggaccggcctggccaacgtggtggggccctgtctctagtaaaaatcc

SEQ ID NO: 5444 - protein, 372 aa, Homo sapien [sequence omitted]

SEQ ID NO: 5445 - DNA, 3440 bp, Homo sapien
  Unsure 2395-2530: Unknown base
gaaaaatgaaacgtctttgtggtccggggctgagacccacgaggagactgggcgggatttctggcgttaggaggcggggcctttcggctttgggcgcgagtggttaaaagacagttggtgtcggttcggcttctcgggtcggattccgcggtcccaacccttccccatggccgaccctgaggagttgcaggtttcttcgccgcccccgccgcctccctcttctccctcctcttcagacgcctctgcagcatcttccccgggcggcccagtgagtttgggctggccagttccgagcaggagcagcggcccaacggtggaccagctggaggaagtggagctgcagatcggagacgcagccttttcattaaccaaacttcttgaagccacatctgcagtatcagctcaagtggaagaacttgccttcaaatgtacagaaaatgcacgtttccttaaaacgtggcgggacctcttgaaagaaggctatgattctttgaaacctgatgactgatttggcatacttcgttgtttaataatgactgcaataattcatacttcttatgtcatattttgtacatgtaccacacatataggatgacctctgtccagcagttctgtatatactcagaatgaaatttttcttggttttcttggtttttgtgaaagcagaataccgatgctatttttgttgcggaccagtacttgtttgtccttaaatactttatgcctctgaactttcatagaatcctttatgaaagttaacttcatcaatagacggttaatattaatagagccacagtgctaccagtagcaaactaggtagaccattatttgttttgcaacaagatgctaagcatggcagactttgaagttgcgtttcatcttaaggaccaagggaggtaactttaaggttgccagtggtggatccagctccgttaggctaagttgtctacagctaatgattgtgtctttattctatatccccagcacctaaaacagggtcacacaacattcactaaatgtttgttgaataaaagagttaacaaacataattgaaagctttttttcttcctatatttagcatgaagactgtcattgtttctctaggaaatgtatgaatctgaacttttttgacttgaagaaaaacattctttttttacagagatttggactttgatgataggttttaaaaatatatgataaatattttttgtacttgtttgattttttttttaaagactttacttcagaaagggaaagactgtttagaaagaatgcatattttttccctatttatttctgtggttactgcttttgcagtttaacagtgtttgtatttgatatttgtatatgtttgattgctatctttaaagtgccttatcagatttatggctctgtgctattactttttgagctttgcaagttgtgtacataataattctaaagaagttactttgtttgcaatgcatcaaatttaaatgatgtgattttttttgtattatttgatcttagtgacagtgttctattttgcatcctgtatcttatgttgcttttggtgttttgtgttgtgtgtcaacgattaagccaactaattctctaccatatataacttctggacatttttgatacaacatcttaattctttgtagatatggagataggtacagaactatattctaatgccccacaatggggctatgagaggggacagatggatgggcaaagaatagttttgtttaacatattaggtcatagttcttgattagtttttttagttaaagataaacacatagggtgtgatttctataccaaagatatgcttatttcagtattagaaaaatattcttcttacatctcctgaaaattgcaatttttaaaatgtgtaaaaataaattattattaaaagcacattttatttccatttgtttggattcattaccttaaaactttattgacatatttcaaagatataggaaaggtaaatgatttcaagaaaatccgtgtatttctaccatgcagatgtaataaatgttagcatttggctatattttcttcagacacacatatgcatgtaattgcaaatgttagatacatttgaagtttgctttgttacctgtttgatcctgtcccgttcctccctccccagagtccccagaggtaaccactagagggggcataatatagcatgtgtttttatatttttaatacaaatatattttttaaaagcgctacaaaatattgttttatatatgtggtagccagcttccagatggccccagtgatccctggcctcctggtgttcatgccccagtatagccttctcctgcattttacagtgctgacttttgtaactaccaggatattgagcaaatgcagtgtgtgatttctgaggccatannnnnnnnnnnnnnnnnnnnnnnnnnnnnnnnnnnnnnnnnnnnnnnnnnnnnnnnnnnnnnnnnnnnnnnnnnnnnnnnnnnnnnnnnnnnnnnnnnnnnnnnnnnnnnnnnnnnnnnnnnnnnnnnnnnnnnnnaagcactgggattacaggcatttttgctcatttttctatgttgttttttttacttgtcagtttttagatattacatattttgaatactaatgatctgttatgtatgttccaattatcttttttagtctggtttgtcttcatattttggttatgaaatcttgaatttttaaaaacgtaattttaccaatctttcataatgatttgctttttctggtttttgtataggaaatgtcataaaaatagtcctattcagccttccaaaagttacaaaatttttggttttaacatttagatgtttagtccaactgaaattgttttcttttatggcatgattttggaatcttgttttaattatttttacatatttatagctgttcctccaagtatcaatttttcaagtgcaacatctgtcatgcagttactatgtaagggccagattctgacctttctgttctttttatctgaaggaaatttgaacatgccacccccaaatatgccgatttggcatactgattatttcgagctaaaggtgcttgactaacagtagttgcagaaatggctattttaactgtcctttcctacctgtagcaagccatacaaacttctttgataaagatgctttcctgataccaagatgagaagatggctctaatcagctgagacagcaccagaggaatctacaaacaagaaactattagtttcttaacatatatttaccttccacagtttctgcctctggaagcctaaaactgctttccttcgtcttgtcacacttctctgaaatgtattctttgtggaagatgctatatagtccagagttgtaagccactacttgtgtttaccttttcattgagttttctcctgtgtgatgtacgttgcatatattaataaaattacttgtttttctctt

SEQ ID NO: 5446 - protein, 34 aa, Homo sapien
KMKRLCGPGLRPTRRLGGISGVRRRGLSALGASG

SEQ ID NO: 5447 - DNA, 1982 bp, Homo sapien
ctaaccgaggcagcagcggacgtgagcgataatggcggatatggaggatctcttcgggagcgacgccgacagcgaagctgagcgtaaagattctgattctggatctgactcagattctgatcaagagaatgctgcctctggcagtaatgcctctggaagtgaaagtgatcaggatgaaagaggtgattcaggacaaccaagtaataaggaactgtttggagatgacagtgaggacgagggagcttcacatcatagtggtagtgataatcactctgaaagatcagacaatagatcagaagcttctgagcgttctgaccatgaggacaatgacccctcagatgtagatcagcacagtggatcagaagcccctaatgatgatgaagacgaaggtcatagatcggatggagggagccatcattcagaagcagaaggttctgaaaaagcacattcagatgatgaaaaatggggcagagaagataaaagtgaccagtcagatgatgaaaagatacaaaattctgatgatgaggagagggcacaaggatctgatgaagataagctgcagaattctgacgatgatgagaaaatgcagaacacagatgatgaggagaggcctcagctttccgatgatgagagacaacagctatctgaggaggaaaaggctaattctgatgatgaacggccggtagcttctgataatgatgatgagaaacagaattctgatgatgaagaacaaccacagctgtctgatgaagagaaaatgcaaaattctgatgatgaaaggccacaggcctcagatgaagaacacaggcattcagatgatgaagaggaacaggatcataaatcagaatctgcaagaggcagtgatagtgaagatgaagttttacgaatgaaacgcaagaatgcgattgcatctgattcagaagcggatagtgacactgaggtgccaaaagataatagtggaaccatggatttatttggaggtgcagatgatatctcttcagggagtgatggagaagacaaaccacctactccaggacagcctgttgatgaaaatggattgcctcaggatcaacaggaagaggagccaattcctgagaccagaatagaagtagaaatacccaaagtaaacactgatttaggaaacgacttatattttgttaaactgcccaactttctcagtgtagagcccagcatgtccctgcatttaggcaatgaagtgtttgatgtgtacaaagccccactgcagggcgaccacaatcatcttttttataagacaaggtactggtctacagggacaagcagtctttaaaacgaaactcaccttcagacctcactctacggacagtgccacacatagaaagatgactctgtcacttgcagataggtgttcaaagacacagaagattagaatcttgccaatggctggtcgtgatcctgaatgccaacgcacagaaatgattaagaaagaagaagaacgtttgagggcttccatacgtagggaatctcagcagcgccgaatgagagagaaacagcaccagcgggggctgagcgccagttacctggaacctgatcgatacgatgaggaggaggaaggcgaggagtccatcagcttggctgccattaaaaaccgatataaagggggcattcgagaggaacgagccagaatctattcatcagacagtgatgagggatcagaagaagataaagctcaaagattactcaaagcaaagaaacttaccagtgatgaggaaggtgaaccttccggaaagagaaaagcagaagatgatgataaagcaaataaaaagcataagaagtatgtgatcagcgatgaagaggaagaagatgatgattgaagtatgaaatatgaaaacattttatatattttattgtacagttataaatatgtaaacatgagttattttgattgaaatgaatcgatttgcttttgtgtaattttaattgtaataaaacaatttaaaagc

SEQ ID NO: 5448 - protein, 425 aa, Homo sapien
MADMEDLFGSDADSEAERKDSDSGSDSDSDQENAASGSNASGSESDQDERGDSGQPSNKELFGDDSEDEGASHHSGSDNHSERSDNRSEASERSDHEDNDPSDVDQHSGSEAPNDDEDEGHRSDGGSHHSEAEGSEKAHSDDEKWGREDKSDQSDDEKIQNSDDEERAQGSDEDKLQNSDDDEKMQNTDDEERPQLSDDERQQLSEEEKANSDDERPVASDNDDEKQNSDDEEQPQLSDEEKMQNSDDERPQASDEEHRHSDDEEEQDHKSESARGSDSEDEVLRMKRKNAIASDSEADSDTEVPKDNSGTMDLFGGADDISSGSDGEDKPPTPGQPVDENGLPQDQQEEEPIPETRIEVEIPKVNTDLGNDLYFVKLPNFLSVEPSMSLHLGNEVFDVYKAPLQGDHNHLFYKTRYWSTGTSSL

SEQ ID NO: 5449 - DNA, 853 bp, Homo sapien
ccgccagctccttcggcaatgaacttctccaccagcagcagcagcttcgcctacgaccgggagttcctccgcaccctgcccggcttcctcatcgtggccgagatcgttctggggctgctggtatggacgcttattgctggaactgagtacttccgggtccccgcatttggctgggtcatgtttgtagctgtattttactgggtcctcaccgtcttcttcctcattatctacataacaatgacctacaccaggattccccaggtgccctggacaacagtgggcctgtgctttaacggcagtgccttcgtcttgtacctctctgccgctgttgtagatgcatcttccgtctcccctgagagggacagtcacaacttcaacagctgggcggcctcatcgttctttgccttcctggtcaacatctgctacgctggaaatacatatttcagttttatagcatggagatccaggaccatacagtgatttaccattttgataattaaaaggaaaaaaaaaggaagactctcactgtaaaaacagctgtaggtataatgtatattcccagagaattgtatttaactaattaatgttttttatattcttaaatttgctcacaaattgtggtttgttacaattaaactggatacttatttgcaaagtgttgtagcttataatgaactcttaagtatcttattaatgtattaatgtcttcatagatcatattttcttagacaatgtttaaatagataaattgctaatattgagaatgtgtcaagtttgtaaacctaacttttaagatgccagattcttttttgattaaatgttgcaaaatcccaaaaaaaaaaaaaaaaaaaaa

SEQ ID NO: 5450 - protein, 153 aa, Homo sapien
MNFSTSSSSFAYDREFLRTLPGFLIVAEIVLGLLVWTLIAGTEYFRVPAFGWVMFVAVFYWVLTVFFLIIYITMTYTRIPQVPWTTVGLCFNGSAFVLYLSAAVVDASSVSPERDSHNFNSWAASSFFAFLVNICYAGNTYFSFIAWRSRTIQ

SEQ ID NO: 5451 - DNA, 5419 bp, Homo sapien
ctccctctcctatcggagcacaatgaaagcctgtgtatcgccgtgactccgggcgggagccagtgtcagcaaagcggctaacaacagacgagaaagagaaaggaaaatacaagctactttttttttccatctataaagcggagcaaatacaggagatagaaccagattgcttattgcgagtccagaccctcagatccactggccggggatggaatgtacaaaagtggacagaaaagtggctggacatgactcggtgcaatttgctggaagtttgtaagtttgaccatcgtttgtaaattactctcggaagagtttgtctctcttgatactgtattagaatagagccgggggtgaggaatagaaacgtaagcgggaaagaaaaaaatgtgttgaaggatctctctcagtggctagcgacttaagattgcttttcatttaaggctaggaaaccttagagggagtgaggattttaccggtgattggattagctgaagaaaaaagcatggtccaaaagtccaattactgacattgttaacagttgaaaagctgtctccctcttttgggagaagacaacatcctacagtaccccaaagaggagaaaacaccggagcgaaaggaaagggaggaaaaattaaaagccaaaagacagtctcccttgatttttgcacattttgaacagtgacttaaacatcttctgaaacagcactgttttgttttgttttggttttttatttaacctgaggaaaagtcaaggctgctggttacatagacatggtagaaatgtgtttctctgcagaaacatccccataaagaattgtcggaaacaactaggtgagggggagtcctctctattaatacctctctcaataccttttgctgtgtgtttctgtctcttgctggacaatccctgaattcttgatctaacccccagatcgtgtgtttacaaagtacctagtggctcttgtcagcttggtggaggaaaaaaaatccaccaactctgtccaacttctccagagctgtcaaatgcaattagagtaagttaatcagggtttgtttccaacttatcctccccccagttggtttctattctttctccccaccctctttttactaactcccctcccccacaacttctccacggctcccccacaacctctgaagacctctattcatgtggccctgaacactgagctcacattgtcaaaaacagacttgcctgcaatagccagcagtagcctctttccacctcaccatcccagaggcagcaatcattgtgtccggtaagatgggggacacagcgcccccgcaggcccccgcaggagggctagggggggcctctggggcggggctccttggagggggctcagtcaccccgagagtgcacagtgctatcgtggagcgcctccgggctcggatcgctgtctgccgccaacaccacctgagctgtgaaggacgatatgaacgaggtagggccgagagctcagaccgggaaagagaaagcaccttgcagctcctgagccttgtacagcatggccagggggcaaggaaagctggcaaacacaccaaggccaccgccactgctgccaccactacagcccctccaccgccccctgctgcccctcctgcggcctcccaagcagcagcaacagcagccccaccgcccccaccagactatcaccatcaccaccagcagcacctgctgaacagtagcaataatggtggcagtggtgggataaacggagagcagcagccgcccgcttcaaccccaggggaccagaggaactcagccctgattgcgctccagggttccttgaaaagaaaacaggtagttaacctatctcctgccaacagcaagcgacccaatggctttgtggacaactcatttcttgatatcaaaagaattcgtgttggggagaatctctctgcaggacaaggtggcctccaaataaacaatggacaaagtcagattatgtcagggaccttgcctatgagccaagcacccctgcgaaagactaacactctgccatcccatacacattctcctggcaatggcctgtttaacatgggcttaaaggaggtaaagaaggagccaggagagactctgtcttgcagtaagcacatggatggccaaatgacccaagagaatatttttcctaataggtacggagacgaccctggagaacaactgatggatcctgagctgcaggaactgttcaatgaactgaccaacatatctgtgcctcccatgagtgaccttgaactggagaacatgatcaatgccaccataaagcaggatgacccatttaacattgacttgggtcagcaaagccagaggagcacacctaggccctccttacccatggagaaaatagtgatcaaaagtgaatactcaccgggcttgactcagggcccctcaggctctcctcagctgaggcccccatcagctggccccgcattctccatggccaactctgccctctccacttcgtctccaatcccttcagtccctcagagccaggctcagcctcagacaggctccggagcaagccgggccttgccaagctggcaggaagtatcccatgcccagcagctcaaacagatagctgctaatcgtcagcagcatgcccggatgcagcagcaccagcagcagcaccagcctaccaactggtcagccttgccctcctctgctggaccatcaccaggtccatttgggcaggagaaaatccccagcccttcttttggtcagcagacattcagcccacagagctcccccatgcctggggtagctggcggcagcggccagtcgaaagtaatggctaactacatgtacaaggccggcccctcagcccagggtgggcacctagatgtcctcatgcagcaaaagcctcaggatctcagtcgaagttttattaacaacccgcacccagccatggagccccgtcagggcaacaccaagcctttgtttcattttaactcagatcaagcgaaccagcagatgccttctgttttgccttcccagaacaagccttctctcctacactacacccaacagcaacagcagcaacagcagcagcagcagcagcagcagcagcagcaacagcagcagcagcagcaacagcaacagcaacagcaacagcagagttcaatttcagctcaacaacagcaacagcagcagagctcaatttcagcccaacagcagcagcagcagcaacaacagcagcagcagcagcaacaacaacagcaacaacagcagcagcagcagcagcaacaaccatcttctcagcctgcccaatctctaccaagccagcctttgctaaggtcacctttgccacttcagcaaaagctcctacttcagcaaatgcagaatcagcccattgcaggaatgggataccaagtctcccaacaacagagacaggatcaacactctgtggtaggccagaacacaggccccagtccaagtcctaacccctgctcaaatccaaacactggaagtggttacatgaactcccagcaatcactgttgaatcagcaattgatgggaaagaagcagactctacagaggcagatcatggagcagaaacagcaacttcttctccagcagcagatgctggctgacgcggagaaaattgctccacaagatcagataaaccgacatttgtcaaggccacctccagattataaagaccaaagaagaaatgtgggcaatatgcaaccaactgctcagtattctggtggctcatccacaataagcttaaactctaaccaggctttggcaaacccagtttcaacacacaccattttaactcccaattccagcctcctgtctacttctcacgggacaagaatgccatcattatctacagcagttcagaatatggggatgtatggaaatctgccttgtaatcaacctaacacatacagtgtcacttcaggaatgaatcaattgacccaacagagaaacccaaagcaattgttagcaaatcaaaacaaccctatgatgccacggccacctaccttagggccaagtaataataacaatgtagccacttttggagctggatctgttggtaattcacaacaattgagaccaaatttaacccatagtatggcaagcatgccaccacagagaacatcaaacgtaatgatcacatccaacacaactgcaccaaactgggcctctcaagaaggaacaagcaaacagcaagaagccctgacgtctgcaggagtccgcttccccacaggtacacctgcagcctataccccaaatcagtcactgcaacaggcagtaggtagccagcaattttcccagagggcagtggctcctcctaaccagttaacaccagcagtgcaaatgagacccatgaaccaaatgagccaaacactaaatgggcaaaccatgggtcccctcaggggtctgaatctcagacccaatcagctaagcacacagattttgcctaatttgaatcagtcaggaacagggttgaatcagtcgaggacgggcatcaaccagccaccatccctgacgcccagcaattttccttcacccaaccaaagttccagggcttttcaaggaactgaccacagcagtgacttagcttttgacttcctcagccaacaaaatgataacatgggccctgccctaaacagtgatgctgatttcattgattctttattgaagacagagcctggtaatgatgactggatgaaagacatcaatcttgatgaaatcttggggaacaattcctaaagaagaaagggaagacaatttacaaactccaagcactaaaaggcagtatattacagaaactctgtagaggctgaactgttgatgttcaggtggactacatgaagataacatgcttaaaaatggaaagcagaaagtaactgcagtgatgaacattttggtccaaattcttgttttaaatcttacacctgaaagtaaaatattgggatcacttttccctgtctaaactccaggatacagtatccaatttatccaaacagaactgtggtgtcaatgtgtaattaattgtgtaaaatagccttcccaagtttctttttccctggaaaataaaaaaggtaatagaacttgtagtttatttaaaccccatgtcatgaggaggtactagttccaagcaacaaactccttaatttgctctaatagataggtatggtttaatctttccattgtgtcttttcatttaattttcctgaagcttgcaggatagattgaaatgttataggtttgtttggagtaaccaaacagtatgcaaattaagaaaaagccagagaacctagaaaacatccagtggattacagaatttcttccccatattcactcctcacttttacaattttcccacaatcctctacttcagtgggatgctgtgtctagtgattaaacaaaaatatagagctg

SEQ ID NO: 5452 - DNA, 1590 bp, Homo sapien
gtaaagcattgcttgaggttgcccaggtagtttcgccttacacttcttgtcccagtgcaattattagtagagctccctttcactgtcaaatttccggttggggataaattgcattgtcgttttggtttgagataggaagatgaggggaggaaggaggtgaggcggtaaggggcgttctctctcttgggtcccgcgcccaacttccgctggcccaaagaaactataattttgaaccaacagacctctgctggcatctgcgattgcatttttcctgttttaacaacggctgtgctagacgaagtggtgaagcccaaagacttatttttgagctcgctgtaagactgagaaatcacgtagtccttcctgaaaccactaagaggaaaaatgtctgtgacactgcatacagatgtaggtgatattaaaattgaagtcttctgtgagaggacacccaaaacatgtgagatggagtctcgctgtgtcccccaggctggagtacaatggcgcgatctaggctcactgcaacctccgcctcctgggttcaagcaagtcttctgcctcagcctcccgagaactggaagaggaggcaacagtatttggggcaagaagtttgaggatgaatacagtgaatatcttaagcacaatgttagaggtgttgtatctatggctaataatggcccgaacaccaatggatctcagttcttcatcacctatggcaaacagccacatttggacatgaaatacaccgtatttggaaaggtaatagatggtctggaaactctagatgagttggagaagttgccagtaaatgagaagacataccgacctcttaatgatgtacacattaaggacataactattcatgccaacccatttgctcagtagctatgatagacctggacaaataacttgacaaattgctggaacacacttattgtggtttacccggttttaattatgagccagcttgacgtggttgtggccgttgggcgagatgaagctacactgtgaggtggaggtgatcagccggcacttgcccgccttggggcttaggaaccggggcaagggcgtccgagccgtgttgagcctctgtcagcagacttccaggagtcagccgccggtccgagccttcctgctcatctccaccctgaaggacaagcgcgggacccgctatgaggattccatatggctctcatatcattccattccatctctgccaagatttggataccgcaaaaatttgtgtttgtggaagattctgtctgaactctttcattcaaggaactactaccatgaatctgcattctgttgcccacactgtggtcttagtagataatttgggtggtactgaagcacctattatctcttatttctgttctctaggctgttatgttaattcctctgatatgttaaagtaatgggtgagaccagaaaaagaaatttcaataacagatcagtttggggtgcatgtatgattttgcagcgtcaaattggagtaagggaagatttctgtatacttgctggagaggaggaatgtgtatagttactcatttagatgactccaaaacttttattaaaaccaattttagtttt

SEQ ID NO: 5453 - protein, 165 aa, Homo sapien
MSVTLHTDVGDIKIEVFCERTPKTCEMESRCVPQAGVQWRDLGSLQPPPPGFKQVFCLSLPRTGRGGNSIWGKKFEDEYSEYLKHNVRGVVSMANNGPNTNGSQFFITYGKQPHLDMKYTVFGKVIDGLETLDELEKLPVNEKTYRPLNDVHIKDITIHANPFAQ

SEQ ID NO: 5454 - DNA, 1311 bp, Homo sapien
gggggcgcggccggttactcgcttaccggaggcttcagtccccggcggcgcggcgacagctagggttcacggccactggggcagaggagccgcgagaagatgtgggtttttggttacgggtccctgatctggaaggtggatttcccctatcaggacaagctggtcggatacatcaccaactacagcaggcgcttctggcagggcagcacggaccaccgcggggtccccggcaagcctggaagagttgtgactcttgttgaagatcctgcgggatgtgtatggggtgttgcttacagattgccagtaggaaaggaagaagaagtaaaagcataccttgacttcagagaaaaaggaggctacagaaccacaacagtcattttttatccaaaagatcccacaacaaaaccattcagtgtattgctatatattggaacatgtgataatcctgattatcttggtcctgcacctctggaagacattgctgaacaaatttttaatgcagctggtccaagtggaagaaatacagaatatctttttgaacttgcaaattctattaggaaccttgtgccagaagaagcagatgagcatcttttcgctttggaaaaattagtaaaggaacgtttagaagggaaacagaacctcaattgcatataatttagtcttcagagaattaacttcagtgcacaatgacaatatgatttggaaatacgtttacttaaagatcttatttttaatgtagtgaggatattatttaaacttttattttaactggaaatgtcctgaaacacatatttaaaatattgggatacagtgaaagaaaaattcaaattttaataacataaagatttcctaactttatgttattgaacacttactcactagaagtgagttctttagaaaaatacagtgaaggactcagttcagtcttgtttttatcagagtgataatcatcctgtttcacatcccaatactattttgaaattctaaacaattaaaccaaaattccaataaatataaggttatgccttcaatatattcctatacaattctgtaaccatggtttaaaatacacaagcttaaaataacatgcttagaaatacacaataatatgaacagtatttcagccttaattgtgaatttccttgttattcaagtattaaatgaaatcttttgagtttttagccaaaaattggcatttttaaaatacgaaaatttccttggaattataatgtactgtacctcttcttttttaaataaaggcattttactatatggaaaactaaaaaaaaaaaaaaaaaaaaaaaaaaaaaa

SEQ ID NO: 5455 - protein, 184 aa, Homo sapien
MWVFGYGSLIWKVDFPYQDKLVGYITNYSRRFWQGSTDHRGVPGKPGRVVTLVEDPAGCVWGVAYRLPVGKEEEVKAYLDFREKGGYRTTTVIFYPKDPTTKPFSVLLYIGTCDNPDYLGPAPLEDIAEQIFNAAGPSGRNTEYLFELANSIRNLVPEEADEHLFALEKLVKERLEGKQNLNCI

SEQ ID NO: 5456 - DNA, 2374 bp, Homo sapien
gggggattcggccggagctgccagcggggaggctgcagccgcgggttgttacagctgctggagcagcagcggcccccgctcccgggaaccgttcccgggccgttgatcttcggccccacacgaacagcagagaggggcagcaggatgaatgtgggcacagcgcacagcgaggtgaaccccaacacgcgggtgatgaacagccgtggcatctggctctcctacgtgctggccatcggtctcctccacatcgtgctgctgagcatcccgtttgtgagtgtccctgtcgtctggaccctcaccaacctcattcacaacatgggcatgtatatcttcctgcacacggtgaaggggacaccctttgagaccccggaccagggcaaggcgaggctgctaacccactgggagcagatggattatggggtccagttcacggcctctcggaagttcttgaccatcacacccatcgtgctgtacttcctcaccagcttctacactaagtacgaccagatccattttgtgctcaacaccgtgtccctgatgagcgtgcttatccccaagctgccccagctccacggagtccggatttttggaatcaataagtactgagagtgcagccccttcccctgcccagggtggcaggggaggggtagggtaaaaggcatgtgctgcaacactgaagacagaaagaagaagcctctggacactgccagagatgggggttgagcctctggcctaatttcccccctcgcttcccccagtagccaacttggagtagcttgtagtggggttggggtaggccccctgggctctgaccttttctgaattttttgatcttttccttttgctttttgaatagagactccatggagttggtcatggaatgggctgggctcctgggctgaacatggaccacgcagttgcgacaggaggccaggggaaaaacccctgctcacttgtttgccctcaggcagccaaagcactttaacccctgcatagggagcagagggcggtacggcttctggattgtttcactgtgattcctaggttttttcgatgccacgcagtgtgtgcttttgtgtatggaagcaagtgtgggatgggtctttgcctttctgggtagggagctgtctaatccaagtcccaggcttttggcagcttctctgcaacccaccgtgggtcctggttgggagtggggagggtcaggttggggaaagatggggtagagtgtagatggcttggttccagaggtgagggggccagggctgctgccatcctggcctggtggaggttggggagctgtaggagagctagtgagtcgagacttagaagaatggggccacatagcagcagaggactggtgtaagggagggaggggtagggacagaagctagacccaatctcctttgggatgtgggcagggagggaagcaggcttggagggttaatttacccacagaatgtgatagtaataggggagggaggctgctgtgggtttaactcctgggttggctgttgggtagacaggtggggaaaaggcccgtgagtcattgtaagcacaggtccaacttggccctgactcctgcgggggtatggggaagctgtgacagaaacgatgggtgctgtggtcctctgcaggccctcaccccttaacttcctcatacagactggcactgggcagggcctctcatgtggcagccacatgtggcgttgtgaggccaccccatgtggggtctgtggtgagagtcctgtaggatccctgctcaagcagcacagaggaaggggcaagacgtggcctgtaggcactgtctcagcctgcagagaagaaagtgaggccgggagcctgagcctgggctggagccttctcccctccccagttggactaggggcagtgttaattttgaaaaggtgtgggtccctgtgtcctcttccaggggtccaagggaacaggagaggtcactgggcctgttttctccctcctgaccctgcatctcccaccccgtgtatcatagggaactttcaccttaaaatctttctaagcaaagtgtgaataggatttttactccctttgtacagtattctgagaaacgcaaataaaagggcaacatgtttctggttaacaaaaacaaacaaacaacaccacaaaaaacaacaaaaaaaaaaaacaacaacaaacaaaaaaaaaaaacaacagaggggggcgggccgccgaaaaatgagcggcgagcgtcacacccacgccgggataattatcccgccgcgcggaaaccacggagagggtttcttccccgcaccaggcggcggcgaaaactactgagggcggcgccccatcaggtggaagcgtaacataccggagacgcgtgacacgcccttaaacg

SEQ ID NO: 5457 - protein, 201 aa, Homo sapien
GGFGRSCQRGGCSRGLLQLLEQQRPPLPGTVPGPLIFGPTRTAERGSRMNVGTAHSEVNPNTRVMNSRGIWLSYVLAIGLLHIVLLSIPFVSVPVVWTLTNLIHNMGMYIFLHTVKGTPFETPDQGKARLLTHWEQMDYGVQFTASRKFLTITPIVLYFLTSFYTKYDQIHFVLNTVSLMSVLIPKLPQLHGVRIFGINKY

SEQ ID NO: 5458 - DNA, 1673 bp, Homo sapien
  Unsure 861-944: Unknown base
caaggtgctccccacctcccagacagggcgccgggcagaggcgaattttttcttaatatcttaatattttatgtcattttgtgtacaaaatgaaattctggcttttaataatagtacattcttacttgtttcatcctatagaatacatacaactgtttcaaaattatcataccaaaattattattagcaatattaaaatagctatgctagctttcttttggttattgttagcatgttatggtatatcttttcccactctttttcttttaatcttataataagtgtatatttaagatgtgtctcttgatagcaacatatacttgagttttgcttttcatcatccagcctgacaatcttttatcttttaactagagtacttaatcttacttactgtacttactgatatgtttgggtttaaatgtaccatattaatctctgttttctatttatcatatctattctttgttcttttttatcttttcctggtttcttttgcattatttctatttcattttcacccctattatgttgttagttatacattctaattctttcattgcttaccctagagattataacatgcatccttgacttattgaactgtaatgtaaattagtatattcatcattccccagacaatgcaaagacctttgaatactttaagccttatttatctctcttctgctttttgtgttgcttttaacacacattttaattctatttatatttgaaacccgatgaaacatttttaatttgtttatatttatttatatgtaccaacatatttaccatttatttccagtgtccttcaattcttcctatatttccatgcttccatgtgggataatttttcatctagannnnnnnnnnnnnnnnnnnnnnnnnnnnnnnnnnnnnnnnnnnnnnnnnnnnnnnnnnnnnnnnnnnnnnnnnnnnnnnnnnnnctttgaaggatatttttgctgggcatagaagttggatggcaattattttctttcagcactttgaagaaattattgtcttctgattttactgtttcaccatacttcccttctctctgcaatcttagctcatcaaatccttgatgtcttcaaatagacttttctccctctctagctcttctagtagttgttggtgagaggttggtctgataaaagtaatctaccctggctagacatctgctgctaataataaacctactaaataaagtttaagatttatttgcaattttttttaccttagaatttatcccatgagaaatgtagaatcaggttactatattcaaaaattacttgacataattatttttaaaaattttaaaaggtaagaaacaacctttttaaatttaagaattaagagactaagaaattgagaattatttcaaaactcaaaaaatgttgaaggctttaaaaatgagtaagataaaatgtaaggtaaatgaaatgaatgtaggcattttgaagattagaaatttagccgtaggtaaagaatacaaaggaaaaataattttaaaatcatcaaccagatcaacaaaatatatgctaatgccgagactttgaattagagtgcgaattgtatcttaattaaaaagagaaaacccaatactggaaaaaaaatctatgtcggtgcggagaaagaggtaatgaaatgcaggtattcgatatgcagctatc

SEQ ID NO: 5459 - protein, 30 aa, Homo sapien [sequence omitted]

SEQ ID NO: 5460 - DNA, 1588 bp, Homo sapien
  Unsure 89: Unknown base
  Unsure 377-531: Unknown base
  Unsure 1144-1317: Unknown base
gtgaaactccctgccctgttctgtttctctctgaccaccagtgcatgcagcccctgtcatgtaccgcctgtttgctcaaatcaatcatngaccctttcatgtgaaatctttagtgttgtgagcccgttaaaagggacagaaattgtgcattcaaggagcttggattttaaggcagcagcttgctgatgccaccagctgaaaaaagcccttccttctccaactcggtgtctgagaagttttgtctgcagctcatcctgctacagaatgaactccttgtaattctacaagatatgccatgggccttttcacaggggacacaggcttcttaaaacaacccggcttcctcaccctatgtcctttatttacaaagctgtgcnnnnnnnnnnnnnnnnnnnnnnnnnnnnnnnnnnnnnnnnnnnnnnnnnnnnnnnnnnnnnnnnnnnnnnnnnnnnnnnnnnnnnnnnnnnnnnnnnnnnnnnnnnnnnnnnnnnnnnnnnnnnnnnnnnnnnnnnnnnnnnnnnnnnnnnnnnntgcattcctgatttggctcttggcttgaatgttattaacgccacattttttaaatagacaaaaatatgagattaaaaatgttgaattttactaacaataaaagttgttcaaaggaaaactataaggttcttgtttcaactctgtcataggaagaacaggacagtgagctggcacagagttagggaaattgactgtgtctcatattggctagtgagagtgatctgttggaattgtatatcaaaattttaatgtacatacattttgtctagcaattctactattgggtatttatatagtacatataaatataaatgtatatgtttagtaaatatatacttatagttagtaaatatattttatatctatttagtaaatatactaaatgtcaggcctctgagccccaagctaagccatcatatcccctgtgacctgcatgtacatacgtccagatggcctgaagcaagtgaagaatcacaaaagaagtgaaaatggcctgttcctgccttaactgatgacattaccttgtgaaattccttctcctggctcatcctggctcaaaagctcccccactaagcaacttgtgacacccacctctgcccgccagagaacgatnnnnnnnnnnnnnnnnnnnnnnnnnnnnnnnnnnnnnnnnnnnnnnnnnnnnnnnnnnnnnnnnnnnnnnnnnnnnnnnnnnnnnnnnnnnnnnnnnnnnnnnnnnnnnnnnnnnnnnnnnnnnnnnnnnnnnnnnnnnnnnnnnnnnnnnnnnnnnnnnnnnnnnnnnnnnnntttactgcagaatatttcccaaagtctcataatgatgcagaaatacatgtgtacaagacttgttctgacacctggcacagaactgacagtagtggctccccagggaggctggaaggagggtggaggacgtgacagggaaaggagatgctttatggacaagggcctaagctgcagctttgcttggagcgttaccacaaaacaaatacatacatcatgtgatgtttaaatatcacaatatatatttaataataattggtggggctgagcacgg

SEQ ID NO: 5461 - protein, 166 aa, Homo sapien
  unsure 34: unknown amino acid
  unsure 35: unknown amino acid
  unsure 36: unknown amino acid
  unsure 37: unknown amino acid
  unsure 38: unknown amino acid
  unsure 39: unknown amino acid
  unsure 40: unknown amino acid
  unsure 41: unknown amino acid
  unsure 42: unknown amino acid
  unsure 43: unknown amino acid
  unsure 44: unknown amino acid
  unsure 45: unknown amino acid
  unsure 46: unknown amino acid
  unsure 47: unknown amino acid
  unsure 48: unknown amino acid
  unsure 49: unknown amino acid
  unsure 50: unknown amino acid
  unsure 51: unknown amino acid
  unsure 52: unknown amino acid
  unsure 53: unknown amino acid
  unsure 54: unknown amino acid
  unsure 55: unknown amino acid
  unsure 56: unknown amino acid
  unsure 57: unknown amino acid
  unsure 58: unknown amino acid
  unsure 59: unknown amino acid
  unsure 60: unknown amino acid
  unsure 61: unknown amino acid
  unsure 62: unknown amino acid
  unsure 63: unknown amino acid
  unsure 64: unknown amino acid
  unsure 65: unknown amino acid
  unsure 66: unknown amino acid
  unsure 67: unknown amino acid
  unsure 68: unknown amino acid
  unsure 69: unknown amino acid
  unsure 70: unknown amino acid
  unsure 71: unknown amino acid
  unsure 72: unknown amino acid
  unsure 73: unknown amino acid
  unsure 74: unknown amino acid
  unsure 75: unknown amino acid
  unsure 76: unknown amino acid
  unsure 77: unknown amino acid
  unsure 78: unknown amino acid
  unsure 79: unknown amino acid
  unsure 80: unknown amino acid
  unsure 81: unknown amino acid
  unsure 82: unknown amino acid
  unsure 83: unknown amino acid
  unsure 84: unknown amino acid
  unsure 85: unknown amino acid
  unsure 86: unknown amino acid
  unsure 87: unknown amino acid
  unsure 88: unknown amino acid
  unsure 89: unknown amino acid
  unsure 90: unknown amino acid
  unsure 91: unknown amino acid
  unsure 92: unknown amino acid
MTLPCEIPSPGSSWLKSSPTKQLVTPTSARQRTXXXXXXXXXXXXXXXXXXXXXXXXXXXXXXXXXXXXXXXXXXXXXXXXXXXXXXXXXXXLLQNISQSLIMMQKYMCTRLVLTPGTELTVVAPQGGWKEGGGRDRERRCFMDKGLSCSFAWSVTTKQIHTSCDV

SEQ ID NO: 5462 - DNA, 1087 bp, Homo sapien
attgaaggccggacggttgtcgcaggcaggccggggcggggaaagcggagcgcgcgctccacgcgggaccgcctcccgggccgtctgagcagagggcggggtgcaggcggaatggccctcgtgccctatgaggagaccacggaatttgggttgcagaaattccacaagcctcttgcaactttttcctttgcaaaccacacgatccagatccggcaggactggagacacctgggagtcgcagcggtggtttgggatgcggccatcgttctttccacatacctggagatgggagctgtggagctcaggggccgctctgccgtggagctgggtgctggcacggggctggtgggcatagtggctgccctgctgggtgctcatgtgactatcacggatcgaaaagtagcattagaatttcttaaatcaaacgttcaagccaacttacctcctcatatccaaactaaaactgttgttaaggagctgacttggggacaaaatttggggagtttttctcctggagaatttgacctgatacttggtgctgatatcatatatttagaagaaacattcacagatcttcttcaaacactggaacatctctgtagcaatcactctgtgattcttttagcatgccgaattcgctatgaacgggataacaacttcttagcaatgctggagaggcaatttattgtgagaaaggttcactacgatcctgaaaaagatgtacatatttacgaagcacagaagagaaaccagaaggaggacttataattggctataatttataagaatgttgtcattgagtgtgtcacttaaggtcttagactgcaaatctaaccatatttaatgaaatgtcttactgtacaaaaagtctaagccaaaggttctcaggggagaaagcacatgtgcagttttaaaacaaagcagtgctttgtcccattgctgtgatttttagtcagactttactcagtctgaaatgcaattaacattaaaggattaagtgtgagatttcgatttatgctatttgtgtatcccatactcctcccttttaataaacagtttccactgatgataaaaaaaaaaaaaaaaa

SEQ ID NO: 5463 - protein, 218 aa, Homo sapien
MALVPYEETTEFGLQKFHKPLATFSFANHTIQIRQDWRHLGVAAVVWDAAIVLSTYLEMGAVELRGRSAVELGAGTGLVGIVAALLGAHVTITDRKVALEFLKSNVQANLPPHIQTKTVVKELTWGQNLGSFSPGEFDLILGADIIYLEETFTDLLQTLEHLCSNHSVILLACRIRYERDNNFLAMLERQFIVRKVHYDPEKDVHIYEAQKRNQKEDL

SEQ ID NO: 5464 - DNA, 982 bp, Homo sapien
aaataattaaatataaataaaaataaagcaaaatctgttgggaaacgagaaaaaggagaggaatttttcaggaataatcataaaaagaaatgatcatcagactgaaagtccagagcctgagaaatgaaaacatatttttaagcattggtgttgaccatgcagacaaacttttgttaattcagagcgatacaaaaggcactttgaatctataaaacttgaaaaagttaaaaattgtatgtcggataaagctttaagtcatctgtcactattaacctcagtgcagcaattctgactcctgtgcctggattccttttatgataattttgccacctacaggacagattaggtgctggtcgcctgaattattttgtgttctgaattattttgagctctaaaatggtaaagtacaaatactcattgttttactgtgcctttggccttttataaaaaggtatttataattcgttgataaaaaccaatatttgaagctgttgattaccaacaaaaaagtttcactctctttatagtgcttcaggatacaactttttcagggccttattagagaaaaactgattcacatgttattcttctaaagctaaattattaaaatgtaggttgaaagattggattgattgtgaatctacactaaagatatggttccaggcagacctccttagagacctccaggcagacctccttactgtcttcagtgatgtttaatttcattactgttactgggtgccaagtgtctttcatttggaagtgaacttactccagttattgaatgtttatcatatcataatttgcatttttccaacattgaaggtattttaaaaagtcactaagagattcattcttttattattcaactacaaaaaaatagtgtaatgatcagaatttaaaatgtgtgattctttttcttctgtaagtatgtattgctatgataaataaaaaatggcaggaccattgtttttattaaaat

SEQ ID NO: 5465 - protein, 8 aa, Homo sapien
MAGPLFLL

SEQ ID NO: 5466 - DNA, 2295 bp, Homo sapien
agagaaaaaatccctgctgcattatctacccataaaagaaatacagaaccatctggaaggtgaagaacaaagaaagggaatcaagccctgggaatgcaagtttgttgcttattcctgtgactgctgccacagggataagggtgctaggcttgggtttaggagacttgggtgaaattccagtctacacatggctagcaagctctctgaaaaatggggagagtaagtgtgacctcatggagtggtgagcgttcaattatgtcatgtttataaaagtgcctagcactgtacctggtacatagtaggggtgtagtagtagtggtttccttttgttcagttgcagggttggggattactttaaggcttagactcaaagcgataggaatgaattgcttggtcagcagaagtgcacactgcacaccagcctcaagggacaaggtcaaccacgacacgtttgcaaagtgtttgtgcggggaagaccactctgatgtttcttacttaaaggcagggtcttccaactttgtctgatacggaatgacttgttacaatcatttcacaggcaagccaacactcaggcttttgactaacttgtctggcgtgtttctcaacaactccattaagaattcactgttagaaatctgatcttttctcctctgttgagctttacttgggcattttattgatttgatatcacttagtagaaacccattcaacaaaaggtatctcttcaggccactagtcaatacagcattttttatttgctgagatttttacttctattttgccccacatcagctggtaagttttataagtaagcaaaaagtaggagctatagacaataaggaagcagaatgaacctctgcaattcatatttatgtatgatttcacttggagtgggaggagatgttttttttccccatctttgaataagtagaaaaacatctcacgtaacctggggtggtggtggtgaattttcagctgaagggaatccttcctcgtgaagctcactgctatcctgttaatctagcattttacttttgtggtaagattctgggtggaaagggaaaatgaaatgatacagcatctcaaacataggca[450 bp omitted]aatctctcttggtatgctgctgagttggtgggacctgggcaattacaagggaggtcactgcacccccaggcagttcccagcaagtgttttttccaatttcactgacattctttccgggctcaactcaatttgttttcaacttctctatggcaattgatgactgactgtgtaattcagcaggatctcctgtgaagtgcttcttccccagttgaataggagctggtgtttgtctaagcctctgcttatgcatgaggtataatgctttttatatgttatataatgctcttacgcgttagctatctgaatgatagatttaataaaatatacctcataatattatggggaaaggatgacgactgttatagagaggaacttgggagtatcacttctgtaatccttatctaacctgaatctgttagcaggaaactgaaaaggcctgtgtatgacaatgagataaacaattttaatctcttagcaatgtcaagtggaaaatctaactacctgccagtagtttaagaaatggctaagagattttgttgggcacaaataatcctgagacccagattgctgagccaagggtaggaaaattggttttgctatgtgttacagctgggaagtgagaaggtcactgtttgacaaactactaaaaaaaccttatggattaaacattcgccagtgtaggggacattttgaatgtgttataattgatattttagtctatatgcggccgctgaacgctttttcttttac

SEQ ID NO: 5467 - protein, 56 aa, Homo sapien
EKKSLLHYLPIKEIQNHLEGEEQRKGIKPWECKFVAYSCDCCHRDKGARLGFRRLG

SEQ ID NO: 5468 - DNA, 1009 bp, Homo sapien
accacaaggaaattgtttcccttttgtgaaaagatgggattggagtaaacagtcccttcaaggtctgacaatctttgatccatgtatctggcccagttccaggaggacatgttaaaagggttgggacagcagggtgacaggttccgaggtggatgcggaccacgttgaactcaagccttgcactcagctttcctaaggattcccctcgtactatattttttgtcaggcgactccgcggtcacctttgctccgcggtgattggcctgcagcggggtcctcgtgtttgtccaatatggcggcgcccagtggcggtgtgaactgtgaggagttcgccgagttccaggaattactcaaggtgatgaggacaattgatgacagaatagtacatgaattaaacactacggttccaacagcttcctttgcagggaaaattgatgccagccaaacctgtaaacaactttatgagtctttgatggcagctcatgccagtagagacagagtcataaaaaactgtatagcccagacttcagcagtagtaaaaaacctccgagaagagagagaaaagaatttggacgatttaacgttattaaaacaacttagaaaagagcagacaaagttgaaatggatgcagtcagaactgaatgttgaagaagtggtaaatgacaggagctggaaggtgtttaatgaacgctgccgaattcacttcaagcctccaaagaatgaataaagagagattcttttttttttttttttttaaaggactgggtcatctcataagagctaagcatgacagatatcaacagggcgggcttcctaggatgatttctgagccaacagtccaagaccttttgttgatttcagccccacttagccaagacctcaagtataaataattctgataattatggagaaatcaactgctattttatactgattctgttaaaaaaaaagttttgtaactattaaaataatgttctgactcagtgtaaaaaaagaaaaaccaaacctg

SEQ ID NO: 5469 - protein, 122 aa, Homo sapien
MRTIDDRIVHELNTTVPTASFAGKIDASQTCKQLYESLMAAHASRDRVIKNCIAQTSAVVKNLREEREKNLDDLTLLKQLRKEQTKLKWMQSELNVEEVVNDRSWKVFNERCRIHFKPPKNE

SEQ ID NO: 5470 - DNA, 9116 bp, Homo sapien
aggaaggctgccttttatttaacccagctctctgttctgaccagtgttgcccatgacgctcatgtcctgaggtgggcagtgtcagccgccctgggtagggcagggggctcatgggtggccaccagcctctgcctgttctcccagacccttctccaccctttcccctcccctgcaaacagcagagaggagagccagccccttccctcatcacattgcttgtgtctgcctgagctcctctgtagtgtgcttgggcctgccatatggttgggctgcagatgaacacaggcttttcttttttggactttctgcaggcgaagctggtccgttacatttgtaagcagaggcagtgcaagctgagcgtggctcccggtgagaggaccccagagctcaacagctacccccggcttcagcgactggctgtacactttcaacgtgaggccggaggtggtgcaggagatcccccgagacctcacgctggatgccctgctggagatgaatgaggccaaggtgaaggagacgctgcggcgctgtggggccagcggggatgagtgtggccgtctgcagtatgccctcacctgcctgcggaaggtgacaggcctgggaggggagcacaaggaggactccagttggagttcattggatgcgcggcgggaaagtggctcagggccttccacggacaccctctcagcagccagcctgccctggcccccagggagctcccagctgggcagagcaggcaacagcgcccagggcccacgctccatctccgtgtcagctctgcccgcctcagactcccccacccccagcttcagtgagggcctctcagacacctgtattcccctgcacgccagcggccggctgaccccccgtgccctgcacagcttcatcaccccgcccaccacaccccagctgcgacggcacaccaagctgaagccaccacggacgccccccccacccagccgcaaggtcttccagctgctgcccagcttccccacactcacccggagcaagtcccatgagtctcagctggggaaccgcattgatgacgtctcctcgatgaggtttgatctctcgcatggatccccacagatggtacggagggatatcgggctgtcggtgacgcacaggttctccaccaagtcctggctgtcgcaggtctgccacgtgtgccagaagagcatgatatttggagtgaagtgcaagcattgcaggttgaagtgtcacaacaaatgtaccaaagaagcccctgcctgtagaatatccttcctgccactaactcggcttcggaggacagaatctgtcccctcggacatcaacaacccggtggacagagcagccgaaccccattttggaaccctccccaaagcactgacaaagaaggagcaccctccggccatgaatcacctggactccagcagcaacccttcctccaccacctcctccacaccctcctcaccggcgcccttcccgacatcatccaacccatccagcgccaccacgccccccaacccctcacctggccagcgggacagcaggttcaacttcccagccgcctacttcattcatcatagacagcagtttatctttccagacatttcagcctttgcacacgcagccccgctccctgaagctgccgacggtacccggctcgatgaccagccgaaagcagatgtgttggaagctcacgaagcggaggctgaggagccagaggctggcaagtcagaggcagaagacgatgaggacgaggtggacgacttgccgagctctcgccggccctggcggggccccatctctcgcaaggccagccagaccagcgtgtacctgcaggagtgggacatccccttcgagcaggtagagctgggcgagcccatcgggcagggccgctggggccgggtgcaccgcggccgctggcatggcgaggtggccattcgcctgctggagatggacggccacaaccaggaccacctgaagctcttcaagaaagaggtgatgaactaccggcagacgcggcatgagaacgtggtgctcttcatgggggcctgcatgaacccgccccacctggccattatcaccagcttctgcaaggggcggacgttgcactcgtttgtgagggaccccaagacgtctctggacatcaacaagacgaggcaaatcgctcaggagatcatcaagggcatgggatatcttcatgccaagggcatcgtacacaaagatctcaaatctaagaacgtcttctatgacaacggcaaggtggtcatcacagacttcgggctgtttgggatctcaggcgtggtccgagagggacggcgtgagaacccagctaaagctgtcccacgactggctgtgctatctggcccctgagattgtacgcgagatgacccccgggaaggacgaggatcagctgccattctccaaagctgctgatgtctatgcatttgggactgtttggtatgagctgcaagcaagagactggcccttgaagaaccaggctgcagaggcatccatctggcagattggaagcggggaaggaatgaagcgtgtcctgacttctgtcagcttggggaaggaagtcagtgagatcctgtcggcctgctgggctttcgacctgcaggagagacccagcttcagcctgctgatggacatgctggagaaacttcccaagctgaaccggcggctctcccaccctggacacttctggaagtcagctgacattaacagcagcaaagttgtaccccggtttgaaaggtttggcttgggcgtcctggagtccagtaatccaaagatgtagccagccatatggtttttcgctgctgatctctttctttttaaaatgtgtttctgaaacatcccaacaaccacccagccgcaaggtcttccagctgctgcccagcttccccacactcacccggagcaagtcccatgagtctcagctggggaaccgcattgatgacgtctcctcgatgaggtttgatctctcgcatggatccccacagatggtacggagggatatcgggctgtcggtgacgcacaggttctccaccaagtcctggctgtcgcaggtctgccacgtgtgccagaagagcatgatatttggagtgaagtgcaagcattgcaggttgaagtgtcacaacaaatgtaccaaagaagcccctgcctgtagaatatccttcctgccactaactcggcttcggaggacagaatctgtcccctcggacatcaacaacccggtggacagagcagccgaaccccattttggaaccctccccaaagcactgacaaagaaggagcaccctccggccatgaatcacctggactccagcagcaacccttcctccaccacctcctccacaccctcctcaccggcgccttcccgacatcatcaaccatccagcgccacacgccccccaacctcactggcagcgggacagcaggttcaacttcccagctgcctacttcattcatcatagacagcagtttatctttccagacatttcagcctttgcacacgcagccccgctccctgaagctgccgacggtacccggctcgatgaccagccgaaagcagatgtgttggaagctcacgaagcggaggctgaggagccagaggctggcaagtcagaggcagaagacgatgaggacgaggtggacgacttgccgagctctcgccggccctggcggggccccatctctcgcaaggccagccagaccagcgtgtacctgcaggagtgggacatccccttcgagcaggtagagctgggcgagcccatcgggcagggccgctggggccgggtgcaccgcggccgctggcatggcgaggtggccattcgcctgctggagatggacggccacaaccaggaccacctgaagctcttcaagaaagaggtgatgaactaccggcagacgcggcatgagaacgtggtgctcttcatgggggcctgcatgaacccgccccacctggccattatcaccagcttctgcaaggggcggacgttgcactcgtttgtgagggaccccaagacgtctctggacatcaacaagacgaggcaaatcgctcaggagatcatcaagggcatgggatatcttcatgccaagggcatcgtacacaaagatctcaaatctaagaacgtcttctatgacaacggcaaggtggtcatcacagacttcgggctgtttgggatctcaggcgtggtccgagagggacggcgtgagaaccagctaaagctgtcccacgactggctgtgctatctggcccctgagattgtacgcgagatgacccccgggaaggacgaggatcagctgccattctccaaagctgctgatgtctatgcatttgggactgtttggtatgagctgcaagcaagagactggcccttgaagaaccaggctgcagaggcatccatctggcagattggaagcggggaaggaatgaagcgtgtcctgacttctgtcagcttggggaaggaagtcagtgagatcctgtcggcctgctgggctttcgacctgcaggagagacccagcttcagcctgctgatggacatgctggagaaacttcccaagctgaaccggcggctctcccaccctggacacttctggaagtcagctgagttgtaggcctggctgccttgcatgcaccaggggctttcttcctcctaatcaacaactcagcaccgtgacttctgctaaaatgcaaaatgagatgcgggcactaacccaggggatgccacctctgctgctccagtcgtctctctcgaggctacttcttttgctttgttttaaaaactggccctctgccctctccacgtggcctgcatatgcccaagtaactgctctcagaggatcccactaactgagctccctccaaggcagtctgggcagcttctaactaccttcctggacatgactgattgctcccgtgttcttctgagggctggtcttgtttttgtttgggtggctctgtctcactgctaacaccttagtgagatgccttccaccctcctgagcacaccagcctcccactgggtgtgtgcctagtgcggggcgggcggaggttgggagggtgttggcttggcttttaacctgtggggattttgtccaacaaggagtggaatgatttcagagctgccctgaggctggcaccctggtcacaggaaccctctgcgctggctcctgtctcagtcccctctgtagagttagatcagaagacacagaaagttctgtggccatgaaagataccagcttggaagggttgtgtcttcagtggcaccctcagaaaaattgtcttaaagcaaagaggtacctggctccagacaatttttctgatgaaaacaaagtctctgccccgtccccaccctgccaccctggcaaagttacttcctttacagctgcccagtgtaccatagaccagaccccaggtcagcatttgtcaagagcatggctgctgagtcccctgtggcagtcaatgcactgtttaccaaatgcaggtttctgttctccctccccagcaagacctgctgaacccagatctctggaatggggccctaggaatttgcatttcaacctgcttcccaggtggccctgatgcaccccagtattagagtttattgctaaaaggaacatgccctgtcactcctggtatcctgggagtcatgtttctcttctctctcagttctacttggagcaagagctttcctgggctgcaaatgagaaaacaattcctaggaacccacagcagtactgagcatgctgggagcttgggacttggagatgaatgagccaccgttgctgctccaagtaggactacttggagtgtagctgaggccttggacgcagtatgaccaggggcagctctgccagggctgttggccaatcagtcattttcatttcttgttggaggccaggtcctctgctgaactcatttcctagctagtgttaccctaattctgatgaagatcaatggggctataattcttgtttttgttcctctttgcagcattaacagcagcaaagttgtaccccggtttgaaaggtttggcttgggcgtcctggagtccagtaatccaaagatgtagccagccatatggtttttcgctgctgatctctttctttttaaaatgtgtttctgaaacatcccaacaaccaccacgacaaaaaaacactgcctgcccagcgctgcaaaccaggagcacacgtcctagattcagactgttggccataaaccccactcgggagatggagctgcacctgctatttcttaaaatgacaccaccaacaaccaaacctgtcatgacagacagcaaatgtttacacgtatatttctcctgagtgaacctgatgttttacaataggtaataataaaaacagtctgtgcagatgcactggcactgacggccaggatggcggaaatggccatcccctctgaggaccttgtaggcggtgagggacccatgctgggccagaaggaagacaaacatggtaattgcagctgttcttggggtagggcggggagcccagaaggtctgatctggcctctgctttttggcccaagactccatcagggaaatctatctagggctctccccttgtcctttcaaagggatactgccccttcctcgtcttgcagaggaaaccctggctgggaactgagctagtttatggagtctggaattcctggagagcttgggttcaccttctcacccctgtaatccaggctgctcctgctggaaaagtagaaacagaatccaaaaaaggtctggactcacccggtggttcccagccagggtttctgctgcaaggtgaggaaacatccatggcttgtacagatgtgagtctttgatgaagcccccaggcaggcaccaaggtgatgggactcagggccttggcttttagatacatcccagtccctgactgacatctgaccatgagggctggatgggtgggaacaaggaggagtagatggcaaaagtacctgagcccacttcccagccacagggtgaccctggcactgtaaaaaccctttgtcagtcatgccagaaggttctagaactgcccacctcttccatttcagtcctgctgaaaccccttagcctatttccgactcctctgtccatgctctgagttcagctgggcagtgtgtgggctatcacccctttcatttagacctacctagctggcccccatctgcagagccttccttagcaccattaggccttctacttgtgtccatttgaagcaggaggggctggatttggaaaagtctttgaagtgagagcaccacgcttgtcttcgttagaaactcttaactgcagaaaaaagttccagatggcaagggagcccttaagtggagattaggttgcattagactccaaaaccagaaaggaaaaagggtgatgggagtggagacgtgattggattcaggcccagaacctgtgaccatgctctgagctcagacttggggagggaggggtgtggctcccaccccttccagttaagacctgcctagcagagccccagtctccagccccttccctagcaccagagtctggtcaaaatgccacagaaaatgagctgctctgccagcaaactgtggagctgcctcctctccaggcctggcatcccttggtcagcccctcctgggagggcacagccgtattacagtgccagtgtgcctggccatcagcatcttcacccttcccagtctgtgtggggaggctgtaaaccccgtggattcagctccgtgtggagtttctgtgctatggtgggactgctcattttgccccatcatccctttggcctcccacacacctgccccttcccagggatcacgtgtgtctccagcctttcacctttctattgcaatggtggcctttgtccaggcaagagcaggcctgatggatgtactggtgagccccacagttggatgtcagctcagccgtccaactgggaggaacagtaggctcagttcctccctgacccctgacaccaggccgcagtgggcatgcacaggcccacagaaagtcagtctgggttttgcttttctcgtgagcatcacagttaaagaagcgctcattgagcaactacagtgcacttggtcttctgcaagtgctgggcacctagagataggaacagtcatggtccctgctcttaaggaactgatgacctggtggggccctgttgtcttcaaggaacccagaagccactgggccccaaaggtggaactgaaggactgggggcagctggctctcagcctgccacctctgcactgcctgcctttaaagaaccccaccccaccccatgatggccccctctgttccccttgtatttcagtgactgtgaattgaggttaggaaggcacacctgcccttctgtgtgctctctccacacgaaggatgacagatactgtgaattcagccctcacggccaactgtgaaggggatggagaaggctgggagggctcggggagagctcttaggggctgcggaagtccccacgggggtctgagagtggagcccaagctttggccctccaggcatccccagtttccagcctcacctctgaagccctgctgcctttaaccaccagagccgcagccccctgggtttctgtctaactcgaagtcttgaatcctagctagtttggggttgtgagcagtgtgtagcaaagttgatctctccatgtcaccaaatcaaaacaccctctgtcatcctacggcatttcctcttgaggtcacagagaggaatggcaagccctggaaacctgtgttattctgtgttgatttggtgtggggggagggtggagacgtaaatgtgaagccagttggagtttgtgctatgcagcagtgttagccaggatctcatcagcgtgcaaacctagcatcttctgtggccacaagccacacacttgctttttttgaatgtgatgtaaaatttgtacagtaaagtttttatattttctatcaactacatttgtcttccagacatgctattaatttaaattaaaatggttagtattaacaaacatgctgtatcgggtttttttgccactggcaagaacatgccctctgtgctaagccaggcctgggtgtctggagtttgtgaataaagttataccaaggtgaaaaa

SEQ ID NO: 5471 - protein, 622 aa, Homo sapien
MNEAKVKETLRRCGASGDECGRLQYALTCLRKVTGLGGEHKEDSSWSSLDARRESGSGPSTDTLSAASLPWPPGSSQLGRAGNSAQGPRSISVSALPASDSPTPSFSEGLSDTCIPLHASGRLTPRALHSFITPPTTPQLRRHTKLKPPRTPPPPSRKVFQLLPSFPTLTRSKSHESQLGNRIDDVSSMRFDLSHGSPQMVRRDIGLSVTHRFSTKSWLSQVCHVCQKSMIFGVKCKHCRLKCHNKCTKEAPACRISFLPLTRLRRTESVPSDINNPVDRAAEPHFGTLPKALTKKEHPPAMNHLDSSSNPSSTTSSTPSSPAPFPTSSNPSSATTPPNPSPGQRDSRFNFPAAYFIHHRQQFIFPDISAFAHAAPLPEAADGTRLDDQPKADVLEAHEAEAEEPEAGKSEAEDDEDEVDDLPSSRRPWRGPISRKASQTSVYLQEWDIPFEQVELGEPIGQGRWGRVHRGRWHGEVAIRLLEMDGHNQDHLKLFKKEVMNYRQTRHENVVLFMGACMNPPHLAIITSFCKGRTLHSFVRDPKTSLDINKTRQIAQEIIKGMGYLHAKGIVHKDLKSKNVFYDNGKVVITDFGLFGISGVVREGRRENPAKAVPRLAVLSGP

SEQ ID NO: 5472 - DNA, 1932 bp, Homo sapien
cctctagcttagcgagcgctggagtttgaagagcgggcagtggctgcacacgccaaactttccctatggcttcggtgaccagggccgtgtttggagagctgccctcgggaggagggacagtggagaagttccagctgcagtcagacctcttgagagtggacatcatctcctggggctgcacgatcacagccctagaggtcaaagacaggcaggggagagcctcggacgtggtgcttggcttcgccgagttggaaggatacctccaaaagcagccatactttggagcagttattgggagggtggccaaccgaatcgccaaaggaaccttcaaggtggatgggaaggagtatcacctggccattaacaaggaacccaacagtctgcatggaggagtcagagggtttgataaagtgctctggacccctcgggtgctgtcaaatggcgtccagttctcgcgcatcagtccagatggtgaagaaggctaccccggagagttaaaagtctgggtgacatacaccctggatggcggagagctcatagtcaactacagagcacaagccagtcaggccacaccagtcaacctgaccaaccattcttacttcaacctggcaggccaggcttccccaaatataaatgaccatgaagtcaccatagaagcggatacttatttgcctgtggatgaaaccctgattcctacaggagaagttgccccagtgcaaggcactgcattcgacctgagaaagccagtggagcttggaaaacacctgcaggacttccatctcaatggttttgaccacaatttctgtctgaagggatctaaagaaaagcatttttgtgcaagggtgcatcatgctgcaagcgggcgggtactagaagtatacaccacccagcccggggtccagttttacacgggcaacttcctggatggcacattaaagggcaagaatggagctgtctatcccaagcactccggtttctgcctggagactcagaactggcctgatgcagtcaatcagccccgcttccctcctgtgctgctgaggcctggtgaggagtatgaccacaccacctggttcaagttttctgtggcttaaggaagtgtgaagatatgatccagtccagggctaggctcagccacctgtctcctgtccagaaaaaaggtgaagattaagaagctttcagaatgattctatggattaaaatcatacaaatggtggctgttctgagaatcagtctgggtattgatttccttttccagtgactggctccaggccatgtctaatgaccagctcgattccctgtgcagttcagagagcaagtgaacccaaccaacaatgtcgtcatctaagccctgaccctagccagggactcccatgctgctgttggctccatctctccacactgcctctttcttttcaactttttgcccttcctttctttaaagctattctcacattgcttttatttcctcctccttcacctccaaccactgtcagcagcactctggagttttcaaatgtcacattagcctcaccctgcatgctaggagatggacctgtctctatacagcagtagatgattgataagtgaggaaactgaggcttacagaggttgaagaccaacaagctaataaataaaaagttgaggccgggcacggtggctcacgcctgtaatcccagcactttggaaggccgaggcaggcggatcacgaggtcaggagatcgagaccatcctggctaacacggtgaaaccccgtctctacataaaaaattagctgggtgtggtagcacgcacccgtagttccagctacttgggaggctgaagcaggagaatcgcttgaacctgggaggtggaggttgcagtgagccgagatcatgccactgcactgggcaacagagcaaaactcgatctcaaaaaaaaaaaaaaaaaaaa

SEQ ID NO: 5473 - protein, 342 aa, Homo sapien
MASVTRAVFGELPSGGGTVEKFQLQSDLLRVDIISWGCTITALEVKDRQGRASDVVLGFAELEGYLQKQPYFGAVIGRVANRIAKGTFKVDGKEYHLAINKEPNSLHGGVRGFDKVLWTPRVLSNGVQFSRISPDGEEGYPGELKVWVTYTLDGGELIVNYRAQASQATPVNLTNHSYFNLAGQASPNINDHEVTIEADTYLPVDETLIPTGEVAPVQGTAFDLRKPVELGKHLQDFHLNGFDHNFCLKGSKEKHFCARVHHAASGRVLEVYTTQPGVQFYTGNFLDGTLKGKNGAVYPKHSGFCLETQNWPDAVNQPRFPPVLLRPGEEYDHTTWFKFSVA

SEQ ID NO: 5474 - DNA, 3140 bp, Homo sapien
gatctctctccggtcgcgcacgccgaggccagtagggagagaagatggtggttctccgcagcagcttggagctgcacaaccactccgcggcctcggccacgggctccttggacctgtccagtgacttcctcagtctggagcacatcggccggaggcggctccgctcggccggcgcggcgcagaagaaacccgcggcgaccacagccaaagcgggcgatgggtcatcagttaaggaagttgaaacctaccaccggacacgtgctttaagatctttgagaaaagatgcacagaattcttcagattctagttttgagaagaatgtggaaataacggagcaacttgctaatggcaggcattttacaaggcagttggccagacagcaggctgataaaaaaaaagaagagcacagagaagacaaagtgattccagttactcggtcattgagggctagaaacatcgttcaaagtacagaacacttacatgaagataatggtgatgttgaagtgcgtcgaagttgtaggattagaagtcgttatagtggtgtaaaccagtccatgctgtttgacaaacttataactaacactgctgaagctgtacttcaaaaaatggatgacatgaagaagatgcgtagacagcgaatgagagaacttgaagacttgggagtgtttaatgaaacagaagaaagcaatcttaatatgtacacaagaggaaaacagaaagatattcaaagaactgatgaagaaacaactgataatcaagaaggcagtgtggagtcatctgaagagggtgaagaccaagaacatgaagatgatggtgaagatgaagatgatgaagatgatgatgatgatgacgatgatgatgatgatgatgatgatgaagatgatgaagatgaagaagatggagaagaagagaatcagaagcgatattatcttagacagagaaaagctactgtttactatcaggctccattggaaaaacctcgtcaccagagaaagcccaacatattttatagtggcccagcttctcctgcaagaccaagataccgattatcttccgcaggaccaagaagtccttactgtaaacgaatgaacaggcgaaggcatgcaatccacagtagtgactcgacttcatcttcctcctctgaagatgaacagcactttgagaggcggaggaaaaggagtcgtaatagggctatcaataggtgcctcccactaaattttcggaaagatgaattaaaaggcatttataaagatcgaatgaaaattggagcaagccttgccgatgttgatccaatgcaactagattcttcagtacgatttgatagtgttggtggcctgtctaatcatatagcagctctaaaagagatggtggtgtttccattactttatccagaagtctttgaaaaatttaaaattcaacccccaagaggttgtttgttttatgggccacctggaactggaaagactctggttgccagagcacttgccaatgagtgcagtcaaggggataaaagagtagcatttttcatgaggaaaggtgctgattgtctaagtaaatgggtaggagaatctgaaagacagctacgattgctgtttgatcaggcctatcagatgcgcccatcaattattttttttgacgaaattgatggtctggctccagtacggtcaagcaggcaagatcagattcacagttctattgtttccaccctgctagctcttatggatggattggacagcagaggggaaattgtggtcattggtgctacgaacaggctagattctatagatcctgctttacgaaggcctggtcgctttgatagagaattcctctttagcctgcctgataaagaggctcgaaaagagattctaaagattcacaccagggattggaatcccaaaccactggacacatttttagaagagctagcagaaaactgtgttggatactgtggagcagatattaaatcaatatgtgctgaagctgctttatgtgctttacgacgacgctacccacagatctataccactagtgagaaactgcagttggatctctcttcaattaatatctcagctaaggatttcgaggtagctatgcaaaagatgataccagcctcccaaagagctgtgacatcacctgggcaggcactgtccaccgttgtgaaaccactcctgcaaaacactgttgacaagattttagaagccctgcagagagtatttccacatgcagaattcagaacaaataaaacattagactcagatatttcttgtcctctgctagaaagtgacttggcttacagtgatgatgatgttccatcagtttatgaaaatggactttctcagaaatcttctcataaggcaaaagacaattttaattttcttcatttgaatagaaatgcttgttaccaacctatgtcttttcgaccaagaatattgatagtaggagaaccaggatttgggcaaggttctcacttggcaccagctgtcattcatgctttggaaaagtttactgtatatacattagacattcctgttctttttggagttagtactacatcccctgaagaaacatgtgcccaggtgattcgtgaagctaagagaacagcaccaagtatagtgtatgttcctcatatccacgtgtggtgggaaatagttggaccgacacttaaagccacatttaccacattattacagaatattccttcatttgctccagttttactacttgcaacttctgacaaaccccattccgctttgccagaagaggtaatttatgtggggcggtatcattatactttcaaaaagagttgtttctaccacaataatcataacttattgaaaaaattcaaatgctgtagaagtgaataaaaggataagttttcttatcaaatataccattggtaactatttggtatatgtgctcattgggcaagatggtatatgtatatgtgtatgtatatattaaggatacataaattttttctcttgaaaaatggtattatatgccgggtgcagtggctcacgcctgtaatcccagcactttgggaggccgaggtgggtggatcatgaggtcaggagattgagaccatcctggctagcagggtgaaaccctgtccctactaaaaatacaaaaaaaaaaaaaaa

SEQ ID NO: 5475 - protein, 939 aa, Homo sapien
MVVLRSSLELHNHSAASATGSLDLSSDFLSLEHIGRRRLRSAGAAQKKPAATTAKAGDGSSVKEVETYHRTRALRSLRKDAQNSSDSSFEKNVEITEQLANGRHFTRQLARQQADKKKEEHREDKVIPVTRSLRARNIVQSTEHLHEDNGDVEVRRSCRIRSRYSGVNQSMLFDKLITNTAEAVLQKMDDMKKMRRQRMRELEDLGVFNETEESNLNMYTRGKQKDIQRTDEETTDNQEGSVESSEEGEDQEHEDDGEDEDDEDDDDDDDDDDDDDDEDDEDEEDGEEENQKRYYLRQRKATVYYQAPLEKPRHQRKPNIFYSGPASPARPRYRLSSAGPRSPYCKRMNRRRHAIHSSDSTSSSSSEDEQHFERRRKRSRNRAINRCLPLNFRKDELKGIYKDRMKIGASLADVDPMQLDSSVRFDSVGGLSNHIAALKEMVVFPLLYPEVFEKFKIQPPRGCLFYGPPGTGKTLVARALANECSQGDKRVAFFMRKGADCLSKWVGESERQLRLLFDQAYQMRPSIIFFDEIDGLAPVRSSRQDQIHSSIVSTLLALMDGLDSRGEIVVIGATNRLDSIDPALRRPGRFDREFLFSLPDKEARKEILKIHTRDWNPKPLDTFLEELAENCVGYCGADIKSICAEAALCALRRRYPQIYTTSEKLQLDLSSINISAKDFEVAMQKMIPASQRAVTSPGQALSTVVKPLLQNTVDKILEALQRVFPHAEFRTNKTLDSDISCPLLESDLAYSDDDVPSVYENGLSQKSSHKAKDNFNFLHLNRNACYQPMSFRPRILIVGEPGFGQGSHLAPAVIHALEKFTVYTLDIPVLFGVSTTSPEETCAQVIREAKRTAPSIVYVPHIHVWWEIVGPTLKATFTTLLQNIPSFAPVLLLATSDKPHSALPEEVIYVGRYHYTFKKSCFYHNNHNLLKKFKCCRSE

SEQ ID NO: 5476 - DNA, 8570 bp, Homo sapien
gccttataagtggtttagtgctcagttggctctagtaaccagaggacacagaaagtatcttttggaaagtttagccacctgtgctttctgactcagagtgcatgcaacagttagatcatgcaacagttagattatgtttagggttaggattttcaaagaatggaggttgctgcactcagaaaataattcagatcatgtttatgcattattaagttgtactgaattctttgcagcttaatgtgatatatgactatcttgaacaagagaaaaaactaggagatgtttctcctgaagagcttttggggttgggaactattcttttttaattgctgtactacttaacattgttctaattcagtagcttgaggaacaggaacattgttttctagagcaagataataaaggagatgggccatacaaatgttttctactttcgttgtgacaacattgattaggtgttgtcagtactataaatgcttgagatataatgaatccacagcattcaaggtcaggtctactcaaagtctcacatggaaaagtgagttctgcctttcctttgatcgagggtcaaaatacaaagacatttttgctagggcctacaaattgaatttaaaaactcactgcactgattcatctgagcttttggttagtattcatggctagagtgaacatagctttagtttttgctgtgtaaaagtgttttcataagttcactcaagaaaaatgcagctgttctgaactggaatttttcagcattctttagaattttaaatgagtagagagctcaacttttattcctagcatctgcttttgactcatttctaggcagtgcttatgaagaaaaattaaagcacaaacattctggcattcaatcgttggcagattatcttctgatgacacagaatgaaagggcatctcagcctctctgaacttgtaaaaatctgtccccagttcttccatcggtgtagttgttgcatttgagtgaatactctcttgatttatgtattttatgtccagattcgccatttctgaaatccagatccaacacaagcagtcttgccgttagggcattttgaagcagatagtagagtaagaacttagtgactacagcttattcttctgtaacatatggtttcaaacatctttgccaaaagctaagcagtggtgaagtgaaaagggcatattgccccaaggttacactgaagcagctcatagcaagttaaaatattgtgacagatttgaaatcatgtttgaatttcatagtaggaccagtacaagaatgtccctgctagtttctgtttgatgtttggttctggcggctcaggcattttgggaactgttgcacagggtggagtcaaaacaacctacatataaaaagagaaaaagagaaacttgtccatttagctttcataagaaatcccatggcaaagggtaataaaaaggacctaatcttaaaaatacaatttctaagcacttgtaagaacccagtgggttggagcctcccactttgtccctcctttgaagtggatgggaactcaaggtgcaaagaacctgttttggaagaaagcttggggccatttcagccccctgtattctcatgattttctctcaggaagcacacactgtgaatggcagacttttcatttagccccaggtgacttactaaaaatagttgaaaattattcacctaagaatagaatctcagcattgtgttaaataaaaatgaaagctttagaaggcatgagatgttcctatcttaaataaagcatgtttcttttctatagagaaatgtatagtttgactctccagaatgtactatccatcttgatgagaaaactcttaaatagtaccaaacattttgaactttaaattatgtatttaaagtgagtgtttaagaaactgtagctgcttcttttacaagtggtgcctattaaagtcagtaatggccattattgttccattgtggaaattaaattatgtaagcttcctaatatcataaacatattaaaattcttctaaaatattgcttttcttttaagtgacaatttgactattcttatgataagcacatgagagtgtcttacattttccaaaagcaggctttaattgcatagttgagtctaggaaaaaataatgttaaaagtgaatatgccaccataattacttaattatgttagtatagaaactacagaatatttaccctggaaagaaaatattggaatgttattataaactcttagatatttatataattcaaaagaatgcatgtttcacattgtgacagataaagatgtatgatttctaaggctttaaaaattattcataaaacagtgggcaatagataaaggaaattctggagaaaatgaaggtatttaaagggtagtttcaaagctatatatattttgaaggatatattctttatgaacaaatatattgtaaaaatttatactaaggtcatctggtaactgtgggattaatatggtcgaaaacaaatgttatggagaagctgtcccaagcaaactaaattacctgtacttttttcccatttcaagggaagaggcaaccacatgaagcaatacttcttacacatgcctaagaacgttcattgaaaaaataaatttttaaaaggcatgtgtttcctatgccaccaatacttttgaaaaattgtgaaccttacccaaaaccatttatcatgtccattaagtatatttgggtatataattaggaagatatttacatgttccatctccacagtggaaaaacttattgaggctaccaaagtgtgccaagaaatgtaagtccttagagtaattagaaatgctgttttcctcaaaagcatgagaaactagcattttcatttcttatttactccctttctatatcaatgcaattcacaacccaattttaatacatccctatatctcaagcatttctatcttgtactttttcagaaaataaaccaaaaataatccttggtctctctatcttctgaccttgtaagcaacagaaatgtaaaaacagaaggggtccaatttttacacgtttttttctcaagtagcctttctggggatttttattttcttaatgaagtgccaatcagcttttcaaaatgttttctatttctcagcatttccaggaagtgataacgtttagctaaatgagtagaagtggacttccttcaacatattgttaccttgtctagccttaggaagaaaacaagagccacctgaaaataaatacaggctcttttcgagcatctgctgaaatactgttacagcaatttgaagttgatgtggtaggaaaggaaggtgacttttcttgcaaaagtctttctaaacattcacactgtcctaagagatgagctttcttgttttattccggtatattccacaaggtggcacttttagagaaaaacaaatctgatgaagactaaagaggtacttctaaaagagatttcattctaactttatttttctgcgcatatttaactctttcctagcacttgttttttgggatgattaatagtctctataatgttctgtaacttcaatattttacttgttacctaggttctgaacaattgtctgcaaataaattgttcttaaggatggataatacacccattttgatcatttaagtaaagaaagcctagtcattcattcagtcaagaaaaaatttttgaagtacccagttaccttacttttctagattaaaacaggcttagttactaaaaaggcagtcctcatctgtgaacaggatagtttcgttagaagtataaaactcctttagtggccccagttaaaacacacataccctctctgctgctttcaaattccctagcatggtggcctttcaacattgattaaattttaaaatcctaatttaaagatcaggtgagcaaaatgagtagcacatcagtaattcagtagacaaaacttttgtctgaaaaattgctgtattgaaacagagccctaaaataccaaaagaccaggtaattttaacatttgtggaatcacaaatgtaaattcataagaagctctaattaaaaaaaaaaagtctgaagtatatgagcataacaacttaggagtgtgtctacatacttaacttttgaagttttttggcaactttatatactttttttaaatttacaagtctacttaaagacttcttataccccaaatgattaagttaattttagaggtcacctttctcacagcagtgtcacttgaaatttagtagggaaggatattgcagtatttttcagtttccttagcacagcaccacagaaagcagcttattccttttgagtggcagacactcgacggtgcctgcccaactttcctcctgagtggcaagcagatgagtctcagtaattcatactgaaccaaaatgccacatacactaggggcagtcagaaactggctgagaaatcccccgcctcattcgcccctctgctcccaggaactagagtccagttaaagcccctatgcgaaaggccgaattccaccccagggtttgttataacagtggccagtctgaaccccatttgctcgtgctcaaaacttgattcccacttgaaagccttccgggcgcgctgcctcgttgccccgcccctttggcaggagagaggcagtgggcgaggccgggctggggccccgcctcccactcacctgccggtgcctgaaattatgtgcggccccgcgggctgctttccgaggtcagagtgccctgctgctgtctcagaggcatctgttctgcaaatcttaggaagaaaaatgtccctagtagcaaacgggtgtcttctgtgcataaataagtacaacacaattctccgaaagttcgggtaaaaagagatgcggtagcagctgccctgtgtgaagctgtctaccccgcatctctcaggcgctaagctcagtttttgtttttgtttttgtttttttaaagaaaagatgtataattgcaggaatttttttttatttttttattttccatcattctatatatgtgatggtgaaagatatgcctggaaaagttttgttttgaaaagtttattttctgcttcgtcttcagttggcaaaagctctcaattctttagcttccagtttcttttctctctttttctttgttaggtaattaaaggtatgtaaacaaattatctcatgtagcaggggattttcatgttgagaggaatcttccgtgtgagttgtttggtcacacaaataaccctttctcaattttaggagtttggattgtcaaatgtaggtttttctcaaagggggcatataactacatattgactgccaagaactatgactgtagcactaatcagcacacatagagccacacaattatttaatttctaactctctgtggtccctagaaaaattccgttgatgtgcttaggttaaagttctgaagatacccgttgtacccttacttgaaagtttctaatcttaagttttatgaaatgcaataatatgtatcagctagcaatatttctgtgatcaccaacaactctcagtttgatcttaaagtctgaataataaaacaaatcccagcagtaatacatttcttaaacctcacagtgcatgatatatcttttcattctgatcctgtgtttgcaaaaatatacacatgtatatcatagttcctcactttttattcatttgttttcctattacctgtagtaaatatattagttagtacatggaatttatagcatcagctacccccaggaacagcacctgacaggcgggggattttttttcaagttgttctacatttgcataaattatttctattattattcatgtatgttatttatttctgaatcacactagtcctgtgaaagtacaactgaaggcagaaagtgttaggattttgcatctaatgttcattatcatggtattgatggacctaagaaaataaaaattagactaagcccccaaataagctgcatgcatttgtaacatgattagtagatttgaatatatagatgtagtattttgggtatctaggtgttttatcattatgtaaaggaattaaagtaaaggactttgtagttgtttttattaaatatgcatatagtagagtgcaaaaatatagcaaaaataaaaactaaaggtagaaaagcattttagatatgccttaatttagaaactgtgccaggtggccctcggaatagatgccaggcagagaccagtgcctgggtggtgcctcctcttgtctgccctcatgaagaagcttccctcacgtgatgtagtgccctcgtaggtgtcatgtggagtagtgggaacaggcagtactgttgagaggagagcagtgtgagagtttttctgtagaagcagaactgtcagcttgtgccttgaggcttccagaacgtgtcagatggagaagtccaagtttccatgcttcaggcaacttagctgtgtacagaagcaatccagtgtggtaataaaaagcaaggattgcctgtataatttattataaaataaaagggattttaacaaccaacaattcccaacacctcaaaagcttgttgcattttttggtatttgaggtttttatctgaaggttaaagggcaagtgtttggtatagaagagcagtatgtgttaagaaaagaaaaatattggttcgcgtagagtgcaaattagaactagaaagttttatacgattatcattttgagatgtgttaaagtaggttttcactgtaaaatgtattagtgtttctgcattgccatagggcctggttaaaactttctcttaggtttcaggaagactgtcacatacagtaagcttttttccttctgacttataatagaaaatgttttgaaagtaaaaaaaaaaaaatctaatttggaaatttgacttgttagtttctgtgtttgaaatcatggttctagaaatgtagaaattgtgtatatcagatactcatctaggctgtgtgaaccagcccaagatgaccaacatccccacacctctacatctctgtcccctgtatctcttcctttctaccactaaagtgttccctgctaccatcctggcttgtccacatggtgctctccatcttcctccacatcatggaccacaggtgtgcctgtctaggcctggccaccactcccaacttgacctagccacattcatctagagatggttcctgatgctgggcacagactgtgctcatggcacccattagaaatgcctctagcatctttgtatgcatcttgatttttaaaccaagtcattgtacagagcattcagttttggctgtggtaccaagagaaaaactaatcaagaatataaaccacattccaggctgctgttttctctccatctacaggccacacttttactgtatttcttcatacttgaaattcattctgctattttcatatcagggtacagacttataagggtgcatgttccttaaaggtgcataattattcttattccgtttgcttatattgctacagaatgctctgttttggtgctttgagttctgcagacccaagaagcagtgtggaaattcactgcctgggacacagtcttataagaatgttggcaggtgactttgtatcagatgttgcttctcttttctctgtacacagattgagagttaccacagtggcctgtcgggtccaccctgtgggtgcagcacagctctctgaaagcaagaaccttcctacctattctaacgtttttgccctctaagaaaaatggcctcaggtatggtatagacatagcaagaggggaagggctgtctcactctagcaaccatccctccattacacacagaaagccctcttgaagcaaaagaagaagaaagaaagaaagcttatctctaaggctactgtcttcagaatgctctgagctgaatgctcttgctcctttcccaagaggcagatgaaaatatagccagtttatctatacccttcctatctgaggaggagaatagaaaagtagggtaaatatgtaacgtaaaatatgtcattcaaggaccaccaaaactttaagtaccctatcattaaaaatctggttttaaaagtagctcaagtaagggatgctttgtgacccagggtttctgaagtcagatagccattcttacctgccccttactctgacttattgggaaagggagaactgcagtggtgtttctgttgcagtggcaaaggtaacatgtcagaaaattcagagggttgcataccaataatcctttggaaactggatgtcttactgggtgctagaatgaaaatgtaggtatttattgtcagatgatgaagttcattgtttttttcaaaattggtgttgaaatatcactgtccaatgtgttcacttatgtgaaagctaaattgaatgaggcaaaaagagcaaatagtttgtatatttgtaataccttttgtatttcttacaataaaaatattggtagcaaataaaaataataaaaacaataactttaaactgctttctggagatgaattactctcctggctattttcttttttactttaatgtaaaatgagtataactgtagtgagtaaaattcattaaattccaagttttagcagaaaaa

SEQ ID NO: 5477 - protein, 29 aa, Homo sapien
PYKWFSAQLALVTRGHRKYLLESLATCAF

SEQ ID NO: 5478 - DNA, 2027 bp, Homo sapien
  Unsure 985: Unknown base
cccagctaatttgttacctacactctaattaataatcaataatttcttattttaaaaagtagtactatttaatataatcaagataggagatttaaaatgagcaagtgattcatttgctcttttaaagaagcccgttgacttacgcttttaaaaaagaagttggtgggttacctcaattattgttcatgcttaaacatatccatttgtacaggcttatttctacgtgggacccaatcatatatactatatttctcaaataatttttctaaaactctggcctatattctaaacacttgaccaacaccttagttattgaataggtaaccatttttaaagtacatgtggttcattttttaaaattcaatctctcaagaccgttagatatttaataatttaagctgataagggtatcaaaatgcacattaactttgatcatcatgatttaagttgtaactttgtgttattatataaatattaggttgtttataaatatattgcagaaagtattcttgttaagctcttttaaatgaggggactgtggtttagagttatatatttttgcttatttttaaacttcaattattccattcttctgccttataataaaacttttaaggcagagaactgaactaattatagaatttctcctttggagagttataatgttacatagtgaacattcttataaaagaaagaataagtttaagttgatgaatatttagctgcaaagattttttacttaaaaaaatccatgaatatctttgattttattataaagcatttgtaaattatttgcatttgagctgtaagattcataaacatttacatttcccaatgatttctattttgatttttaaaaaatatacagggcaagctacatttttaaagcattaatcaacaactttattatattacacattccagtgcacaaacacacaatatcatttaatactcacagtagtacctgtgaaatatatcagatggntattcctatctctattttacagcagaggaaaccgaaattcagagaacttacatttctaaggttgtacagctgcaaaatgaccaaattgtgaagtccctaacatccaggttttcataatgccagtactctttctatgacatgtttatgaccctccaaatgtaccaaaactacctaactaattcactgagaggaagccaactgcaaaaataggatttttaaaagtacaatagagtattactacattttatggatttcagacaaagaaacctccgtttattatatcctgatggtgagtattgccagctctaaattattcatatttctaagaccaaggaaaatataggtaaatgaaaattttgaaataaagaacaatgccttaatttgtaaaatctatcattgctaccaccctgcccaggtctggccatttgccataaatgctggtaaataaatacaatgactgatagagttctgtctcctttctcttttgctacccaaccttggttagagcaaccaaatgtctaaaaggcatgtaacaggagaaaaaaataaaaacattagtcaccaattcgccgattataaaagggatgtagattcctttaaattattactgaccttttgaaagccttcacgtaagtatgcaacagataaaatgactcatttacccacaacaataatctattatcagtcttaagtaatgtgaattcactgtatttctttttatacaacataaaaacttctgctttccaaacttcttccttttcactaatttatcagccactttatttatacacagataacacttttagaaacatttttctttcttgtccatttttttctttcaaaaataaagtttcttagaacctgataaaatggaaacttatggtaatatgtgttctggtaggtgtccaaaaattccacaccatagactatcaatgatatagccaaataaaggccattcaaaaaaatcagtaattgggattccttgccttatatctatggtatagtgtacccatttataacggggttctgccatcttcgaatt

SEQ ID NO: 5479 - protein, 8 aa, Homo sapien
PANLLPTL

SEQ ID NO: 5480 - DNA, 3928 bp, Homo sapien
ggcgccccagcccctggccaagcctctgctgtcatttctcctccctcctctcagtctgcagctgcgggacgggccgggctcctcagtttctgctgtgttgtgaccccacgaggcgctcagcacccagggaaggcgcgtgtgtccccgatgctggctcctccctgagccccgacggctctcgaggttctgagcctgtggcctgcacagggaacttcctctccgactgcatttatgcctctgtggatgtgaaggctatttctagaaatctcttcctttgcagaaacacccgaaaccctcctgccaggaagaccagggcctgggaagagggtcgctctccggccattctcccctcaccctcctcaccttcctcacatcctgtgccctgggggaccagcagctgcttccacccagaacaagcgggagcctgtgtcaggaaagcatgtcagagcagagctgccagatgtccgaactgcggctcctcctcctgggaaaatgccgctcgggaaaaagtgccacaggaaatgccattctgggcaaacatgtgttcaagtccaagttcagtgatcagacagtgatcaaaatgtgccagagagagagttgggtcctgagagaaaggaaggttgtggtaattgacacccctgaccttttctcctcaatagcttgtgctgaagacaagcaacgcaacatccaacactgcttggagctctctgctcccagcctccatgctctgctcttggtaattgccatcggccatttcacaagggaggatgaggaaacagccaagggcatccaacaagtgtttggagctgaagccaggaggcacatcattattgtcttcactcggaaggatgatttgggggatgacttgctgcaagatttcattgaaaaaaacaaacctctcaagcagttggttcaagactatgagggccgatactgcattttcaacaacaagaccaatagtaaggatgagcagatcacccaggtgttggagctccttcgcaaggttgagtctttggtgaatacgaacggaggaccctatcatgtgaacttcaaaactgaaggcagcaggtttcaagattgtgtgaatgaagctgcatctcaagagggagacaagccacagggcccaagggaaaggcagctgcagtccacaggacccgagcagaatccggggacatcagaactgacagtcctccttgtggggaaacgcggtgctggaaaaagtgcagcaggaaacagcattctggggaggcaggcctttcagaccggatttagtgagcagtcagtaacccagagcttcttgtctgagagcagaagctggagaaaaaagaaagtttcgatcattgatgctccggacatctcatctttaaagaacattgactcagaagttagaaaacacatctgtacaggcccccatgccttcctgctggtgacaccactgggcttttacactaagaatgatgaggcagtgctgagcaccatccaaaacaattttggagaaaaattctttgagtacatgatcatacttcttaccaggaaagaagatttaggggatcaggatctagatacgttcttaagaaacagcaataaagctctctatggtctcatccagaagtgtaaaaacagatatagtgccttcaactaccgggcaacaggagaagaagagcaaaggcaggcggacgagctcctggaaaaaattgagagcatggtgcatcagaatgggaacaagcattgtgttttcagagaaaaagaaaccctgaacattgtccttgtggggagaagcgggactgggaagagtgcgaccgggaactctatcctggggagcctcgtcttcacctctcggctccgggcccagccagtcaccaagaccagccagagtggcaggaggacatgggacggacaggaggtggtggttgtggacactccttccttcaaccagatgctggatgtcgaaaaggacccatcccggttagaagaggaggtcaagcgctgtttgtcctgctgtgaaaaaggggacacattttttgtcctggtgttccagctgggacgattcactgaagaggacaaaacagctgtggcgaaactggaggccatctttggagcagactttacgaaatacgcgattatgctgttcacccggaaggaagacctaggggcggggaatttggaagacttcatgaagaactcagataacaaagcccttcggcgcatttttaaaaagtgtgggcggcgagtttgtgcttttaacaacaaagaaacaggccaggcccaggaaacccaggtgaaagctcttttaacaaaggtcaatgatctgagaaaagaaagtgggtggtccgggtatccccatacacaggagaacgtcagcaaactaattaaaaatgtccaggaaatgtcccaagccgaaaaactccttaaaaatttaataggtattttacaataggtagccgaagtgcctggggtctcttcaattagagacaccctcaggttggggggaggggcggggcatggtacaacctgtgggaagggaagcgggttcatggctttgagggcctgagaggcaaatgcatcccgccttgtgatgtatcagctatttgtagataaataaattgcaggtgggggcgaatagtagggtattataaaggagaaagaagatacaaggtggggaaatctggaaaaagatttcagacattaggctgataataagtggtagaatcaagtcacaagaatcacctcacttgtgtaggtaggttggaatcaggatagacactgtgatcaaggctgaggccacctgggatgagaatatagatagtcgtacaacaacccaggggatccagatacatgagaccagggcagcgttcagcacactcctgggcatggcggaagcaggaagcagactccagagggcctccctgttgtccagggccgttggctccctgagctctcctgtctcctttgggatgcgacttagggctagagtgttcttttcttcacacgttagccattccttacggctcttcacgttccacgcctagatgtgaagtgggacatagtcttccattgctggctgtccctgaggaaacagacatgagtcttggaggttctgaatgattttattgctaattatcacagtgacatagactagaacagaaattagaagcatagtaagattgccaaaatcagagaatcttgcaaagttctgtaattctaagtgttgttctagatttcctctagagaaggttattagaatctccattgcgtttctctttctccttctctttcccttgaggttaggaaacaggttaaaactcagagaactccaataataatggtttaaaaacatcaggggcttcctgtatctcctgtcaggaagccgaggaataagcaggctggggctggtgggcgtcaacatcccagttttgttctatctttctgtcccacctgcactgggatgtggcttctacactcgaatttgcttcttggtttcaagacagtggtgttctttccatagctgagcagattattttgagaggtgggtgatatgtgagagagaaatctggaaccttcttctgggtagatacaggataagatagatacagggtaaaatgttgagcactttgtacatgctttgagagcataatctttgtcatctgtttttttcccctagacaatatcaggttaccgtcaacattaatccatttaaaaggacatggactgttgccattaatacttttggattccatataacccttaacacaataacttctagaaaatgtgtgtgccgtagacacaaagaagggaacaatagacaccagggtatacttgagggtggagggtggcaggagggtgaagattgaaaagctgcctattgcgtgttatgctggtttcctgggtgacaaaattacctgtacaccacacccctgtgacacacaac

SEQ ID NO: 5481 - protein, 665 aa, Homo sapien
MSEQSCQMSELRLLLLGKCRSGKSATGNAILGKHVFKSKFSDQTVIKMCQRESWVLRERKVVVIDTPDLFSSIACAEDKQRNIQHCLELSAPSLHALLLVIAIGHFTREDEETAKGIQQVFGAEARRHIIIVFTRKDDLGDDLLQDFIEKNKPLKQLVQDYEGRYCIFNNKTNSKDEQITQVLELLRKVESLVNTNGGPYHVNFKTEGSRFQDCVNEAASQEGDKPQGPRERQLQSTGPEQNPGTSELTVLLVGKRGAGKSAAGNSILGRQAFQTGFSEQSVTQSFLSESRSWRKKKVSIIDAPDISSLKNIDSEVRKHICTGPHAFLLVTPLGFYTKNDEAVLSTIQNNFGEKFFEYMIILLTRKEDLGDQDLDTFLRNSNKALYGLIQKCKNRYSAFNYRATGEEEQRQADELLEKIESMVHQNGNKHCVFREKETLNIVLVGRSGTGKSATGNSILGSLVFTSRLRAQPVTKTSQSGRRTWDGQEVVVVDTPSFNQMLDVEKDPSRLEEEVKRCLSCCEKGDTFFVLVFQLGRFTEEDKTAVAKLEAIFGADFTKYAIMLFTRKEDLGAGNLEDFMKNSDNKALRRIFKKCGRRVCAFNNKETGQAQETQVKALLTKVNDLRKESGWSGYPHTQENVSKLIKNVQEMSQAEKLLKNLIGILQ

SEQ ID NO: 5482 - DNA, 5085 bp, Homo sapien
ggtccgcgccctgtcgggctgagccgagttggcccacagagccggcgcgctcccgcctgcagggggagagcagacggggcgcggggaccggccaggccgcggcgggtgctgtttctgtttcactttccttcactctgaggccggcgcgctggcgggcgaggagcggcggcggtggcggccgctggacatgggaaagcggaaccaccaaaaggagtgatgatcaacgatctcatgataaatctggatgctagttctcatgcctcaggacatcctactgggaacgacacaccagctcctgggatcagactttcatctacttaggacccctctttgcccagactactaaagccagtcttcactagccacgaatggctacccaaaggaaacacttggtgaaagattttaatccttacattacctgctatatctgtaaagggtatctgatcaagccaacaacagtgacggaatgcctccatacattctgtaagacttgtattgttcagcactttgaagatagcaatgattgcccaaggtgtggcaaccaagttcatgagacaaatccattagaaatgttgaggttggacaatacattagaggaaattatatttaagctggtccctggactacgagaacaagaacttgagcgtgaatctgaattttggaagaaaaataagcctcaagaaaatggacaagatgatacttcaaaagctgacaaaccgaaagtagatgaagaaggtgatgaaaatgaagatgataaagattatcacagaagtgacccacaaattgctatctgtctagattgtttacgaaataatgggcaatcaggggacaatgtagtaaagggtttaatgaagaaattcattcgatgttctacacgtgtaactgtgggaactattaaaaaatttctaagtttaaaactaaaacttccaagttcttatgagttggatgtgctgtgcaatggtgaaattatggggaaggatcatactatggaattcatctacatgacaagatggcgactaagaggcgaaaagtttcggtgtctgaactgctcagcttcgcaagtctgctctcaggatggccctttgtatcagtcataccctatggtactgcagtatcgaccaagaattgatttcggttagaccaaggggcccagacctcactgagatgaatcctgcactatttgtttactcgtcaacagattgcacagttaacggtgtgtggactagaggaacacaaccagattttcagcatgcaaataaggccattgtctatctctaaattgtcagttgcattcatgttgtttctattaggagcaaaccaagtgccattctgctactgaaccatctgcataaggtatttgtgttgtctcaaagtgtgcaagtcatggtaaaaatcagttagctgtgccgccatgattcacccttctgaatattttgcttgcctgttccaagattgttctaatgtttaattacactagtaaaatggctcaatttttgtggtgttgcagttttcacatacttactcttttattcttgtttaaatagcgtactctacaagaaactaataattatatcttgaaattattttgtatggaagtatatttagaaaagtggtttttgagccactgtcttgttcttgataagctttttgtgtgaaaaaaagttcattcttgagtgtgcaagtccttttgccaagaattccaattattctgtaacattagagcacaatataattgtagacattctaagcatctgtccgtgtagtctaccaattgcacaaggaaggcatgttagccctccagattgaaaatgtatgtgacctcttgaactgaagttagattcccaaccattcaaaatgttggcagctgatcacatttacttctgataaaagtaatgtgtaagtaaggttaatcttctttcataatgccttatgacaagcaggtgctgcttcatgaaacgtcattgtatagcccatttcatgtatcattacattgttgctgttatttaatgagtgcattatttctctttttaagttggccttaggtatatgtcattgtggcatgcagagggttatgacgattttaaatattaggatttttagagcacataacattagctattttatggatttcaaaagtctcaaaacagttgtagattaaaactgttagttacctttcacatttccaaactatgtgcataaaatagaataaatgcagtatagaactatgctaaccaaaattaataggttaagggtattttattttaaatcctgtagtaattggggaaatgagaagattattattttatacatgagttcattaagatcagaaatacaaaatgtcctgtattttgcagttttgttaagtcttccattcgttttaggattagtctgcaagtcaaagaaagtcttgttaccttaaattatatgaaaactgtcattttaaatcttttaatatttacagttttcaaaaaccttacttggaaattgctttgaaacaaacaagctaacctttgaaacttaggaaaaaatcttgaaagttaggaaaaatatttgagaaatatgacgagcacaatctgtgtgttacacacatttagtttttatactgcatatgtggtaaatgtgtcacattttccagtaaaatgtatcagaaatcaatgccttctgaatttcaaaatgattcttagaaataagatattgtacaactctagcaaacatacaaagtacagctaaatcttaatatatttcactatgtaaaaggctgaaacttcataattatctgttccttctatctttttttgagtcaaaaagtctattaaatttttctgttgttgttccaactttggtgaaaaaggttatggcaatactttaactttgttttgttacattgtttttgttcttggaatggctcacaagcagaatttaaaaggcagattttcattaactataaatggctgaaaaaactgaatttactatctagctacagaaattatttttctatggtgtgaaactgttcccagacatccctaagaacttttacaaattattataaatttgtcacacctaggtcagcgattaaaatagtgttttgcaaatggaattttaattaactcaaaatgaattaagagtgcattttaaaaatcacaagtgagactttgatgttttggccccccagccaaaacttaatggtcataaatgaattttatctacaaaatctctttaaatttggctggttgccttgtcatatgtaatttcactattttccaaggaaatatataggaagcaattatgaaactgagaatagttttatatagaattcttttatttactgataatgcattaacatttttattgaaatgcaatggaatatgtgccaaaacacgtgaaaagcttacataaagaaaggcatcagttgtcgtttggagaaaggtacacatttttttgatggtcctaagtgatatggtattactactagaatcacagatttcttcaactgacttattttggtatattcaactacagctttctaaggataggactactttcatgtctagtaatacactgtattccccgttaattatcccttaagtcagattgtagaatttgcaagaaactaggtatagaaaaaatgtacaggcaacttttgtggttagctttataaatttagggtgcttataaaatgataaaatgaattctttaaataacctataggaatcatctgaatctgtaacatcagagactaaaactaaaagttttctttaatctgttgtttcttaagcaataaactgaaagacctttacttccataaaagattttgttatctcttttatctgccttagaaattataagtataaaagggtcaagggaacttagatataaagaatgactgtggtttataaacattactttaattgaagtaatcacatcagttaatagagaaatcaaaatatgtatggccttttctctagattagcaaaacagctttacaaagtatgaaaaaataaactaaaatgctcattgatgaggtaatactcagtctggagtacaggtaacttgggtaatgccttttaactactcttagaggagtatattatttctttatacattaaacatctatcccatagtaatgtgccacattttataaacgtaatgactttgctcaactacattacacactcaaatgtaatctaaatttaaactgattatttaaggaaaaaaagtgtgttatataatattgtgaactgtttagctttactgaaatatttaagagaaagtgcctcattactaaagtgcatttctgttttaaatttactgcataaagtttgagttatctgtacctgtctcttatgaatggtttcatatctaaataggctcttgtaagttaatttttttggaagattttcataagaatatagatatcaccaaagacattttacagtaaattaataaccatgttggagagacggttttaacagtttggaggttggaaatttttagattgcaatttaattttatatagttaggcaataaccttgattaattgctaaaatatcaccaaagaaaggctttaaactgaattttcttggtgagatcagtcaaatgcaggcttttcttgcaataatcagaacacacttcctttcaaatatgttcattgtttttcagcatcatctaacagatcttagtaaatctaaatcctcaaagatgagaaagaggtaaacacaacaaatagccttcctctgcatgaaaagtgagagaaatacatactttgaaaagaaagttcagatttttaatttgagagggtttttatttcatggaggcagtgttaactaaaattaagcttagatttagctcctgtattattcataatatgagaaattttattaaaggcagactttggtaaaagtgccaacacacttacttgtatagaaaagacttcattctatgggatttatataagtaagtgctttctctatattcaaaatatttcataaggacctgtggtttttttccccttaaaaagcaactctaggccgggcacagtggctcatgagagaccagctggttacatggtgaaacccatctctacta

SEQ ID NO: 5483 - protein, 256 aa, Homo sapien
MATQRKHLVKDFNPYITCYICKGYLIKPTTVTECLHTFCKTCIVQHFEDSNDCPRCGNQVHETNPLEMLRLDNTLEEIIFKLVPGLREQELERESEFWKKNKPQENGQDDTSKADKPKVDEEGDENEDDKDYHRSDPQIAICLDCLRNNGQSGDNVVKGLMKKFIRCSTRVTVGTIKKFLSLKLKLPSSYELDVLCNGEIMGKDHTMEFIYMTRWRLRGEKFRCLNCSASQVCSQDGPLYQSYPMVLQYRPRIDFG

SEQ ID NO: 5484 - DNA, 1983 bp, Homo sapien
  Unsure 805-831: Unknown base
  Unsure 1190-1230: Unknown base
  Unsure 1420-1546: Unknown base
gttccaaatgatcatgttttgtggcactgtcttcgtaaagtggccgctggtgtgatggaaagcattgctaaactcaagtgagacaactgctgttttgctttggattttccctgtgaaaagagaagccactgcctgttcgtcttgttagaaagacaagactttgaatgaagttccagactttgaatgaagttccagactttgaatgaagctggttgttgcccagagtagaagattcaggcacctacagcaactcacagcaactcctaactcttaggagggctccctcctattggccgtgaagctgcaaaccagcctctctcttttccctggatcttccttgcccctagttctgagccccagcccagaggcaggcctcatggctaataaaccagctagaggacagctggggcctgtggctccttctccatgttggccttcccttgtgtctcttgtccctgtaggagtgccttatagtactgtctcgtgcttctagtctagtctgaaccacttgaagcctgcaggacccttcaactaaatctggatccctttgcttcttccctgctggctactcttcatatagatgctcttggagcctgtgcattccatgatgcatgtcagaactctcaccttgttcagcctggtgtgccttaacctcaggagtaaagggaatcatgtcggaaacacgtcgttaaagtagaatggtacaaacattggcttcttagtgccattagcacttttaccaggaaatgcaaaagatgcaaccacataatgttttcactttgttttatgctgttcttcaatcgcnnnnnnnnnnnnnnnnnnnnnnnnnnntcattaaccaaactcaggggaatgtcatgatgtcaccaaggccaatgggtagagaaataaaaaccagccatccataattgaatctgtaaagtcagtgaacttagccttttcaggttcaaaattacacaaacacaaggattttcttatctttcacctttcaaaggttttctttttattttgccacctgttttccaaataagaagtgggaagcctcttagataaattgtgataaaaatgtctctttgtttggcgtgagctatcaaattagctttgtgtgtccactgagccatcaaattaggctttggctgctggaggcctaggttctagctttggtcacctatcagaatcttactgttacnnnnnnnnnnnnnnnnnnnnnnnnnnnnnnnnnnnnnnnnnaggctgaagtgggtagatgcttgagcccaggagcctatgcaatatggtgagacccatctcaaaaaacaaacaaaaaaagaagtagaatcttactgtgaatagctactagcctaccctagaagatatatattttaaatctgtttcttaggaatagtagctaaaagaaggaatggccaaaggagggaaagtnnnnnnnnnnnnnnnnnnnnnnnnnnnnnnnnnnnnnnnnnnnnnnnnnnnnnnnnnnnnnnnnnnnnnnnnnnnnnnnnnnnnnnnnnnnnnnnnnnnnnnnnnnnnnnnnnnnnnnnnnnnnnnntatatatatatacttttttttttaaaggagagaaaatgcttaggttgcaaatggagagtattgaacgtggtgatgtaaaaaacttctgcaaaacttgttctgtagctcctgggtcaggtctatgccattttttcttatatctgctcacacagtacagaaatgactaaaattttgggtctgggctgttatatcactttgtgttaagttatttgtagtagctaatgtgctaacttatatatgtgttctttctgttttttggattttaccttttgttttggcataacttatctatatttttgtttacattattttaaaaatatcagtaactgtaataatataaaattgaagttgtattgttgacaatacctctagtttttaaggtcatctgtcacataatttaagtgcaccagttcctaatgtataaagttctctctctc

SEQ ID NO: 5485 - protein, 26 aa, Homo sapien
VPNDHVLWHCLRKVAAGVMESIAKLK

SEQ ID NO: 5486 - DNA, 1042 bp, Homo sapien
cgcagagtccttctgtcggttggtcctggagcggcgcagccggagtggggccgtgagatcttattcagggcttctcagcctgaacccccaaccagattaatttctccacagctggaattccaagtgcttggggataatgatacctctgacctttcttccttttgggaagtacttgagtgtgcagctgcatgaggcctcagcaggagagagattttaggtccaagaagctataccagtaggacaaggcaggaaaatactacactttcaggatcaagcccctctgactctcatttggaaactggatgtttgctaagcacctgcttcttaaggatgccgagggatttaatgatactcccagaaacctggagagattaatggggcctatggagaagtgctctgaactcagtgttgggacttgaataaaattaaccattgtcatgttttcagaacaactaagctgttttatatttcatgtgcatgaaagccctagaactaagttgtgttatttccagaaatgaaatagatcccacagttagatgatgtggccattaggaagtaccaaatttataaaaatcactggaggtctgtctgagcagtacctaataaaatatagtatactgaaagtgaacagatactttgtctctttctttggctgcttgatactttatctgtgtactgccgtacagtgcacccttaaagtattctacaccagtgcttctcaaacttgaatgtgcatgtaagtcacccagggtcttgttgaaatgctgattctgatttggtagatctaggatgggacctgaatgcatttctgatttgcaggtgatgctgatgttactgaactacacttttagtagtgaggtttcatacacgaagacaaagtttctctgtgaaaataggaaggtggtggttagccttatatttttttattttatctttatccagacacacatcccttaaaagtttgtacaaggccatagtcccctttattagttatactcaattagttattctagcacatagctttttaaatattggccaaact

SEQ ID NO: 5487 - protein, 63 aa, Homo sapien
RRVLLSVGPGAAQPEWGREILFRASQPEPPTRLISPQLEFQVLGDNDTSDLSSFWEVLECAAA

SEQ ID NO: 5488 - DNA, 1049 bp, Homo sapien
tttttttacaacttttcagaatagatgaacactgaagcttcagtgtttaaacctctcctggtgttttgtgctcaagaagttggtatcgggttgttttaacagtcgtcatctttatcaagtaatacggaaaaactgggcagagcttttaaagaatgaatgacgatgacacaggcgttttctgcttacagatttcctcacatccttattaggctattaggatcagctctgtcgtgtgctcagttttcatgttttcttcttcatgtgaaggttgtagctcaagaaggattgctgtactctgatattctcatcagagtttcagagtccatctgatttctttcagcagtaaagattgtaactactcattggcttttagctagcatttcatttttaatggctctaccattttaaaattctccattctttcatggagatcagtttatcccagggacgtgtgtgtacacgtgtgtttataaagaacagtggatgagctgcttcactcaggttttcaacagcagcctgaaactctacttcatacaattttatatcaagtcagcttttctctgtggccagaccctccgtcttagtgtttctttcactggtggctgggaaggcatcccttcagtggggaaggcactgtgcctcatgtttaaaatgttctgcattctcctacagagtttcttgtgtgggatgatgtattctgtgatccaactctgaccagctgaaatcattttctaattttagcataaagcatacttcctttgactttttcaagaaaggagaaacaaaaccagacactgctttgacgttgttgctagaagggatgtcttacataattttatccatctatacattatttcctatgaaaagatgaccttacagtggcttcatagcatgacctgcatctcacacaattccctcccccatgcagggactagaatgtgatcgttgcaggaagttgatggcttctattcttgaaattgtggcattagctgctgtgtggccgtccctctcagcctgtgttttggaggtcgcgcacttcctcagaatgc

SEQ ID NO: 5489 - protein, 41 aa, Homo sapien [sequence omitted]

SEQ ID NO: 5490 - DNA, 1309 bp, Homo sapien
caaccaaagccatttcatttggctggggggttggggagtggggaggaaaacaatctttattttaccccatctattgaagagtattattacatttgaaataaaacttccatcagtacagataaccacatgtgcaatgttgggatgttattttgggcttggcttatcgagtagtcaatggaaggattcccgtcccctctctcggcagcttagtaactgctgtagccagctcggctcccttccctgtgtatctgtgtcctgctaacagccaagagatgttgcaagggaggaaatgtgagagaccttgaacctgtcaggtttatttgttttgtttttaaaggcatgttgaagtttagttctttacccttctcctaaaatctttttttaatcagcctcaaggttaaaataaggagtgactacagtatgtaaaataaggaaaggaagcattaatggtgtgatgtgacctgcctgtttttttgtaaacaagagaataggaaatgttttcaaggtagtttcacatgtcttgcaccaagctcatgcctcttgcttttcctttttgactttatctccctcagtttttcttctgctgtggccagaaagacagtcactacagttgactattgatacaaaggtgcaacagaaatattatccctgcatttttaaatataagaagtagacattaattttaccatggtgcctccctaatgtaagtgatatttattggtggttttcaacaaaggttaactattaaagaaagaaatatttgtctttatcttccttttccccttgcctcagtcgtgttattcacccctattcttgatattttaaaggaggagattcagtagcattttcctttatattatacacatgtgtctatcccatttcaaggctcaagtcttacccccacctctcgctcccaataggaaataaagaccatttctgcccttagttgttttacatgcaagataagtgctttccttctccctggactgaaagacttgtttgtatttctacatctagtacttgggaaatagacaatcactgtactttgagtgtttatatctttatatctagggacactgaaaagtaaatgttgctttactacaatttttttttaatttagtgtcttaccccaaggcatactcaactgataatctccagctagatgagtaaaacagtatgtgtttagttttccagagaattctagcaagttcatattttcttccaagttagtatagaactaactataggaagtatggggttgctttttcctccagtagaatattaaagatgggggagggtgggcaatgta

SEQ ID NO: 5491 - protein, 86 aa, Homo sapien
NQSHFIWLGGWGVGRKTIFILPHLLKSIITFEIKLPSVQITTCAMLGCYFGLGLSSSQWKDSRPLSRQLSNCCSQLGSLPCVSVSC

SEQ ID NO: 5492 - DNA, 1426 bp, Homo sapien
  Unsure 1356: Unknown base
  Unsure 1392: Unknown base
cgatggctgatggggcaaccgccaacggctgtggcgtttaaacccaagccgcagccgctgctgctcgccgagctcccggagctgggtgggggtgccccacgctgaaagagagtgatggagtgcccagtgatggaaactggctcactttttacctcaggaattaagagacatttgaaagacaaaagaatttcaaagactactaagttgaatgtttctcttgcttcaaaaataaaaacaaaaatactaaataattcttctattttcaaaatatctttaaagcacaacaacagggcattagctcaggctcttagtagagaaaaagagaattctcgaagaattacaactgaaaagatgctattgcaaaaagaagtagagaaactgaattttgagaacacatttcttcgcctaaagctaaataacttgaataagaagcttatagacatagaagctctcatgaacaataacttgataactgcaattgaaatgagcagtctttctgagttccatcagagttcctttctactgtcagctagcaagaagaaacgaattagtaaacagtgcaagttgatgcgtcttccatttgcaagggttccattaacttcaaatgatgatgaagatgaagataaagagaaaatgcagtgtgacaacaatattaaatcaaagacattacctgatattccctcttcaggatcaacaacacaacctttatcaactcaggataattcggaagtgttatttcttaaagaaaataatcaaaatgtatatggtttagatgattcagaacatatttcttctatagttgatgtacctcccagagaaagccattcccactcagaccaaagttctaagacttctctaatgagtgagatgagaaacgcccagtctattggccgcagatgggagaaaccatctcctagtaatgtgactgaaaggaagaagcgtgggtcatcttgggaatcaaataatctttctgcagacactccctgtgcaacagttttagataaacaacacatttcaagtccagaattaaattgcaataatgagataaatggtcatactaatgaaacaaatactgaaatgcaaagaaataaacaggatcttcctggcttatcttctgagtctgccagagaacctaatgcagagtgcatgaatcaaattgaggataatgatgactttcaattgcagaaaactgtgtatgatgctgacatggatttaactgctagtgaagtcagcaaaattgtcacagtctcaacaggcattaaaaagaaaagtaataaaaaaacaaatgaacatggaatgaaaactttcagaaaagtgaaagattccagctctgaaaaaaagagagaaggtcaaagngaccagttttaaaatagttcagattgtcggtttttnggggaaaggttgaaaacagggcagaaaggtcctg

SEQ ID NO: 5493 - protein, 474 aa, Homo sapien
  unsure 35: unknown amino acid
  unsure 452: unknown amino acid
  unsure 456: unknown amino acid
  unsure 464: unknown amino acid
RWLMGQPPTAVAFKPKPQPLLLAELPELGGGAPRXKRVMECPVMETGSLFTSGIKRHLKDKRISKTTKLNVSLASKIKTKILNNSSIFKISLKHNNRALAQALSREKENSRRITTEKMLLQKEVEKLNFENTFLRLKLNNLNKKLIDIEALMNNNLITAIEMSSLSEFHQSSFLLSASKKKRISKQCKLMRLPFARVPLTSNDDEDEDKEKMQCDNNIKSKTLPDIPSSGSTTQPLSTQDNSEVLFLKENNQNVYGLDDSEHISSIVDVPPRESHSHSDQSSKTSLMSEMRNAQSIGRRWEKPSPSNVTERKKRGSSWESNNLSADTPCATVLDKQHISSPELNCNNEINGHTNETNTEMQRNKQDLPGLSSESAREPNAECMNQIEDNDDFQLQKTVYDADMDLTASEVSKIVTVSTGIKKKSNKKTNEHGMKTFRKVKDSSSEKKREGQXDQFXNSSDCRFXGERLKTGQKG

SEQ ID NO: 5494 - DNA, 1568 bp, Homo sapien
  Unsure 104: Unknown base
  Unsure 112: Unknown base
cattagatttcacttttttaaaaaacccagtggacattgctataaataagatttatttggctacaaataacctgggatgttgcttattatgattgatgcctgcnggtttgtncccaagctgagtgaaattgaacctcgtcctccctactcattttgatgactgaggctggtttataagaaaaggaagtttggagaagaaaaccgagattagaaaatatcatgttttggttggagataagaaccagggatggcaagtaccagtgtgtacaaatgtatttcacggagtttgaaggaacgcataatcaagagggaaaacaatttgtccttcattggacgtattatttggatttgggtgagcaacaaaatggaatgtggtctgttaggagcattctgtttgttcttttgtccctgatgtgatgaatcattgccacatgctagatggactcttcatatccaggttttgtccctcagggctgagcactgtattaaagagtttttgttgagtcatttaaccttagtgtccacatccagatcagctgtaaaatggggaagacgtgtgctgatttggaatgaatgcaaaatatcactatcattttcctaattacagaggagcaaaggttatcttcagccctttcagttctatgctcacatattcaaatatcaaatgtaatttagctgaagttatttaataatcaagtctttcaatatctgttcaaagaaaaagaacacactttgaaaattctgcaaagctgtctcccagtctttaaaatgtctggaagcactctccttctttacaataccaacatcactggcccagaatcttccctgtgctaggttgtaaatataaataaattacttgttttgtaaacttttgtaaagaatattttggtagaaatacttcaaacatattctttgggttatatttatacatatgtgaaataaatatactatcaaaaggttatattttatacaaaaagtaaattgctaccttttgtatgctaatatgcaaagttttgtataatatgatggtttatttttagctctacacttaaaccataggtggttgagtgggaacttttgaaaactatcaagaggcttgttagacaaatttatattctgaaacctcaataagaaagcattccaggtttcaatccttgttttttgtcctgctcccaaattcttttttaaacccatagttcttgtgtcttatttgattcttctgctgtgcacattgtattggtccttgttgcatgtagtctactgtgtgttttccgattttataaggcagcatttctccatacaaaaaraaaaaaaatgatgtacatataaacgcttttrttgtatggctcctccatgttactgtatatatctgccagcacttcccagttacactcctgtgagtcagcttatttttaccctaacataaatagtatgttttgtagtagttatcaaatttaagagataaagcaatcagaatgtttggattttcttctatcttaatgtgaatttcataattaatgtctatttattcagctattcattaaaatacaggattctttggggaaaaa

SEQ ID NO: 5495 - DNA, 2320 bp, Homo sapien
gctcagtgggggcggctactgctcatgtgattgtggagtagacagttggaagaagtacccagtccatttggagagttaaaactgtgcctaacagaggtgtcctctgacttttcttctgcaagctccatgttttcacatcttccctttgactgtgtcctgctgctgctgctgctactacttacaaggtcctcagaagtggaatacagagcggaggtcggtcagaatgcctatctgccctgcttctacaccccagccgccccagggaacctcgtgcccgtctgctggggcaaaggagcctgtcctgtgtttgaatgtggcaacgtggtgctcaggactgatgaaagggatgtgaattattggacatccagatactggctaaatggggatttccgcaaaggagatgtgtccctgaccatagagaatgtgattctagcagacagtgggatctactgctgccggatccaaatcccaggcataatgaatgatgaaaaatttaacctgaagttggtcatcaaaccagccaaggtcacccctgcaccgactctgcagagagacttcactgcagcctttccaaggatgcttaccaccaggggacatggcccagcagagacacagacactggggagcctccctgatataaatctaacacaaatatccacattggccaatgagttacgggactctagattggccaatgacttacgggactctggagcaaccatcagaataggcatctacatcggagcagggatctgtgctgggctggctctggctcttatcttcggcgctttaattttcaaatggtattctcatagcaaagagaagatacagaatttaagcctcatctctttggccaacctccctccctcaggattggcaaatgcagtagcagagggaattcgctcagaagaaaacatctataccattgaagagaacgtatatgaagtggaggagcccaatgagtattattgctatgtcagcagcaggcagcaaccctcacaacctttgggttgtcgctttgcaatgccatagatccaaccaccttatttttgagcttggtgttttgtctttttcagaaactatgagctgtgtcacctgactggttttggaggttctgtccactgctatggagcagagttttcccattttcagaagataatgactcacatgggaattgaactgggacctgcactgaacttaaacaggcatgtcattgcctctgtatttaagccaacagagttacccaacccagagactgttaatcatggatgttagagctcaaacgggcttttatatacactaggaattcttgacgtggggtctctggagctccaggaaattcgggcacatcatatgtccatgaaacttcagataaactagggaaaactgggtgctgaggtgaaagcataacttttttggcacagaaagtctaaaggggccactgattttcaaagagatctgtgatccctttttgttttttgtttttgagatggagtcttgctctgttgcccaggctggagtgcaatggcacaatctcggctcactgcaagctccgcctcctgggttcaagcgattctcctgcctcagcctcctgagtggctgggattacaggcatgcaccaccatgcccagctaatttgttgtatttttagtagagacagggtttcaccatgttggccagtgtggtctcaaactcctgacctcatgatttgcctgcctcggcctcccaaagcactgggattacaggcgtgagccaccacatccagccagtgatccttaaaagattaagagatgactggactaggtctaccttgatcttgaagattcccttggaatgttgagatttaggcttatttgagcactacctgcccaactgtcagtgccagtgcatagcccttcttttgtctcccttatgaagactgccctgcagggctgagatgtggcaggagctcccagggaaaaaggaagtgcatttgattggtgtgtattggccaagttttgcttgttgtgtgcttgaaagaaaatatctctgaccaacttctgtattcgtggaccaaactgaagctatatttttcacagaagaagaagcagtgacggggacacaaattctgttgcctggtggaaagaaggcaaaggccttcagcaatctatattaccagcgctggatcctttgacagagagtggtccctaaacttaaatttcaagacggtataggcttgatctgtcttgcttattgttgccccctgcgcctagcacaattttgacacacaattggaacttactaaaaatttttttttactgttaaaaaaaaaaaaaaaaaa

SEQ ID NO: 5496 - protein, 301 aa, Homo sapien
MFSHLPFDCVLLLLLLLLTRSSEVEYRAEVGQNAYLPCFYTPAAPGNLVPVCWGKGACPVFECGNVVLRTDERDVNYWTSRYWLNGDFRKGDVSLTIENVILADSGIYCCRIQIPGIMNDEKFNLKLVIKPAKVTPAPTLQRDFTAAFPRMLTTRGHGPAETQTLGSLPDINLTQISTLANELRDSRLANDLRDSGATIRIGIYIGAGICAGLALALIFGALIFKWYSHSKEKIQNLSLISLANLPPSGLANAVAEGIRSEENIYTIEENVYEVEEPNEYYCYVSSRQQPSQPLGCRFAMP

SEQ ID NO: 5497 - DNA, 449 bp, Homo sapien
  Unsure 42: Unknown base
  Unsure 355: Unknown base
  Unsure 449: Unknown base
tttaatttgaactgctaattgaacatgaagagtgaaaattanacacctagttcgtccggtttaaatggtcactaagactgtataggcaatttcaaaatgggcactgtaactaaaagaaagcaaacctatttagagctgaacgagactcttgcactgggttttgcttgctctaagtgacaaagtaagctgatgctcatagcacattggactacagcaagagaaagggggagaagcagatggagcatctccttcactgtcatgagcccagtgagtaaaaggagtgaggaaaccctcttttgtccacagatttacaaatacaaaaaaataaataatattctaagacagtacaaatgcnaatactgttcccttgtgtcaattacatacagcatgcctacaaagagagaatggtaattcttcttcattcacagacaggacacatggcagtgcan

SEQ ID NO: 5498 - DNA, 2121 bp, Homo sapien
  Unsure 1892-1909: Unknown base
gaaagaatatcctaggcagagggaagagctcttagagacctatagtgagaataagcttgatatatttgagggactaagagaaggtaagtggcttaatgcctggtggggaaagaggaatgccatacaatgagggtaggaagtaagcagaggcttacttacattacacagcagagtgtgttttcatcagaatgttataagaagctgttctgagggttttaaacaaagaggtgacctaaatattttacattttgtaaatcctttggtacaggagataagtgggcacaagtgaggaatgatgtttgtacagcagtgatagtaatggagttggactggcaaggatggatttgagatacattttgaacttagatggtaagacttgcttggtactttgaatgcggacattggagttaaagagcagaatcagagatagcttagattctttgacctaagcaaaatgacagataagtagtgccagttactaagatggctgaggatttggagagaaaaatgaagcattttgttgtgctaatttcagatatgcctacgagacatcccaggtagagctgttaatgaggcacttatcgtcctgaggtcaaagagtaggactgaatataaagatttgggcatcattggttttaagtggaatgtaaagcatgtgactgggagagtatgtggtaaacaatggaaggaagccccagaaaagccagccagaggaagaagagccagcaaaggaaatgaagaggtctttgtgatagaagaaaaccagcagagaggtgtcatggaagctaagaagaaaatgatttttagaagagagtgctcagctgtccttttatgaaaaagcaacctatacccaaaacttagttttaaaagcccaaattacaagattttggactctgtaatattccctatgtacttcaaacatgtagtgagaaaagaatgttgaaaattagcttagtgccacagagtggtagaggcctttgagagaggggagagtagatagtgctgatagataggaaatggataggaagctctgctgttaccatccttataggtctcttcttttttgcttttcattttcttctcttgaatatcagtacactagcagcagtctctcatttggtaccacctttccaagtatctgtgtttctaaaagttctgcgttctataacaaaaataggagagtcagacttcagcaaaactccagctcccttcaatccactcacagtttaactacttctaccgggcattagtggcattttcttctaaaaatcagacatctgttttgcttaacaaagtagactttttaactatacattgatactttgtactaattagttgattttaatttaataatttaataattaatgacagcaacttcaagtagtgctgccagtctgagcagtacacaatgcctgtgtacctatttacttaaaactggcaaatttaatatctctgttctgtctgaaaactattttacaaaaacaattatgtttttatttggttactccattccagtaactgcaattactttacctttagaagttatatagcatgaaataatagtgattggtagcatgattcaattgaatttatttcctacaggaaattttgttagaagttatgttaatatgctaatgacttaagagtttctccctatctttttgaaaatcgacaagaactgttttagtcctcatatgatactggttgttgagactttttgaggaatgttttgagtagttttcttggttgtgtggattgtttggaattatgtggtagcttagaagcatggtaaagatgcttttaatttgcgtatttttatatagtaatgtctaacatggaattatctttacaggaaaaaacaaaaaagaaaaagaagcataagaaacacagtnnnnnnnnnnnnnnnnnngctgctagttcaagtcctgactcaccataacattaagaaaaatcaggattcccttataaagaaagtgcaatgtctgaggaaatttcaactgtgaaaactacaacatatttactaaaatgcatgaattttcttgtttttggaattattcctggactattcagtagccactcagatgccactgtgtgaaagggccataaatgttgcctgctgct

SEQ ID NO: 5499 - protein, 42 aa, Homo sapien
KEYPRQREELLETYSENKLDIFEGLREGKWLNAWWGKRNAIQ

SEQ ID NO: 5500 - DNA, 881 bp, Homo sapien
aaataataatagggaaatgcccttggtccacagactcagctgtcttccagatgctagtcattggtgaatgaacaacaagagagcctgcactgtcttgtgtgaaggtctaggtattttgggtctttgtcttgataaaatcagaatagacgtggcctctcactatcagctaggaagcagtttgaacttggagtatcagagggttgctctttttgccaagcctctggcttcaatccttgcctggggatggcagtgctgctgagggaaggaagtggggaacactgtgagtgcaaggacaggtgaggcaggcacagacggctgtcccaagggaaagtgctccatcagctgtgccaggagagaagcagctcttgggtccgtgtttctgccttagaaggcaggagttgggcatctagctccagcactcatccctcttgaaactgctggtttgtttactttcattgcaactatatgcctggaagagatgaagagaaagctcaacaggcttcactaggattgtttgggtggggtggcagcagctcagatattttccctcctctgtttttcataggctttttgtaatcgtgttataatactttaatggaaaaaaataaatttattattttaaagctataaaaattataaatcagtcattatgatgtgtttttctctactgagccctctggtgtgttccctgttttattaacgtggatggagggtgtgtcagggaggttgggacagaggcagagaagaggccagcccggccttcggggagttcgtggcctgtctggaaagagggtcttttacataccagcagtttgcagagccagacacagaacgatagagcaggaccttttaaactccttttcaaaaaaaaaaaaaaaggg

SEQ ID NO: 5501 - protein, 57 aa, Homo sapien [sequence omitted]

SEQ ID NO: 5502 - DNA, 1038 bp, Homo sapien
cttcctattccctgaatcactagcagtaggtgcaatataattctgttaccagaaggcaactggctccgggtagaaacttccggataacagcattatattgcacctactgcttcctattccctgaatcactagcgctcccgaaggcttggagggaggagtctctgggcacccgggtgaaaggaaggttcacgtgcaaccgccgcgtctttttttccctgaagcgctttcatggaggcagatgtttgtcagtcaagggaagtaagaaaggcattggatgaaaacgaagccctaagcctcgtagtcgtggccgagtggttaaggcgatggactagaaatccattggggtctccccgcgcaggttcgaatcctgccgactacgtcatatttttttcttcagcatactgaccatatttctctccaggatgggatgatccagtcggcaccctccaaacctctcatctaggaactctagaatcgagaatttgatttagagtctatgattttggtttgaaatctatgattaacgtctttggacattgaaggaaatccgaggaatggacaagtgatgcaagagccagttgagttaccaaattagttctagaaagatctgaaaaagctcggtccgggttcctagctctatattcttgtagatgaatttcaggaacctttatggcagcttcggcgccgtggcttagttggttaaagcgcctgtctagtaaacaggagatcctgggttcgaatcccagcggtgcctttattcaattgaaacagcgtgattttgcggctaaatccacatcctttcatgtattgtttttatatcagaacgcgtaagagtttctgttctgcactcatagcacccacatttcctgcagagtcaagctgccactcccatgagatcgccactctaaaaggtggttctctaacttaggggcagaaatgttgcataggcctaagggtcctttgcttaactgatgccacaccccactggtgcaggtggactgggtcaggcggccgccccaccctcgatggaaggggctg

SEQ ID NO: 5503 - protein, 22 aa, Homo sapien
MPHPTGAGGLGQAAAPPSMEGA

SEQ ID NO: 5504 - DNA, 1923 bp, Homo sapien
atgggtgagagaactcttcacgctgcagtgcccacaccaggttatccagaatctgaatccatcatgatggcccccatttgtctagtggaaaaccaggaagagcagctgacagtgaattcaaaggcattagagattcttgacaagatttctcagcccgtggtggtggtggccattgtagggctataccgcacaggaaaatcctatctcatgaatcgtcttgcaggaaagcgcaatggcttccctctgggctccacggtgcagtctgaaactaagggcatctggatgtggtgtgtgccccacctctctaagccaaaccacaccctggtccttctggacaccgagggcctgggcgatgtagaaaagagtaaccctaagaatgactcgtggatctttgccctggctgtgcttctaagcagcagctttgtctataacagcgtgagcaccatcaaccaccaggccctggagcagctgcactatgtgactgagctagcagagctaatcagggcaaaatcctgccccagacctgatgaagctgaggactccagcgagtttgcgagtttctttccagactttatttggactgttcgggattttaccctggagctaaagttagatggaaaccccatcacagaagatgagtacctggagaatgccttgaagctgattccaggcaagaatcccaaaattcaaaattcaaacatgcctagagagtgtatcaggcatttcttccgaaaacggaagtgctttgtctttgaccggcctacaaatgacaagcaatatttaaatcatatggacgaagtgccagaagaaaatctggaaaggcatttccttatgcaatcagacaacttctgttcttatatcttcacccatgcaaagaccaagaccctgagagagggaatcattgtcactggaaagcggctggggactctggtggtgacttatgtagatgccatcaacagtggagcagtaccttgtctggagaatgcagtgacagcactggcccagcttgagaacccagcggctgtgcagagggcagccgaccactatagccagcagatggcccagcaactgaggctccccacagacacgctccaggagctgctggacgtgcatgcagcctgtgagagggaagccattgcagtcttcatggagcactccttcaaggatgaaaaccatgaattccagaagaagcttgtggacaccatagagaaaaagaagggagactttgtgctgcagaatgaagaggcatctgccaaatattgccaggctgagcttaagcggctttcagagcacctgacagaaagcattttgagaggaattttctctgttcctggaggacacaatctctacttagaagaaaagaaacaggttgagtgggactataagctagtgcccagaaaaggagttaaggcaaacgaggtcctccagaacttcctgcagtcacaggtggttgtagaggaatccatcctgcagtcagacaaagccctcactgctggagagaaggccatagcagcggagcgggccatgaaggaagcagctgagaaggaacaggagctgctaagagaaaaacagaaggagcagcagcaaatgatggaggctcaagagagaagcttccaggaaaacatagctcaactcaagaagaagatggagagggaaagggaaaaccttctcagagagcatgaaaggctgctaaaacacaagctgaaggtacaagaagaaatgcttaaggaagaatttcaaaagaaatctgagcagttaaataaagagattaatcaactgaaagaaaaaattgaaagcactaaaaatgaacagttaaggctcttaaagatccttgacatggctagcaacataatgattgtcactctacctggggcttccaagctacttggagtagggacaaaatatcttggctcacgtatttaa

SEQ ID NO: 5505 - protein, 640 aa, Homo sapien
MGERTLHAAVPTPGYPESESIMMAPICLVENQEEQLTVNSKALEILDKISQPVVVVAIVGLYRTGKSYLMNRLAGKRNGFPLGSTVQSETKGIWMWCVPHLSKPNHTLVLLDTEGLGDVEKSNPKNDSWIFALAVLLSSSFVYNSVSTINHQALEQLHYVTELAELIRAKSCPRPDEAEDSSEFASFFPDFIWTVRDFTLELKLDGNPITEDEYLENALKLIPGKNPKIQNSNMPRECIRHFFRKRKCFVFDRPTNDKQYLNHMDEVPEENLERHFLMQSDNFCSYIFTHAKTKTLREGIIVTGKRLGTLVVTYVDAINSGAVPCLENAVTALAQLENPAAVQRAADHYSQQMAQQLRLPTDTLQELLDVHAACEREAIAVFMEHSFKDENHEFQKKLVDTIEKKKGDFVLQNEEASAKYCQAELKRLSEHLTESILRGIFSVPGGHNLYLEEKKQVEWDYKLVPRKGVKANEVLQNFLQSQVVVEESILQSDKALTAGEKAIAAERAMKEAAEKEQELLREKQKEQQQMMEAQERSFQENIAQLKKKMERERENLLREHERLLKHKLKVQEEMLKEEFQKKSEQLNKEINQLKEKIESTKNEQLRLLKILDMASNIMIVTLPGASKLLGVGTKYLGSRI

SEQ ID NO: 5506 - DNA, 610 bp, Homo sapien
cgtcgacggaaaatctcagcaaactgtactgactcctagatggagcaagagcataggccactattggcgaaggactctatgtagctctaagctacatagagactccttgataaaaaccactgggaactgctcttcaaagactgggacagtgatacgaagtgtaccctgaaagtcaggacaatttgagaggaaatatcagatgaaagcaaaacattcaaggaattattggatgaatttccagttgttactataattatagataggcatacaagagcttcttgtgtcccaaaggaaatgtgcctgagaaatttttagaattaagacagaattaaggcaacaagatggaagataacagaagagagccaggcaggacagtgataaatggaatccaagctcagatcagctgttaatccaattagaaaatgcaagccagttaagattatctaactcagaaaggtgagggcggccaagattttttggacaatggttgcttttggcagaccaaaacctactgacttatctctcacaactgaagtccccattagataaatctagaaccaaatgttagataagcacatgtccggcccagaaaagagagaaagttaaaaaa

SEQ ID NO: 5507 - protein, 55 aa, Homo sapien [sequence omitted]

SEQ ID NO: 5508 - DNA, 990 bp, Homo sapien
  Unsure 107-129: Unknown base
gcgccgccgcggaccacctaaaatggccgacggaagaacggcgcgtcccggtcacgtgacgcgagagcgcgcccttcgcgcgtccccccacccctatccccctagtnnnnnnnnnnnnnnnnnnnnnnntcggtcccgccctctcgctaccctttataccttcctctcacgctccgcgttgcacagccttgggggcctttaaaaggaaccggaagtgtcgtgagctaagacagtcgcgcggggaccatcgagaacaaggagtgctgtttcgaagtagcggctagaggggccccctgcctccgcccccgcccttccgaggattcctggagtccactcacccctccccaccactccagtagcggcgggagcagcagcgttaggccggggtgtggctgcacctctgcgaaggctgtcgtgccccgtgcagctgcggcgttcgggtgggggaggggaggctcacaccctgcggcggcttaagcctggatttacgcactggaggagggaattagccctgagatgtcagccctgtgcccctggcgctgtccacccggacgcccgcggagcgccaggcgccgcagcggaccgcgcgcgcactgattgccgcagctactctccctgccgtcgccgcccgggaccgggtgacattgaggttttcgtctatcgccgctgggccgatagggcttctttttaagatttggctttccaagtaagatttttgtttgcctgcttttctcctggaatttttttgtttttggtcgaagaagcaggtaacttgcatatcttaaggaaaacattgtttttgctttgcttttgttgtttaaagatcctaaaacgtaccgtgattcctttacgttactaataattggaaagtgtgttaaatcaagggttcgcttaatgttctttagcctttgtacatagaatatataaatgtcgtgagtcatccctgaaaaaaaatctatgtcgggtgcggagaaagaggtaatgaaatgt

SEQ ID NO: 5509 - protein, 66 aa, Homo sapien
  unsure 36: unknown amino acid
  unsure 37: unknown amino acid
  unsure 38: unknown amino acid
  unsure 39: unknown amino acid
  unsure 40: unknown amino acid
  unsure 41: unknown amino acid
  unsure 42: unknown amino acid
  unsure 43: unknown amino acid
RRRGPPKMADGRTARPGHVTRERALRASPHPYPPSXXXXXXXXRSRPLATLYTFLSRSALHSLGGL

SEQ ID NO: 5510 - DNA, 1581 bp, Homo sapien
cattcttgagtttgataaagtaattcatacaaagtattgtcctcaaataagtcttccttagctaaatgcaatttaaaattattcaaagatcctagggcacttctagtttcacgtaaatattcatattaggtggttctcttcatccatttgttttcacactgatacataaaaattaacagcagtctaatctagtgacacctcagtcatatttcgctatagattttacctcaaatcagtccaagactttttcagagatcaccatttgtcttgaaaggtttatttcgttattaaactgcctacttataagtaattaagagaaattaagaaagtagtatgcatttttaattgaaattgttttacattctttgtataataaacctaaaaacaaacatgtcataaacaaattgacgtaaagatataaaatgccaaatgaagtattccaaattttctattctaattatttagcttcaccatcattgtggaaaaaaatactagatcctgcttagtattatatatttttcctagtggatcagtgagtaataagtaccaaacactagactagaaggtaatttctacattgtttagaaagggtgaaacaatttatcccctctggtattgttctagcataagctttagttatacaatgattaagatagaaaacttcatatataaatttgataagcaaacccacatttatagctgcagctaaaatatgtttccttagggcacagtaatcctttctgtgaattttgaccttgtttgtgtttttgtgaatgaagctatatgtctaatcaaaaatgattataaaagaggctcatctctgacatcattccaaaaatacattcattgatctctttttaagaaacatctgttattcactgggcattgggactttttgtgagtaatttgaattgaaattttatgagctatccaagaattctgtatggtctattattttcaagtcaaaatttccagtaaggatttactttacatttcatttggataaatgaatcattatataggtatgtctttgcttccattttgagacatttagatttttacagcctgtttctatagcatttgatgttacaactctaagcgtagttcaaagacatttaaattgacaagttaccagttaaagaatttagaatatattagatcccatctagtattatatattttttctagttgatcattgagcagtaaataccaaatactcgattagaaggtaatttttacattgttttgaaagggtgaaacaatttatctcctctggtattattcttaaaccacagatagggatagtagggtagtgaaacgaataaatacctggtagaagacaagagacttgggctctacacctggctctgccactgatttgctaagtcatattggcaatcaccacacccttcagggaattagtttcatctgtaaaatgcagcggttagtactataaaatcatacaaatttctttgtgctttgagaatctataaaggaatgtctgttgatattctgagtcgattttcatttgcttttgttccagaacggttaaaataaagcatattatttcatttaaaaagt

SEQ ID NO: 5511 - protein, 19 aa, Homo sapien
ILEFDKVIHTKYCPQISLP

SEQ ID NO: 5512 - DNA, 1505 bp, Homo sapien
  Unsure 459-586: Unknown base
gggaaaatatttgctgcttgtaagtcctaagtagataaaaaatgaagccagaagagggataggaaatgttgggaggtgggataaagttttcagtaggctggccaaacagtgccttgctgagaaggtgacatttgacaaaagatctcaacaaagtgaaagagtgagccctgctggtatccagggacattccaggaagggaaaacaagtgtagtggctggaaacaggggcaggtgcttccttcaggaagcaacgaggaggtcaggggactgggccagatttagagggaaaaataaaagacctaatatcagaggattagcagggtaccagattgtgtgaggccttgtcagatggaaagccacagacagggttggacacaacattgatatgatgtttacattttaacagggtcattccggctgcttttttgagaagtccctgaagagatcaataacagcaagnnnnnnnnnnnnnnnnnnnnnnnnnnnnnnnnnnnnnnnnnnnnnnnnnnnnnnnnnnnnnnnnnnnnnnnnnnnnnnnnnnnnnnnnnnnnnnnnnnnnnnnnnnnnnnnnnnnnnnnnnnnnnnnnccacattgaatgtggaatgctggaagagagataaagtgtacctgtcacatactttttgagttttatttattttcttagaagtaagtacacaaagagatgctacctaggagaagggtattcttttcactattctttcaaattttctgtatgttcaaacattttcatagtagaaagttggggggaaaatctgtttcataaacatttcctcagcagcagtccagtctattgcattttaattggttgtgatatcattgttttatgcaatacgttctcaacaagtatatcctccggcaaactgaacaaggaccaagtctgttctgcctacagctctgcttcctcatagctgctttccagaacgtgactcttgcaaattatcaagaaaggggaactaatctaagggatccagatcaaacagcctcatgaagacttattttatgtttctaatataaagatagaagttttcagaaaagccctgctacacagaggatcagagcaggggtgggcctgctgggctgcagctgggattctgagcatcctttcccggaggcacggaaagtgagtgagtgagcccagtgaggaagaagttgaagctttgatatgagtaaacaagtatctctacctgaaatgattaaagactggaccaaagagcatgtgaaaaaaatgggtaaatgaagaccttaagattaatgagcaatacgggcaaattctgctcagtgaagaagtagcaggattagtcctgcaggaattaactgagaaggaccttgtagaaatggggctaccatggggtccagcacttttgataaaacgttcatacaacaaattgaatagtaagtcccctgaaagtgacaatcatgatccgggacaattagataattcaaaaccgtccaaaacagaacaccaaaaaaatccaaaacacacc

SEQ ID NO: 5513 - protein, 49 aa, Homo sapien
MGLPWGPALLIKRSYNKLNSKSPESDNHDPGQLDNSKPSKTEHQKNPKH

SEQ ID NO: 5514 - DNA, 1003 bp, Homo sapien
aaaaaaagaaatttagatttctgtggtaaatataaatgagtttcattttaagtaaactcattttgtgggatttgagatttaaaaatgaaattaattttgcacattctagtcatggttgggctctaaggcaatgttgtaaagctgtaattgtttgccttatgggaagaagtgaaaaggaattaaaatttatggtgtgtctactatgaaccaggcatgatgctgagagtttaactgtgtaatttttggcctaaatagccctgtgaagtagatattattccaactttacaggttagaaaatttgaggcacagagaggtgaaatatttgcctaaagtgaaacggcaaatttggcaatttggacttggattcaagtgtttataactaaagcccagctccttgcatcataccctggtacctaaaagacataaaaactcacttcaggtgcaatgtgaatgaaaatgacgttatgacccaggcttgttgtctatgtgctccttgagaaatagttctgttggatagatgcggtcaatactcaaaagcccttgctatctttgccatgcattactctaagcacttgacatgtattaatttaatcctcacgattccgtgaggtatgtgctattatcattcccattttacagaccaaaaaaaaaaaggatttaagtaagttgttcaacttacttacacagctagtatgtgggggaggtgggacccatacccaggtattctgaccacaagcctaaggtcttaatgctgtttgatgctgcctctcatgtaaccagatatgtgtgacagttgccgtagaagtattaaagtgtgagtgtatggtagttcagggaaagccgtgtcacatccacatgggatgatcattggcatggtgccctgtgcttttcgggaggtgaacacttgaagtaagcctgaagttgaatagattctcctaggcggagacacaacaggctatttatggacggagggcataacaaggagcgagaagctcaaagagtg

SEQ ID NO: 5515 - protein, 13 aa, Homo sapien
MDGGHNKEREAQR

SEQ ID NO: 5516 - DNA, 780 bp, Homo sapien
catttttagtaagtatgttagtaaaccaattttttagggggatccaggaaaagaaatagtgaacttgacaatggcattctttagttttcagtttggaatttaattggaaactcatttagattttaataaaaagggaataaatatatatcttgtatcatgtggatgccttaggctgtcagtaacagaacactccagtgaagaaaagatctcccagaacaagaagtccagaggaagggagagaaggaagacaggttcggggttggttaatttagtggctcactgatctaatcaaggaccccgacactttgcatctttatactctgccattctcagaatcttctctcatgattgtactctggctgtattgaatgcagactcaacagtgtcttatgaagaaatggaatatttcctcctgtacatctctttttgttagcaagacaacaatttcatggaaaccctccagtttttccctcaggtcctattgattaggattggggtcacttgcctttcttaaaccatctggcaaggggaatgagaccattatgattggcttgaaccaattaggagtcactctcctgggattggggagggccctgcctctaagtagttagctgcctgataattctgcaaaagctggcttctattagcaagggaggaggaggggaatgatgtagaataatgactattgtcaggccacagcatggggcattttacttacatttaaacataaggtaatacttagtttctgctacagaatttctaatacatgtacttaagagt

SEQ ID NO: 5517 - protein, 18 aa, Homo sapien
FLVSMLVNQFFRGIQEKK

SEQ ID NO: 5518 - DNA, 1250 bp, Homo sapien
  Unsure 953-994: Unknown base
aaattttttttctactagctactgaggctgccacatctggatggaactgagtggagggggaaaagaatgaaaaactcaaaagaattcccatgagggtgtcttgctttctctcctgagttacaatactttagcaaaatcatgaggctttagagatatggtgtagtctgcaaacttcttaatgcccttacccacatttaccatgtttcctggccttcctctgtgtcaactcttagctcttcctaatcattatttaatacatgagtgagtttagtagtgatcatatttctcaggtcctttagaagctggaattttaaaagaattagaaggaggagtatgtgaattctttggagctcactgcctgacttgcttatgaccaggaaaatctatcccctgtatctaattttaatttcatggttaaatttgagaattgtggaaaccaagttccacaaggctattctcatatttctcccaatttctttttcagccaactccaaggatatgtatcacctttgacttaatttgctttctctaagggaaaggggaaaaaatgttcacatagctccactgcaatgttttttataatagaggagagatattgtaaatagagactgccagccagtttccacaaaaaaacgaagagttcataaatttgacatgtttgaacccataaagcattttctttgcttggaaccattataaaagtaagtgagttttcaggctctatatacattttaattcctcacgttttatattggagagttcggtacagactgtccattactgcaccaaaagaatgagtgaactgttacctatagggaaagaacacttcttcttcctgctgtttgggaaccatctcagtgtggcgtaatggttaggagtacagattccagatcctgtttcttagatttaaatcttgactctgccacatactagctgtctgactgaaccttggnnnnnnnnnnnnnnnnnnnnnnnnnnnnnnnnnnnnnnnnnncagtacttacctcatagagctgttgtgaaaagtgatgactgaatatgtaaaagcaccctagaaacagtgcctggcacatgctaagtgctttgttcattattgttgttattatgtaattttctctcagactgagagcactgttagtgacccaagtaaatttatagtttttaagtacagaggaaaaataaagcctattttttgttaacagtcttaataaataataaaatggaataaagaaaccaagaccccaaaaaaa

SEQ ID NO: 5519 - protein, 47 aa, Homo sapien
MTRKIYPLYLILISWLNLRIVETKFHKAILIFLPISFSANSKDMYHL

SEQ ID NO: 5520 - DNA, 608 bp, Homo sapien
  Unsure 313-351: Unknown base
agcaacccagcgcttccattgctgacctctaccgacctctacctgtggtccttcctctactgcagcagagacactgttttcttcctttgttcttccaaccccatggcacagaaacactctccactgcggccaaggattgcaggagaggtggcatcagtgattcaagacttcttttcctacctcttcagtgtttctttcagtgatctgaagttaaagccagggggaatatcacagaagtgaagtgcaattctcatcatgtcatatcaagagcacacactaacaaacaacatgacttattgctgaatattgaacnnnnnnnnnnnnnnnnnnnnnnnnnnnnnnnnnnnnnnngtaaaggtgaataaactgacactggaacattcaggaacttcttcatggtcatggtcacccagctagagtgtggaagccaggctgtctgattccaggatctgtgttcttaatcctatacataaggaagccataatgagtcaaccactatttttaagattcacagatgttcgggtccaattcaccagaatgccaagttatacagggttgtggaatcaaaaactgcaattagtaataaaatgtgatgctatctagaaaaa

SEQ ID NO: 5521 - protein, 79 aa, Homo sapien
SNPALPLLTSTDLYLWSFLYCSRDTVFFLCSSNPMAQKHSPLRPRIAGEVASVIQDFFSYLFSVSFSDLKLKPGGISQK

SEQ ID NO: 5522 - DNA, 747 bp, Homo sapien
gtcaccgcgcctccgctgccccccttcgccccgccccgcccccgtccggcttccttggtggaggccgtcctagggaaaccaaacactcccaggatgcccgcggtgtgaccgccgggggcggcccggggccgctcggcggcacctccacacccgccccaacgcgttctctggagctttgggcctcagggcgcctagaaggcgaggacgcagacctgaaggcggccggtgagcggggcgggttctgctgggtcgggaagaaaaataattctgcaaggtattttgttttttattaattcgcgcttggccacctcatctgtaaagagattctaaaagcaagatctggaaaagtgcttcgtagactccttgacggagtttgcctcctttgtacgctgcgtgaacatgcctcacctttaagagagtcttaaaggtaaagacacgaaaacacttcctccagggaccttcccgaaaacgttctggctctcatctggtgcggcatgtgtccactttgcctttaaggagttcttaaaggcaagggcctggaagtgctgttcctgagatggattctcttgacttaccagtccaccacggcacttcccctttaaggttattaaaggtaaggggtggacagactttctgcattcagataatgagcagtggcaaccccttttggccagggccaggggggcaccagcaaggggccaccctttcccttttcaataaataatttttgtactgcctctgttcaaa

SEQ ID NO: 5523 - protein, 96 aa, Homo sapien [sequence omitted]

SEQ ID NO: 5524 - DNA, 2818 bp, Homo sapien
  Unsure 2257-2391: Unknown base
cagtctgaggagatgatgccgcactgccgggtcggtttactacaagccctcctcgcccccgacgcccaccaccccgggcttccaggtgcagcacagccccatgtgggacgacccgggatctctccacaacttccaccagaactacgtggccacgtacgcacatgatcgagcagaggaaaacgccagtctcccgcctctccctcttctcctttaagcaatcgccccctggcaccccggtgtctagttgccagatgcgcttcgacgggcccctgcacgtccccatgaacccggagcccgccggcagccaccacgtggtggacgggcagaccttcgctgtgcccaaccccattcgcaagcccgcgtccatgggcttcccgggcctgcagatcggccacgcgtctcagctgctcgacacgcaggtgccctcaccgccgtcgcggggctcccccctccaacgaggggctgtgcgctgtgtgtggggacaacgcggcctgccaacactacggcgtgcgcacctgtgagggctgcaaaggcttctttaaggtgagcaatggcgggagcggagtaggcaggtagggagcccctagtgcccgggacctcggagtgtgccctctgccttggtgccagtagcccagccccagctctcccgggactgcccagctctccggggtccgccgaagctgccctgcaggagaccatgggctgcggcggggacttccgggtgtctgagaaagggaagcagaaagactgggaggccagggtcgcatccccctcgcattcagccgacccggctggcccccgcccgaagttgctggagccggagttggaagagggtcatttgcatgtgctaggagctgtcttccctgttcagaatgaaattggttaggacagagaaccgtgtctgagctaaccaagtggaacagaattccctatggtcaaattaagtgatctctttatttcgccatcctgattgaataatcttatcattttaaatagagaaggtctccaaggaatgtaaataatatgaatgcccacggatttgtatttactgagcgtctccttctccttctcttggcatataaaacacagcaaggagcggcaaggttagctcaaatgttaacgctatcaattttcttctgttaaatgccctgggggaggaaaaaagaaaagacagacagaaaaggaagagaaaaaaataaaatggaattgtgtgtatgtgtttgtttgtggggaggaatcgtagaccccagtcacataacagaaattttctccgagttgcctgattttcaaaagaagaaaaaaaatgttggtctatattgtctccttttgcagcgcacagtgcaaaaaaatgcaaaatacgtgtgtttagcaaataaaaactgcccagtggacaagcgtcgccggaatcgctgtcagtactgccgatttcagaagtgcctggctgttgggatggtcaaagaaggtaggctgaggggagctgccgaccctccagtttgcgcctttaggaaaccactgctcatactccagcatcacgttccacttcccggtgctggggatctccgactccccctcagtatggcctccaggaccctgcagctgcctgcttgcccggccttccctagagaaagccgccaggcccttctctcctttaactatacgacccatttggaggaagacataaaataaccccgcattttttaatgcttctagtcagtgaaggctttacaagcactggggccctcagtccgctcagcctggtgccccgcggctgcggccttccccggggagggaccgaggcagcagctgggcctgggctcggaaaagcggcgctaacagggctcttcctttgcagtggttcgcacagacagtttaaaaggccggagaggtcgtttgccctcgaaaccgaagagcccacaggagccctctcccccttcgcccccggtgagtctgatcagtgccctcgtcagggcccatgtcgactccaacccggctatgaccagcctggactattccaggttccaggcgaaccctgactatcaaatgagtggagatgacacccagcatatccagcaattctatgatctcctgactggctccatggagatcatccggggctgggcagagaagatccctggcttcgcagacctgcccaaagccgaccaagacctgctttttgaatcagctttcttagaactgtttgtccttcgattagcatacaggtaataagggagggaggagacaatccagggaggctgtnnnnnnnnnnnnnnnnnnnnnnnnnnnnnnnnnnnnnnnnnnnnnnnnnnnnnnnnnnnnnnnnnnnnnnnnnnnnnnnnnnnnnnnnnnnnnnnnnnnnnnnnnnnnnnnnnnnnnnnnnnnnnnnnnnnnnnncccagaagccttggatgaatggaatggaggtgggatagggggcgttcttgattgttatgaaattaaaccctttcaaggtccactggtctacattttattaactcttcagtaattaggtgactcttaaatccctcatttattgctcttcaagtaattagttgtttagcttttctctctctctttttctcccctctctctctttggtattaattgcaggtccaacccagtggagggtaaactcatcttttgcaatggggtggtcttgcacaggttgcaatgcgttcgtggctttggggaatggattgattccattgttgaattctcctccaacttgcagaatatgaacatcgacatttctgccttctcctgcattgctgccctggctatggtcacaggtcagtactgcaggcgcagggcgcttcccctc

SEQ ID NO: 5525 - protein, 54 aa, Homo sapien
QSEEMMPHCRVGLLQALLAPDAHHPGLPGAAQPHVGRPGISPQLPPELRGHVRT

SEQ ID NO: 5526 - DNA, 2099 bp, Homo sapien
  Unsure 1551-1746: Unknown base
gctccgcctccgcgggaccacagagctgggatagcgcgcgaggccctcggtcggacgggacgctcgggattcagggactgcctcggcacacgggaagttgccctacaggcgcgggagaaagcgcaggcggcggcttagcagggagaggcaggctgcagtgcacattgggtcaggcacacgcgaggggcagcccccgagggccgtcccagagtcccccgcgccgccggggtcctaacggggtgcaccgtcttccgccgcacgtggattcagcgcgatgcccaaatccaagcgcgacaagaaagtctccttaaccaaaactgccaagaaaggcttggaattgaaacaaaacctgatagaagagcttcggaaatgtgtggacacctacaagtaccttttcatcttctctgtggccaacatgaggaacagcaagctgaaggacatccggaacgcctggaagcacagccggatgttctttggcaaaaacaaggtgatgatggtggccttgggtcggagcccatctgatgaatacaaagacaacctgcaccagctgtcctcactcctgatttgtaggtcagcaaaaggttgaggggtgaggtgggtctcctgttcaccaaccgcacaaaggaggaggtgaatgagtggttcacgaaatacacagaaatggactacgcccgagctggtaacaaagcagctttcactgtgagcctggatccagggcccctggagcagttcccccactccatggagccacagctcaggcagctgggcctgcccaccgccctcaagagaggtgtggtgactctgctgtctgactacgaggtgtgcaaggagggcgatgtgctgaccccagagcaggctcgcgtcctgaagctttttgggtatgagatggctgaattcaaggtgaccatcaaatacatgtgggattcacagtcgggaaggttccagcagatgggagacgacttgccagagagcgcatctgagtccacagaagagtcagactcagaagatgatgactgaaagggactcgggactgaaggtctcctggaagcttctgggtctcactggaccatcaggactgctgccgcccctctggagagagcagctttttatttgtctgtagacagggaacatgatgggcactgacctcctgtaaagaataaaactgtgggccgggcgcggtggctcacgcctggcctcccagcactttgggaagccgaggtgggcagatcataaggtcaggagattaagaccatcctggctaacacggtgaaaccccgtctctactaaaaatagaaaaaaaaactagttgggcatagtggcatgtgcctgtagtcccagctactcaggaggctgaggcaggagaatcacttgaacccgggaggtggaggttgccgtgagttgagattggaccactgctctccagcctgggcaacagagtaaaactctgtcccagaaaaatgaaaaagcatacaaccttgcaggatgtctctcctggagacagcaagagggagaggagggagagggctctttcttagaaaagaggcctttggnnnnnnnnnnnnnnnnnnnnnnnnnnnnnnnnnnnnnnnnnnnnnnnnnnnnnnnnnnnnnnnnnnnnnnnnnnnnnnnnnnnnnnnnnnnnnnnnnnnnnnnnnnnnnnnnnnnnnnnnnnnnnnnnnnnnnnnnnnnnnnnnnnnnnnnnnnnnnnnnnnnnnnnnnnnnnnnnnnnnnnnnnnnnnnnnnnnncattgaattctgcgtggattgcctcagtttgccttgtcagccaacttccactggctgccttggcactgccatgacagcacagctccacaccagagctggggtttctcttcagtcctgggtaccccttggcagagggatttgctgaggaaaattaggtatccttcctagccctccacacacttccaaaccagggctgcggatctgatggatgccaggaagacagccttgggctgagagtgacatcactgcaagagttgagagccagcgtctaaagtgtccacggcatcctgggaggttttatccttggtgactctaatggtagatttttgtccaccttgttctatttgcttttg

SEQ ID NO: 5527 - protein, 102 aa, Homo sapien [sequence omitted]

SEQ ID NO: 5528 - DNA, 811 bp, Homo sapien
cacacagggagtgtggatctgggccagtggtatgagcacggtgccaggtggctcccgccactccctggggatccaagtgcggggtggctggggtgtaactgggggagaggaggagagcctcactgtccctgtcgctgacacctggcaggcggggagctttaaggtggccacccaggagaggaacccccagagagcccagatgaggctgcggaggcagaagaagggtgtggtccccttcctgggggattttctgactgagttacagaggctggattcggccatcccggacgacctggatggcaacaccaacaagaggagcaaggaggtccgagttctgcaggaaatgcagctgctccaagtggctgccatgaattacaggcttcggcctcttgagaaatttgtcacctatttcacaagaatggagcagctcagtgacaaagagagctacaagctgtcctgccagctggagcccgaaaacccgtaggctggcaacatcctgcagtggctgggaacccaccgggatgctggccagaacaccggctctgcaccatccctcacccagaccgtagacaccagggaaccacatctaggaggctggcagctcagctgcatcttgccctggatcctcatcaccaactgctcctgctggccaggatcaggccatgggacttttgtgagtcaggcgggagaccattttatgtttattttctttagtgtataagtaagggttttttcttaactttcgttaaaataaaattttaaaaaaccaaaaaaatctatgtcgggtgcggagaaagagggtaatgaaatg

SEQ ID NO: 5529 - protein, 160 aa, Homo sapien
TQGVWIWASGMSTVPGGSRHSLGIQVRGGWGVTGGEEESLTVPVADTWQAGSFKVATQERNPQRAQMRLRRQKKGVVPFLGDFLTELQRLDSAIPDDLDGNTNKRSKEVRVLQEMQLLQVAAMNYRLRPLEKFVTYFTRMEQLSDKESYKLSCQLEPENP

SEQ ID NO: 5530 - DNA, 1309 bp, Homo sapien
  Unsure 947: Unknown base
  Unsure 979-1003: Unknown base
tgagccaccgcgccctgccaagaagagttcttttgcataccctttactcaggtcctctcatgttaacgttttacataactgtagaacatttatctaaagtaagatattagcccagaacaatactactaactgaagtataaaacttatttgaatttcaacagtttttttttcatttcttattttccttttgtgtgctctgtttataccatgatccatgatttttttaaaatcatgattgtcttttaaagatctgtgtgtctctgttttgagtttttcctgtttattttgaaaagtactgttggtcaagataattggtcaataatccatgttggttttaacaaaaagcattttaacattaaaaatattacagtataaaataacactctgtgctttaaattgaggttttatgtcattttagcagaattataatatttctgatatactcatgtttgacaagttgaaacagatttgtttcttaaaggaaggtttaatatacaaaaaaaggtaatcttaaacttacgaaaaagtaaattttacaatttgagcattactagatgtttagtttgcatgaactcatagttagaaattctgcaataggaatatctacaaccggctgatttggaatttgaaattatagtgttacatgtatacctatcaaattaaaattaaggaaatacaatagcaatatatagaatgaatgtagtaacagaaattaactctttactgcatcattgaacttattgttagttacaggtttaaaagaagttcatttaacatccagtgtgtctaattcttctggaagtggtgtagtaccattgttcttctggcatttttaaatattaaacctttttggatagatggaagccttatacaaaatctactttattttagcaaggattctctgtccttttgtatagttggtaccttactaatttaaactctaatancaatctaaagagaaatttattatgcaatttgnnnnnnnnnnnnnnnnnnnnnnnnnggaatgaagttcagaggtagatcctcctggaagaaagaaagcaagcgaactttttaaagaaaattagacttgaatatttaagaatgtcttacagagaaaaggccaactataatactaagctaaaagttatgaaaaattaataggttcttttatagagctaagaatgatgaaaccatcaatacttccttcttcctaaaaatccagatcaaaacttcaggttaggtttctaagtttaggacatgaatattatttttttcttgaaaagaagatgagtatatgtgtaataagacaagtagaactgagaga

SEQ ID NO: 5531 - protein, 35 aa, Homo sapien
SHRALPRRVLLHTLYSGPLMLTFYITVEHLSKVRY

SEQ ID NO: 5532 - DNA, 468 bp, Homo sapien
  Unsure 78-95: Unknown base
aaaaaaaaaaaaaattcctgacatcgctatgtattcccaactttatcatttgtctgcctgtttagttttgacttatgnnnnnnnnnnnnnnnnnntgtggacatgtagttgacggaaatcgtgaaggaactttaatattttatttaaatttcccaaaactaatcatgccttatgtgactaatcttcagtgataatatttcatctactgatatattttcttgaggtgtgtaattttcagtataccttaatcatttggtataaaaaagagagaggtttttgatatatgaatgctgttcttgtaaaaatcaatcttgacactttattttaaactttttattggtaatgacagtgggttttgtacatcatgattttcaatttaggatatctgtctaatttgttttttcagagtaactatattggaattcaataaaaatattcaaaatttttcttaaaaaaaatgaaaaaaag

SEQ ID NO: 5533 - protein, 36 aa, Homo sapien
  unsure 26: unknown amino acid
  unsure 27: unknown amino acid
  unsure 28: unknown amino acid
  unsure 29: unknown amino acid
  unsure 30: unknown amino acid
  unsure 31: unknown amino acid
  unsure 32: unknown amino acid
KKKKIPDIAMYSQLYHLSACLVLTYXXXXXXXWTCS

SEQ ID NO: 5534 - DNA, 500 bp, Homo sapien
gagaacagggctttgtcaagtttccattgccctcagtggtgaatgaatagactccctcaccttctctgtacctggtctggaattttgcctaacagcattaacatctaacttaatgacaaggaggaaggagattcttagaggcagtagaaaatggtcaagtgttcagaagatggcctttcattatatatctttagttctttctggcagatttggttatactgtcttaatcaggttgggtaagtagcccagggtgtcttctccattctttctgtatgccttatctcagcattaccatcttcctaggcttcaggataggaactcggtcatctttgacttcttttcttcaaagtcagtaagttatcaagtcctcctgattctacctttctgtgaatggtttcctgaattcatcccctgctgcttcagtcagaccctcataatcctctgcctttagccgtctgtttggtttctactttgtctcttctcaccttctcacctaaaaa

SEQ ID NO: 5535 - protein, 43 aa, Homo sapien [sequence omitted]

SEQ ID NO: 5536 - DNA, 366 bp, Homo sapien
aagttataaaatgagaaattaataaaaggattgctgggaggacatgcaccttttaaattttgatattactgccaaaattgcccttcaagagtttgatagtatttttccatatttttctttttaatttttgctaatttcgtagacaaaagatagtctcttgttaaaatttgtatttctttattagtgaggttgaatgtctttttatgttaattgaccatttgaatttcttgtatgacttttgactcttcatatgctttcttcattgtttcttttctctttggtttgttgaagtttttttgcacattcccttaagtttggcagtctaatctgtatctttggcataaatattttaaaacaaaaaatgct

SEQ ID NO: 5537 - protein, 26 aa, Homo sapien
MTFDSSYAFFIVSFLFGLLKFFCTFP

SEQ ID NO: 5538 - DNA, 1397 bp, Homo sapien
  Unsure 323-506: Unknown base
taggaggccctggttcacagagcccctccccagctttgtagctgccaccgcttggcaactgcccttaggtgcacagcaagactgaataaccacagtgtccctgcagatgggggcagtcctgtgcacggcctccatgaaaccctcactgtccagctcccgtcctgtggctccaccagcttcagattgcatcttttgtcgtcatgctgctgcctccacatcccatttgggcagctcgccctccaggatagcatctgcattctgggaaggaaagctgagaagggaaggtggaggaggaagcggttagtgcttagagtagcaaagcnnnnnnnnnnnnnnnnnnnnnnnnnnnnnnnnnnnnnnnnnnnnnnnnnnnnnnnnnnnnnnnnnnnnnnnnnnnnnnnnnnnnnnnnnnnnnnnnnnnnnnnnnnnnnnnnnnnnnnnnnnnnnnnnnnnnnnnnnnnnnnnnnnnnnnnnnnnnnnnnnnnnnnnnnnnnnnnnnnnnnnnncagggctgcgtggggattacatgaaatactccaagtaaagccctaaatgaatacttgacccacagcaaatataattaatattaggaattatcattgttttagtagatgtgaaagaaaggctgttatcaaactataagtaatgtatacatgctagttaccactgtgaacacaggacatgaaataagtatccaattagtgataatatacaatgaattgtgactgtgctcccagagaagccaggtgaaggccaggggaaattcagaggaccatctctggctgggacatcagggcaggcttcctggagcaggaggtccctcaagactggagaggacactttcaggaagtcaaccaagactgaggatgtgactgacattcctggaaaatatcaaggtggaatttagtatcttccagtgttcttacatggaatcatttgttcatttctcctgtggagattaaaaaactacaaacctcacattctttaccataaaaatctcccatttttaaaattcttatatttagtcctagatttctgtgagtcttcctcatttgcccctggctatcatcatcctacataaaatcagggatggttggcatcctaactggcagctactaggaaaaggaaactgagagaagataggattctaaagctgccactgcctggaaaatcttgttagataatgatacaagttaggagcattgataacaacacgtttttcacttactgaggtctaagttttgggtcatccaattgtcatcctactctttaccttgtcaccacaaaaatgttcttgctgggtgagtcggaatgtattaattacctatcaaacaattgaatattatatcaataaattatgtaaatattaatattttaataaatagcaatacaaatta

SEQ ID NO: 5539 - protein, 56 aa, Homo sapien
MKPSLSSSRPVAPPASDCIFCRHAAASTSHLGSSPSRIASAFWEGKLRREGGGGSG

SEQ ID NO: 5540 - DNA, 876 bp, Homo sapien
gccattttgattgtcagctcctgattctgcagaaaacacgaaactgagctgtacaaagatgctgatgaggggctgcagcatgcaattcacttcaccagcagtcactaaggtctgatctcttttctaaccatacctggaagatggaatgctggacccaggaaggctttgacatatcaatgcaccagggatcttaccaaactaaattttaagcacttatagctcaagattctccctctgagatgaaacatacttccaccctgtcatgtgtcagcttcagaagatatcaattgctcaagaaagtgttggacaagcagaaaagcacactgaacatttctggacttgtgaaagagctctgaatatggatctctcagggatattccatccccaccaatgctttaccaatgcgagagctggccaggctgagacatttaatgataacatggaacaatttattcaggaagatagtcaactactcatgtggctttatgattataaaacccactgaaaattgggtcccttgattctcttgatttttcctaagccttactccctaaagtctccaatttgatgaggtatttgatacttgatctctccttgaagtaaaatttggagcaaaatatattggactggaaggcctgagacctcgataagaagaaacatgaaccccagagccacaggtcaggaggttttcattataatactattgccctcttaaaacaaatactccaattgccaaggtttcctcacttaataatttatctcatatgtgtttttgaaagttactctgaatacttcttatatgtataaataagttagttaacagtaattaatgcagatatttaaataaatacaagcaggcaggtgggatgatgacta

SEQ ID NO: 5541 - protein, 80 aa, Homo sapien [sequence omitted]

SEQ ID NO: 5542 - DNA, 14878 bp, Homo sapien
  Unsure 8376-8698: Unknown base
  Unsure 9848-9870: Unknown base
  Unsure 13056-13081: Unknown base
aaatatttgatatttttattggaaatgtttttgttagtttgaggggaagggtatgaagacagatctcaaggtaaagtcagagagggctgtcatcagtatgctggggagtttagggacaggaggcattggtaggggattagatgtagcagcagtcaggctgggatcaagatgcctgggggacatcttgatcttggcctttcagggcaagtgggaggctagaaaggtggctaggaaagaacagcattcttcaggtaagggtatagacttgggatgtgaggcgttatgctgaaaggttctgtcacgaggggatcagaggacagtggggaaattgggtgggttatctagcctgtactgtctgcaggtcctgaaatttgatgctgtcatagtctttgcagtgggtcggttggaatgattctgggggcagaagctcagagccccttagtaggaatggaggcggcccttctgctgccactgctcagccccctccactgcatgacgaagggtggaggaaattcccagcaacatatggcccaggccttgcagcagtgtggaggtccaacgaaggagctccctgaatggcagagacaagaggaaatcagatgatttggaaaacttgggaggaagccatcaagctgggagatgaggactttccacaagcaagagctaactaggggtaggtgggtgcaagaggacgaattatggggactatccaactgtaggggatggggcagtatgacatgttgatttctgacctgagtactttctttgggccaagtccttgaaagtcacaactcatagagtagagcccgtagaatgtggctttgacattcaggctgccaaagaggtctcgagggttttgcttgtacacgtcaaaggtgaatcgggcgatgtccttgctgtgcttgggcctctcccgtcccaggccatatgacagcactccactctgtaggacacccttgtcagtgcagtagatcctcataccagacacccaccactaatctccatcagcactgggtcagaccctccctcgcttggactttctgtccactgtgtgacatccttgacaattccacaactcctcctgcacctggtccccaggatcagggttaagctagagaggaagcccgggaaagctctaaaggacaggcattggaagcagccccagtataggcctcttacccttgtagggctccagctctgaccagactgcaacaccatcaggcacgtgtcatcctccagcagctggaagaagtcctcactgtccactgcagttccatcctcctctagcaccagggttagcactccattcagcagtagggtctccaatgcctgcccaatggcaagaagcaagaagggcaggtcttatcccatgccccttccctctttagctgcccaacatccatcagttggctctagacattggtcgatgtcccactttgactttccggcactttgatacctcctaaaggttgcagctctccgtgttcttcagtttttgggggatcctagctagaggctgacctttttcctctttgctcctaccatgtcattggcatctccccttgctcccctccaagtcacttctggtttggaattggaaagcaagccaggttctcacgaagtccacccttctgtcttatctacaatgctgcacctcacttcccacaccctcaagagttctccagaagtgttttcagtaatagtgtttaacctttttgagtccttactctgtgccaggtatgaggactttacctacattatcctcttactcctttcaacaaccctaggaggtgatgtattattattgcctttttatagttgaagaaactgaggttttggtaggttgaacaacttcccaaggtttgacaggcaggaagtggcagaatcagaatttgaacttgatttgtcacacaaatcacctttccatactagcttctgaattccgtccctcgaactctccctatctcctgctaacccctgctcccatagaaaagctcactaggtggaaaatgaacaaattgaccagagctcattaggcccactccgctgcttttagccctcagagggaggggcagctgtgtgacttcagccctctgctccatcatcacaagttgccactgttgtggagccccttggctacccctgctataggaaccgaggaacttggcctacttactttggctagcagctcctggcgggtggcagctgtcaggcctttccggatggtccgcttgtgatcacagacacggaaaggtcgctggggtggtggagctgaggtccagaccctccgtccaaactccgagcttatattagatactgacctggtagttgagaagaaaagtcaagaaggggcgaggaggggcttggtgagtgtaaagggcatgatgagggtagagtggctagagggctagggagggagagatctaggtttatcgattagggatgagggagagaccatggagtgcaggtgggggcgggtggctcaggagcttgacaagcccactgtggagtggggagcaggagaggaaggggtactggttagtctcctaggggctgagtggagtattgttgccctgcctatatcccctaaaggtggagggtagagcggagggttagcagtcacctgagtaagtcactggggttcagagctgagaggtactccatggtggaccggagagttccttccctggaacttctgggctgggtggttctctcctgtgctggggctttagtggtgttttctgttacaaacctgggatctcagcccaggacaaggtgggaatgagtcaagcctggactctggcccccctgcctggccagtaagaagggcaaagtccaaggggagggatgagggaggggccagatggggtcctggaggaagaattgcctggcaaaagccattggagcttgtatgtgtgtctttggtgatgacatgtgttgtgagggtagatgggaaccatgtaaaaggatgaaatgtgacttctggtgtttttttatttctatggagggactttctggggacggtttctggctctcaggctctgagaagctgcagtttatgagtggctctgtgtgtgctgccacctactggagaagccataagctgcagctttaggaaaagggaacccggggcagagtgtggggaagtgggatggcagcatggcagggctttggaaaatgagaggtgagagtgtgtccaggaagggtgtaaggagaggatggatcctgatacatggattcaggatcattagggtcctgtctgggacactggccttcctgcttacctgctctttccttcctccttggtcggaggaggggctggctcactgctctggcttcattttccagagctgcctgctgcagtcacacttaggtcatcttctctcacttttctccttttgccgattagtggacgtgacagagatgtgaatggggcagggatgtcctttgatggcatcaagactttagcttctggtgcgctgtgtcccagctctgatttcagttgcagccgtgatggacagttgcatggaagctgagactctcactgacagtgaaaccctcaaatgaacacaatccctgctttcctgccaaggatccttgtagggtcccccagcttccccactttttttctgtgtcctgacaaagaaacacagagtaacttgattgccctgtgacctggccagttgcatttcccctgcaggcttgagcccaagccagagccttgaaaaggtattcaggttgttgcccaaaacactgaaaaaaactggccctggccctgaaccaaataccttgaaccctcgtaaactccataccctgacccccttgttttggatatacccaggtagaacaactctctctcactgtctgttgtgaggatacgctgtagcccactcattaagtacattctcctaataaatgctttggactgatcaccctgccagtcttttgtcttgggcaatctatacttttctcagaggttcccaaggcctactgaagggacttaacatactcttaatggctttcctctctcttgttttaccttatgccctcacttcctgagttaacctcccaaatacaggatcacctgtacccaagcccttagctcaagaatacaggatcacctgtacccaagcccttagctcaagctctgctttggaagaacccaaactaagacagtgctcctggtgccctccccaagcaacctcaagttctggctgttacttgagcagaggcctttcttttcccttcccccagctctatccatctgccaggcccccctcaaatctcttcatttccaagttttgcttgacttttccaagaggagagggctgcttcttagtatgtccctactcatcctttcctttcttgtcttgtatcctggtgcagcctggtaatggggcctcttcatggttgtgtgtcatgactccctaaccattatgcctccatgcatcccctgttcctcctggaacctagcaccatgccttacatggaaaagctgtcattgacagcccggtgagagccctgagggtggagtgactggggcagggcctgaggcaagaggtgggaggaggtaggaggccaggggctcagccggaccaggagactggaaacaggcaaggataaggcaggtgggggactgagttgtttgggtcacctctgcaggccagagagaccaggcaacatacacactgcagaaggtgggctgggaggatggggccagagctgggggagggatgagaacagaagcaggaccaggattcagcagagtcctcctatttccttccaccaccagggaatcttactgccccacttcagcttgtgctgtttcctggcaaggcaggctctcacatgcctggacgcctgggtgcgttggtgatgggaaggagcagggtgagggaggggccccaggagaggcccaggatgagcctcatcttgtccctccccattcttgtcttaccctctgcaaatgtgataggcacaggacaggagtaggcacctcgcctactgctgcttaacctttcagcttctccaggcccccaatcctgcttgctcccagcttggtaagtagatctgtgcacgtccctttacaccccaccatccagttttgcccagatgtgctagaatggggctggacaaagaaggaggggccagactagaggagtggtggtagagatagtgacagcctggggtgatgactttatgcctgtttaccactgagctctgggaaggaggccaggagtggggcaggtcaactgactgggagcaggggatctgggttccaagaaggagttgtgtttgaggtggggtctgggtcctcgtggaagtcaggactcccaggcagaaaagaggcaggctgcagggaagtaaggaggaggcatggcaccttctcatcgggcatcacaggtggggttttgccccacccctgaacgccctctgtggcgccttccacccacctgtaggcccagaaggatgtcggtctgctaccgtcccccagggaacgagacactgctgagctggaagacttcgcgggccacaggcacagccttcctgctgctggcggcgctgctggggctgcctggcaacggcttcgtggtgtggagcttggcgggctggcggcctgcacgggggcgaccgctggcggccacgcttgtgctgcacctggcgctggccgacggcgcggtgctgctgctcacgccgctctttgtggccttcctgacccggcaggcctggccgctgggccaggcgggctgcaaggcggtgtactacgtgtgcgcgctcagcatgtacgccagcgtgctgctcaccggcctgctcagcctgcagcgctgcctcgcagtcacccgccccttcctggcgcctcggctgcgcagcccggccctggcccgccgcctgctgctggcggtctggctggccgccctgttgctcgccgtcccggccgccgtctaccgccacctgtggagggaccgcgtatgccagctgtgccacccgtcgccggtccacgccgccgcccacctgagcctggagactctgaccgctttcgtgcttcctttcgggctgatgctcggctgctacagcgtgacgctggcacggctgcggggcgcccgctggggctccgggcggcacggggcgcgggtgggccggctggtgagcgccatcgtgcttgccttcggcttgctctgggccccctaccacgcagtcaaccttctgcaggcggtcgcagcgctggctccaccggaaggggccttggcgaagctgggcggagccggccaggcggcgcgagcgggaactacggccttggccttcttcagttctagcgtcaacccggtgctctacgtcttcaccgctggagatctgctgccccgggcaggtccccgtttcctcacgcggctcttcgaaggctctggggaggcccgagggggcggccgctctagggaagggaccatggagctccgaactacccctcagctgaaagtggtggggcagggccgcggcaatggagacccggggggtgggatggagaaggacggtccggaatgggacctttgacagcagaccctacaacctgctgcccttccctgtccctttccaccccccacccaccctccagaggtcagtgttctgggacatttggggacccttctttgactagagtttggatctggctgggtaggattactatacacttggggcaggcccaggctcctccaaactgagggattatgagggtggtgatggtccctgttaaggactattgtgtgcttgcaagttggcatgtacccatgtgccagcattgctcacttgttgccaatagctgttattgtgaaatacactgggaagccattagatgatgacttaagtgtgcttcccctggtggttcttcatgcctgagttgtactgaagccacctagttccctgctgggtcaagccaggctgggcagtgccagccttcagtggcatcttgacctgccctcctcagcccaggtgccctggttccacaggccaacccatagaaccactctggaaataaaggagaaaatggaaggagaggtatgggagcttggatgaggggtaggaatgggatccattctctgaggcttataaaagcctctgaggaggaaatggctctgaaggggaaaacgaatctgtggggtttgaaaaggaagttttcctggctgtcttgtatttggtccagtgagtatgagacaggcacacaaggagtggacagtggtgtaggggccctgggagtctgagacttaccttgccccctgaccatctgatcctccctgcaaaggccacctgacgtgaaaaggagccaggagcaagcactcagtcagggaagtttggaggttggccattggggtatgaggaatggcaggaatatttagaggacaggaataatttttcagagaagtgccacatattctttttctctttgccaagtctgggctccttctaagatgctgctagctattcctagcccgttccccaatacttctctgcccccaccttttggaatccttatctaggtctaaaaacggttctagatcctgacccctttgattgggggatgtagaatgggattcttttcaggggacatccacaagtacacatctgtggtcactaaggtgaccagctcatcccagttggcctggaactttcccagtttaagcactgaaaactccttgtcccagccctgccggtttcccaacgaactgagatggttggccgctcaagtggctaccctgaccatcaccccaggctctactttagcgactgctcacacctccctgcttcccagacagaagtcaaaacagcaaaagaaacccagtccccagggtcatgctagggctaccaaaactgggatgaactagcacctgtgaactagaacagcagggagtatgcttagagtgcctggtcctgggtgtggggaagaaaggccatcaaggtagatgcgggtggggaacagcttgagagaggaggcaaggacaacccagtttctgtctgaaggggcctctggttgaccctggagtttctgtccccaaacacaggcctcacgggattctttctgtcctcatgcactgggcagaggttccttaacttcctttgttgcacattgccattctctcacatcccgtgcggtcaggaagcccttcctgaactctgacttcagttcttgctgcggtttctgcccatttttttcatatcctctgacagctgcgaggtcatctctgctctggcttttctccaagcagaacaagtgggggctctggaaaggttaagggacctcagtggccaccattatactttgcatctttcctgagaagtgagagttgaaagggaagcaggaaggcccatggtcagattgaaggaaggacnnnnnnnnnnnnnnnnnnnnnnnnnnnnnnnnnnnnnnnnnnnnnnnnnnnnnnnnnnnnnnnnnnnnnnnnnnnnnnnnnnnnnnnnnnnnnnnnnnnnnnnnnnnnnnnnnnnnnnnnnnnnnnnnnnnnnnnnnnnnnnnnnnnnnnnnnnnnnnnnnnnnnnnnnnnnnnnnnnnnnnnnnnnnnnnnnnnnnnnnnnnnnnnnnnnnnnnnnnnnnnnnnnnnnnnnnnnnnnnnnnnnnnnnnnnnnnnnnnnnnnnnnnnnnnnnnnnnnnnnnnnnnnnnnnnnnnnnnnnnnnnnnnnnnnnnnnnnnnnnnnntagcttttgcaggagacttcaaggaaaggagacattcctctgtccaggaaacgggtaaggggaccatttctgcattgctggtttcccctcttggcagggtgggcatgaggcatcactgttcctgctccctcactcctgctcctcatgctcagcctgccagctcggcctcaactttgtgtgtctaaagtgggaactgaataggtaggctgtgagaagataggaaagaggtagtgccaatctccttgcccagatcataaaaaaatttcccccaaagactcaagcagggtaaccacatgggcaagcacaaggtaggtgcttggcgaaaggggaagtaattggcattctgtgtgataccaaggagaccatttggattttggcttctaccaaagagaatggagaattggttgacctaaatggaaccagtccctttaagtaaggggaggaaagggggtgctggaagatggccctcttcccaccacctagatcatagcttgaactgaagccaaggacagagtgctgcccccttcggcatttactgatgtgccctctttaaatcatgatgttatctaacccaaacccagacccaggacctagtcacagctccaacctacacttcctattaatcttaaaacaaagcaaaacaaaacaaaaagatatcagcattgtagcctccaatctgagcccatttcccttctctggctaccatacctccttctcctatatgataccattcactactttgttcaattatccagtctagacctgcatctgaggccacacccagccttctcactccccacacccctctttcctctctcactgctccttcctggtctcttctcatctggccccacctctaaggagtcctcctgccttctgggttgccctggaaaacagactatcccccctcctagtgaagggagtgggtaggggtttcagccccaccctcaggaagatgcgtcttccctgtcctctgctctgtggtacttcctctctggctgatttagcaaacagcacctagacctggggccaggcctttggcagtgggacagatccagggataggctacaccaccctgccctgaccctgggattggcatcagcttccaaccagttcctgccaaagcttgtaagtaagtttcctgggagcnnnnnnnnnnnnnnnnnnnnnnngacagtgtgcagccatgaaagaaggtgcaaaggaatctccaaagaaagcctgaccagcgtaaaaagttgggaggctttgtccttgtcacttgtccactaaactcctcccctccctgttattcctggttgaccctgggcatctctggggacagtaggcaggtgattgggaaagttaatgggattgaggggctgagggcctggcagggggcaaaaagactggcctttcaaggggtgcagcattggtaggaactctgtttggttctgggctttagggtctcctaaggggaggagactgaaaaggtctggaaatgctgctgctgctgtggtcactgtatattttgcaattgggtctgtggacaggaaggggccgcatgacccagttaggaaactagtctttgtactcaaccagatccctttaagttgtcagtctgcagcgatgggggcagtatatttcagggggacctctgatgctgctgaccctggagatagactagagttctcagcctaggtgtgtccatggcgtcaggaaacccttggtcctctactctcatgcgtgtgtccgccctcactctccaggtcctcccgacggccatgaacactacatcttctgcagcacccccctcactaggtgtagagttcatctctctgctggctatcatcctgctgtcagtggcgctggctgtggggcttcccggcaacagctttgtggtgtggagtatcctgaaaaggatgcagaagcgctctgtcactgccctgatggtgctgaacctggccctggccgacctggccgtattgctcactgctccctttttccttcacttcctggcccaaggcacctggagttttggactggctggttgccgcctgtgtcactatgtctgcggagtcagcatgtacgccagcgtcctgcttatcacggccatgagtctagaccgctcactggcggtggcccgcccctttgtgtcccagaagctacgcaccaaggcgatggcccggcgggtgctggcaggcatctgggtgttgtcctttctgctggccacacccgtcctcgcgtaccgcacagtagtgccctggaaaacgaacatgagcctgtgcttcccgcggtaccccagcgaagggcaccgggccttccatctaatcttcgaggctgtcacgggcttcctgctgcccttcctggctgtggtggccagctactcggacatagggcgtcggctacaggcccggcgcttccgccgcagccgccgcaccggccgcctggtggtgctcatcatcctgaccttcgccgccttctggctgccctaccacgtggtgaacctggctgaggcgggccgcgcgctggccggccaggccgccgggttagggctcgtggggaagcggctgagcctggcccgcaacgtgctcatcgcactcgccttcctgagcagcagcgtgaaccccgtgctgtacgcgtgcgccggcggcggcctgctgcgctcggcgggcgtgggcttcgtcgccaagctgctggagggcacgggctccgaggcgtccagcacgcgccgcgggggcagcctgggccagaccgctaggagcggccccgccgctctggagcccggcccttccgagagcctcactgcctccagccctctcaagttaaacgaactgaactaggcctggtggaaggaggcgcactttcctcctggcagaatgctagctctgagccagttcagtacctggaggaggagcaggggcgtggagggcgtggagggcgtgggagcgtgggaggcgggagtggagtggaagaagagggagaggtggagcaaagtgagggccgagtgagagcgtgctccagcctggctcccacaggcagctttaaccattaaaactgaagtctgaaatttggtcaaccttgtgagtggggtacatgtgctgtgggtatcggggtgctcgtgggcgccctggtggggcccctctcggtagttgagagtcacgtcctttagttccccatgatttacaattttggaagggacacaaagaaacatagactgcccccatcccagatgattccgagtacatagtctgcagataatacttagcaaaacgcagtctacagactcctaaagcagcttgtctaggaagaccacccatgtgggcttatcactccaggttctgtgacccgggaccttctgagaaaacagcactgctgtgaaatatcttccttgaagcctgtgataagtctccttgttagaatgactccaacttcctgccaataatctttgtcctctccataggagatgttctaggggatgccttccttccctccatttcacaaagaggccagacttgaggactaagtcattagatcttatcccttagaattttgcatatcagcatctgctaacctccacaacacaccctggcacagggtggggctgagggccccaggaaacaaagattcccaaaagtgagagggatgagtcattatttcctagagatgactgttgttttagagaaccttggtccaactctgttctgacaaggttttaggaagatggcaacaacagtggcagcagtgtactttttggatctttctcataaaaaaacaaaagagcaagtaagagagggaaaccaaatatccacatgcaacatccgcaacaaatctagtatgtcaaggtttgacatactcccatggaccccaaagtatgagccagtgagaatgagtcatcaatacctcaagacccatataccagcatctgtgcagaaggatgcagaaggaagcaaagggatgttggatggacctaagaagaggagatccccaagctgtctacagatccttactggaaggtatggtgcaccaatttgagaacagcagctgaaactgggagggacctaacggagtatttcccagtcctctcgcccattctgtatggtgagcacataataggtacttatttagtgtttgtcgaattaataaagttcaaatgacatttccctggagattcttccggtatttttgagtagggggcaggaaagggcaaatttttgttttgagtcatgtggctaaattctttatgcttccaaggtgtacaaaatactataatcaagttggcagagaggctgagggagttctcttcctgagcttgtgaaaaaaatcactccctttcaaaatgcttagtctcacatgcatgcatgtgtgcaggcatgtgnnnnnnnnnnnnnnnnnnnnnnnnnnctaaaattggcctgggaagaagaagaattcccactgaagggcaatgagaaggtgatccccagctatatcagcagcttcagacatcaatgggctccagacaccccagagtctctttattgaggttcttagaaggcgagtgcaatctcagcctagggtagctgaaggaggtccagttcgtgtcaagtctgtgttcaggaagtaggtgcagagctgccctttgcctttcaccttgatgacaccccggctgtagcaggtgtagcccagggactgtagggcccatgctgtctcctcagtcacctacaattggaggggggcgagggaatatggaggtggccctattcttagtccccctccccctatgcctccaatgtggttccctcacttggattttgccaaggactcctgtactctccatgcggctggccacgttcactgtgttgccccaaatgtcatattgcggcttctgggccccaataactccagctactacgggtccatggttcaaccctaatgagggatgtggtaatgacagacttggagaaggaagaggggaagaggaagccacaaggaactggaaggaagggagaagagcctggggggccctagaggagaggaggggtctctaagggctggaggaatgtagcttaagaaaaagagtgggagagcctcgtacctccttgcccagcaccttcacaccccatcccagggagtgagtcaggaaaggggcttcaggatgaactgggagcagctaacaaaggacttggagtggggcaagctcaggaaggtgaggaggtaccagactgctgcagcaggggaagtctctcacccactcgcaggcggaagttgttgaatgaatgcttgttgatgacgtccagcttagaccccagggccacggcaaattccaccatagtgccaaggtggctgcagctccgttcagcatcctggcaatgggcccgcccaccagggtgggccagtgagggcacaggaataagtcccactaataagcccatcaatgagagcccagaggaggatggtaggtaaggaagggttgccgtacctgttgtgcatcctgtccagaggtggcatttaagcctgtggctgccatgtaggtgctgccgatggtcttgatcttctccaccccactgaacttgggcttggagagcagctgtatatagagaagagtcctgtccccagtctctcttactctctccatcacctctcccagaagcccagccccaagcctttggagttaaaggatcaggctgtgggagtggagatagtgtcaggaaggagagggttggtggtgggcagtgttgctggagtgggtagatctgggggatcagaggaggtgagggagtactgtggaggggaggattgacttcatggccagaaaagcaaagtggaaggaggtactggtggaaaattctagaatctaggacatagggtctgggagactcttggaattttcacctcatcaaaatcagcaattatctcattgagcagcctcagacactctaggccctcatgattgatgttggattcagagtagaactccttgaagtctgggactgaggcgaagaggacacaaacgcattcataggactggtggtagagatcctgggggaacaggagactggagtgaggggtgtgtgtcatgttcctctcccttctagaggtctgcgtggggccctcctccccatgtccacactcctggtctccctgtttaagaagaattgggaaggagggagaggagtagggccaggctaccccagggaagtgacttaggagtcaaagctt

SEQ ID NO: 5543 - protein, 352 aa, Homo sapien
MNTTSSAAPPSLGVEFISLLAIILLSVALAVGLPGNSFVVWSILKRMQKRSVTALMVLNLALADLAVLLTAPFFLHFLAQGTWSFGLAGCRLCHYVCGVSMYASVLLITAMSLDRSLAVARPFVSQKLRTKAMARRVLAGIWVLSFLLATPVLAYRTVVPWKTNMSLCFPRYPSEGHRAFHLIFEAVTGFLLPFLAVVASYSDIGRRLQARRFRRSRRTGRLVVLIILTFAAFWLPYHVVNLAEAGRALAGQAAGLGLVGKRLSLARNVLIALAFLSSSVNPVLYACAGGGLLRSAGVGFVAKLLEGTGSEASSTRRGGSLGQTARSGPAALEPGPSESLTASSPLKLNELN

SEQ ID NO: 5544 - DNA, 489 bp, Homo sapien
  Unsure 9: Unknown base
gtttatccnacccggcttcagccttctccaaagtgtctgggattatctaagtgtcgtagccaccgctaccccgccctaatctcagcctttttatatcttcttggtaggcccactttttggcatcccctaacaagaagtcctcagagatttttactactcaacatgtgtgcgtcccactcagatgtattgtgttctttctgttcaccctctacttcccattccatttcttcctctgacttagggttagaatggcccaatgatcctacaactttttgatgctatttcatttgattcctctactgtctaaatcacaagttggctaactttacttactgtaagggatcagatagcaaatagtttaggccttgtgggccattcaatctgtcataactacccactctgaccatatgtagtgcaaaagcagcccttgacaatatataaatgaatgaacgtgaatgtatttcaataaagctttacttgtggacactg

SEQ ID NO: 5545 - protein, 91 aa, Homo sapien [sequence omitted]

SEQ ID NO: 5546 - DNA, 1336 bp, Homo sapien
tgcctcaggatcaacagtggttagccaaaatggtccagtataatacaccatatatgcttatgtgattcccttgctttgttgttacatttattaggtctatactaaattagccttcaatgatgaagacagactaaagctaagccacatgagatcaaggccatttcaacatggttgcctggaattctccaaaaaacctgtgggttgtgggtttggcatgtcaagcttcagaccacaaggtcttaagtggtaaatagatgcgttgtcctaatactgttccaaggtagagaatcctgatgataaggagtataggaaactcaaatagttcattatttctaaaaaatgtatattttaaggcatgatacaagtcctacaaacctcataagtaggtgaaaaaaaaaaccctgtggagtgataaacattctataaaacctggaaatttgtgtggagttcgcctaagctcacttttcctaaatatagctatataatattgtaaacaaatttgttttttagaaacttttaagaagatttctgtgagcgtaattgacaatatctgcattagaaacagaaagtattatccatcataaatatgagaaaagtgtgtgtcctctttctgacaatctttttatcttatttttttcaaacgttgtggttgttgtttcagcaccattttaaagaatttgaatacaaacaatccctcagcttatcaggttgacatttatgaagctgacctcatcactctttatcttttatgtctgcagtataaatagcatagacatttggtgtgaagggaggagaaaggaagtagtagttctgagaatattcatttgaacagcgtgactatggaagaatgaatagcaaaaaaaggagaatttttttaaaaagatctctcactgggaaaagaaaaagttatgcatttataaagtaattaaactggttttccttgtactttattaatctgaatctaatggcacttccttacgagggttttcagatgtgcttgtagttaatggcaacattatcagaatgactacacagacagtcctactctgaggagatgactttggaagaaacccatttggaactacacaccctgctatgtctgtggagaaatggaactgcaatcctcaagagtcacacttcatattccttcctttcaagtggttgataaaaggtagtgcttcaagcacaggatttatggaatagttggcaaattaaacaacatgctttttattttgactaccatttaagtggaatctttgaactttttttttgacatgtgaatctctaatgtggtgagagagaaaaacataaaaatataaaaacattcaagcaatcg

SEQ ID NO: 5547 - protein, 20 aa, Homo sapien
PQDQQWLAKMVQYNTPYMLM

SEQ ID NO: 5548 - DNA, 413 bp, Homo sapien
tttttttttttttttttttgggggaattaaaatgtatttggtgccagtggtgctgaacataaaataaaaaacaaaaaaagggcccaaacagggacatccaggctggaggttggagtggagcacagtcagatgtattcacttttttagcatgggtttcaaagtgcgtaaggggagaaaacgcatcatggattgtgctgtgcatcctggacaccgtgcgaggtgctcatagctgtgatcttgtctcccacaacttttttgggtgacagacgtccactgtccacattttatagacaaggagaaagggaagtcaaatgtctcgtccaagtctacacagctaaaaaggggcagaactagggtgacgctcaggcctcatttaaagatcgggggttggcgagaagtggggtgggcttctg

SEQ ID NO: 5549 - DNA, 2505 bp, Homo sapien
tggcagtgatgtcattccttactaggcttccaaagccactgctgtggccacagcttccatggagacaggcaagctgagcctctatgtggcaccaattcctgcagctgtttgtgttggagggaaaaaaatccaaatggacatcaacagctttcatcaactaaataaccacagaaaatatttatgaagactataaagcaatgattacttttgaattggaaaggaatcactattatttgaaatgtttcttcaaaagtgagcatccggacaggaaccatcatggatgctgaggccatggatgaaggcctactcgggaagatgatatccttgcagtctcaaaacggcaccccacaaaggtgatatcctaatttacaaagggaaaaaggtaccttaatctgaaatctggcaaatgcagcctcaacagaagtgacagaattgaacatcgccaataatgggacacacagacatcacatgcccccagtctgatgcaccacggagtcgtctctgatgtattcttgtcaaaaaatgtttgcctgattctaatcatgaaagaacaattagaaaaaatccaaattgacagatattctgcagaataaatggcctgacctcatcaaaaacatcaatgtcatgaaaaacacaaaacattgcagatagcgtgaaattaaagattacagagatataacttaatgcaagatctctgactggatcctagactgcaggaaaaagtctgctataaagaacatttggatcacttgtagtagctgggaaataaaacaaaacattatttgtaaaaggggggaaatctgaacatgggtcttgcagtatttatgacagtttttgcggggcagagatttctagattgacagctgttttagtactttcaaggtgatgctctgtctgctggtttgcattgtttctgtctgagttaagagactggcagaacacagagttgcagtagccaaacactggagaaagctgggccctacagaaacctaacgctgaagaaacctcaggagccaaactggtggagaaaacaaagagtcctccctctctcccttttcaaataatgatcatacatcttcaagctgtctgaaatggttaaggagttcagtctgtcgtcaggcacacaccagagccagctagcccacacagaccccatcagagcaaaacagacaagagaatttaattcatatccacatagaaaggacttctaggtaggaggtagaccctttagctcccttccaattaaaggagtccccaattctggcacctgagagtcccctgggtctaacagctatgatatttatgtagtgtgttgcttacctaaatgaatacaatttccttccagacacgtgacactgatattaaagtgctaatgagagggatctatttcttcttgtacgctaaaagagaaacagtagttcagatttcccatcagaagtccgaggactttgttcttgataactactaccaataaaaattgagtatttgaaaaattcctttgtattttccatccatacacatttttttttaaagcattttaggaagtcctctaattatatagtaaaaattgtcagcaatggcctgctagttttctatttgacctaatcacaaccatcctcgttaggtcctgaggtctgctctgctgcttggccaaaaccaaatggtgccaggtcacaaagcacttgcacatgtgaatcctgcatccattctacaatgggtcactattgactgaaatactttaataaaaatgatagagcacataaagcttgctgttgacagaaacttccgtgctcaagcaaggcagtgctatacatggtgagaccttgcacaaagtcagttaactaacagatgatctagaagcaggtgacacaatgaaataccctttggagctgttgcctatgtctgtggataggctctttgtagctaggttaggcttctgtgttaaagtgtgttagaagaaagcatcacataaggaaaatagaactctattcgtatgttttttcaaaacagaagtcaagtcacattcaggcaaaccaaatctgtaacattcaagaagatgcagtgactcttccgcatcttagagccacggtgtctgaggtggctggcatggctccaacacgctggcttccctgtcagtggatcatttacaatatggtgcatttcaaattactggtgaattcactgaatactggctgtttttttttttttaggggtaatcttatacataaaatttaggaaaagaaagagaaaaaagcaaaaatgacagaaataactcaaaagttcctaaaatttatgtgtatcttttcgtacctgtgaactcctgaataagtatttatatctgacaggtacaaatacaataattatatttttaagtaaaacctatttaataatatgaagtatggtgttaaatacatgtattaaaagataagtaacttcagaagtcttctgactttttaattgtaaaataagtgaaaactgttttgtgcttttttatttactgtatgc

SEQ ID NO: 5550 - protein, 24 aa, Homo sapien
AVMSFLTRLPKPLLWPQLPWRQAS

SEQ ID NO: 5551 - DNA, 1238 bp, Homo sapien
  Unsure 180-199: Unknown base
acaggatacattctggcgacttccaatgatttaattggatgctgaagcaccacactcctgataattctctgtgactctcagctgaaggtcactttggttggagttacttatacactattgctagtgtgtcagaaagttgaaggattagctgccttataagacacagaccattataaacannnnnnnnnnnnnnnnnnnntaattgagtggggaaaaacacacatatttatggtctgcacaaatgggtatatgccagagtgaacatgaaagtaaattacatcttacccgaatctgattctaatcagaaaacagccaagaacataacaccttttcctgctttcagagcccactgctggggccccagcagtgggctctgccatagcaggcgccataagctggaatttgtgcctccaggcctggagggacgcaaggcgtttctgatgaagccgatacattcagaattggggtccaaataggaaataatgcccttttcaggctagtgaaaatgttgaactctaagagataagtttatttagagactggattgagcttttgtttaagatttcccacctgcgtaaaattcctttcagcccataggattcttgattctgaagtccagacagaagcctgtgttctgtagctgctgaacaaagatgagagatcactggggctgctgtttgtccgaagtttgtgtgggtatcatgatgaaccctcttctaagaagtaaaaggatcttttaaatcaaaatagacaactgcagtcagtccaccatgcccaacgacatttaaaaaaaaagaaatatctgccccattgggtttctagtaaagtaagttgaacacagagaacagcagaataggaaaggctagtgtcaccttagtccacgtagcaccaaagttgtggtccgttgagacagaaaggaagcatttaggaacttgggataaatacccacttttatttaactcatacatgcactagaaatttgtttgggatgctcataaatacagagttcacagtagatcagtgtcctttgaggaaatgatttgtagaaggccgacttgcaaagcatttctttgaagatgaaatagagaaagcacttcctgggcggccccctgccctgcctggctcttagaagtggcctgtgtttccaccctgagctcttcctgttctgtatgggaagacctcgttagtgatgctgatgcagaataattttggggttatgtgggtaatgtttggtattt

SEQ ID NO: 5552 - protein, 15 aa, Homo sapien
MLMQNNFGVMWVMFG

SEQ ID NO: 5553 - DNA, 1034 bp, Homo sapien
tttctctcacgtgcctatggaggagagaacacacatagttggattgatccatacataattgggcgtttgcaggcaagtatgaggacaagaagacaaaaaagatgaaagtatttgtaggcatgattcaagattagagtcacagtgttcaagctgctcgctgatgaaaaggaagccaagaaagagctgtgagagtgaggagaggatggaagcctttaggttctccattcaatccaagaacggagcgggagagctgggaaggataacgggtttgcttagagggtaagatatgacatttaatacattcttcagaagtgagatgtttaaaggagtgaccaggttgactgtgtgaccatgagtatgagtaaatgaagtagaatgaaaatggtcaatgtagttgagaaagtcaaataatggtgagtattttaggatatagttgtgatttacaatttcaggtgtgggtcagtcagagtttgctgttgctgacatggttgacatgtttgttttactactgccaccagcaggaggagatgagctgcagggtatcaaaaggggtataatcgagatggcagatctggtagctgtaactaaatctgatggagacttgattgtgccagctcgaaggatacaagcggaatatgtgagtgcactgaaattactccgcaaacgttcacaagtctggaaaccaaaggtaattcgtatttctgcccgaagtggagaggggatctctgaaatgtgggataaaatgaaagatttccaggacctaatgcttgccagtggggagctgactgccaaacgacggaagcaacagaaagtttggatgtggaatctcattcaggaaagtgtgttagagcatttcaggacccaccccacagtccgggaacagattccacttctggaacaaaaggttctcattggggccctgtccccaggactagcagcagacttcttgttaaaagcttttaaaagcagagactaataaaattcatcctgtataataattttacatatcatttcataaagtattttaatagaaa

SEQ ID NO: 5554 - protein, 163 aa, Homo sapien
MVDMFVLLLPPAGGDELQGIKRGIIEMADLVAVTKSDGDLIVPARRIQAEYVSALKLLRKRSQVWKPKVIRISARSGEGISEMWDKMKDFQDLMLASGELTAKRRKQQKVWMWNLIQESVLEHFRTHPTVREQIPLLEQKVLIGALSPGLAADFLLKAFKSRD

SEQ ID NO: 5555 - DNA, 864 bp, Homo sapien
  Unsure 135-184: Unknown base
gtacaattctgggaagacatcatctccattttgtccataagaagtttaagctctgaggggtaaaaaaaacttgttaatgaccacacagcaagtatgctgggactcaaagtagaaatgacccaaaaccagcctcgnnnnnnnnnnnnnnnnnnnnnnnnnnnnnnnnnnnnnnnnnnnnnnnnnncccaactattatttttttaaatgatcttataaaacacaccagtatgattgatcctctgctttttaaaataattttactcatctagaagggatctcccacattgctttttaagactaagctctgctattgtgattaaaataaaattttattttctaagatggatgtatgcacatttccaaagaactggtattacataaagcgcatctgtgtggttgctcaaatcttaagtacctttacaaaaaggagaagattcattatgtaggagaggttgtactgctgagttgcctatggttctgagttaattgcacccacagtcactgcactgtgttgaaaaatcaccaatttaattagcagatttcctagacagtgactagactgaccttttatatgttaagctttgtaaacacatttaagccgtgatggaatcgaagtgctagctcagatttattgaaataaatatagctcttgctgttggcaacaggaattatgagaagcagtcttcataagaagaattacatttttatatgtctgttaagaaattaaaaaaaatttttttaaccataagatcttagtaagtgttctcgctttggcagatggattaaccttgttcttttggagccagatcaatatctagtttatctctagagcagtggacagtctaactatgttttgattatatt

SEQ ID NO: 5556 - protein, 20 aa, Homo sapien
VQFWEDIISILSIRSLSSEG

SEQ ID NO: 5557 - DNA, 538 bp, Homo sapien
tctaaaatattgaaataaaatcatgtttggcttacttttcaaggaaataaaactgctgtactttcattcacagctgatgaaagaattacagaagaatatgggcaacaacaattgtagtagatttttaagtacctagttaaaaagtgttctgggccatccagatatatggaaagcaatattccttaatcttctctcctggagctcatttgctcacgtaaaagttaattataaaacattgctatatgacttctactggaggagaattcaccatgctgggaatggcagcaggttgcagtggagaaggctctgaatcgaccatgagggggctttgagttcaagggcaattacccaaccactctctgtgcctgttctccaaccagtcaaacaaatgggttggacatgatgaacttaaaggtccctttcattttgaaaaatgacacaaaaaggacagaaagacacattcagattcactttggtttctaagataacaccaaacactttgaaacttcccccttcatgtttttcaagcagaggaagt

SEQ ID NO: 5558 - protein, 34 aa, Homo sapien
MTQKGQKDTFRFTLVSKITPNTLKLPPSCFSSRG

SEQ ID NO: 5559 - DNA, 832 bp, Homo sapien
ctccataagcatagggacgctgtgtgaaagagtagatgtgtgagataatgcaagggaagagtagtgagtgagaggctggagaggaaagagtgggtcttggaagactctaatagagaactcaggcttcatcctctaagagatggagatccagttaggagattttgaacagggtttgtgttttagataggtcgtactggctggattatgaagaattaatttaaggcagacagactggaggtgccttccacaccctcatctcttgctggccagggttttgaccctgaagcagagattcaaggcagaggcccagaccctcgaccttgggccctgatgaattatccaaggtaaaggccccttgatgagcccctgacagccccccagcacctcctgcccacccattccccatgcgcatttactgcctttcctctgtattaccttgggctgcactttcctttaaaactataactctacttgttttcatttggaaggtcctaattctttccctatgcaaaagaaatttattctggttaccaagttatgtgtgtgttactttttttaaatatggaaaaaatctgaagaccagtataatcttattcccctcagtgccatcccttgctctcttgcctgatatatagctactattaatagcctggcatatattctttcagatttttcatgtaaatatctctcattctttttaatacttgtacgtattctattgggaggatgtatgatcatttatttctctaatcccttatttgttgcagcagtggaattcttagatcaaagaatatgtacttcccttaggttatagagactgtgggaaaaatag

SEQ ID NO: 5560 - protein, 13 aa, Homo sapien
SISIGTLCERVDV

SEQ ID NO: 5561 - DNA, 1717 bp, Homo sapien
aaatgatattggttaaaaaaatagggggataataaatggaactttagctttcctgttcccaacagcttatgaaaacctcaacaagtatcttattgctacagctagactccaaaaagatgtactttgagttagaatctagaccccagattccaggaccacttaaacagcctgctccttttcacctgctggtggcagatgtggccttggtgtttagaaattagttgcgcatccactgaagagacaagcagaaagtactaccctctgggagagtgttatagcctctctggaaactgagatgaacatgtggggtggggggcagaaaatgcccaacctagttctttagatacttaaaagctaagaataacaaccccaagagagggtctgaattcagctgtagacagcaacttttggttgtcctgtttcttaatacacagggaagatcaacacatagttactgtgggccaggtcctgccgtgggcacagagatacaacagtgaacaaagcccctgcccatatagaatgcacttacaaggtgccaagcatttggccaaatggtaggttcagaaataagtgggatccgtcctgttttcagtagaggagaacacaagagaaagacatatttgatccaacccaggagtttaaagaaagcttcctgaagacctctgaagctgcatcttgagagttaagatttcaactagttaagaaagtgtggggaagggtatcctaggctgtgggaacatcatggagttatgaccacatgtggggtgtggacacgtataaacacttcagcattgccagttcacactgtcctgggagaagcaggaggagagactagagaggaagggggaacaggacagtaggcctccagtgctgagccaagaaagaagcttgatttttattctgtcggcaatgaagaaccatcaaagtgtttttttaaggaaaggaagagagggagggaggaaaaaaagttgtattcaggaagttcaacagaaaatatgttctgaaatgttatgtgatgtctgccagtcatctaggttctgagcttgagagtgctgtcatccttatccctgccctttgaaatgctaataggttgttaagctactctttagttactctttattctcataaacctttatacttttagatgccctacttgaaattgggtgtaaaatgaacacttgtaacatgggaagggggactggaaaatattaaccagacaacaatgcaagtatcccaaggctgctaacaagttttcccaccccaacctagaccatatattctaactataaagattagactagacaaggccccatgcaaaacaaaacaaaaacaaagacaattcaggagaagtaactgcccaaatcttatctctgttataatacatgagctaaattttaaaataatcagtgggttgtagttacgaatggtaagttcaagtatctgttgttacaagcagagttaaacagtccacacctgacacctcaggaatttaagttataaaagtatttgatatttttaaagaataaatacagaaataatgcctatttaggtagaaaaaaaacttttggtgccatctaatatcaatctgttctattagtaactgacataaacatctcatgcaaagaaatagcttagaaaaagtagatttgttccaatggtgtccctgatgccaagtctgatgttaaagctattttgtaaaataaaagaatataattag

SEQ ID NO: 5562 - protein, 20 aa, Homo sapien
MVSLMPSLMLKLFCKIKEYN

SEQ ID NO: 5563 - DNA, 590 bp, Homo sapien
agtatttcgttatagcagtccaagcaaactaatgcacatatcaaaactactttagtttttccactttgttgcaaacaattgcaagttgtccaggttttctgtcttcccccagcctgcaagtgctcagaggacacccaaccctatgatctcagccaactcatgaagtttgatttcacaacttagtgatgtcttcccagtggaatcctaaatgataaggaaaatggtatagagccaagacttgaacattaacaacccaggagcacagaaacagcacagttagctgagaggcgttatggagagaagcaaccgaatgcacactgagcgctgtgagaagtccacgacagtggggaacagcgcccaccgtcacaaaaagaaagaccctcggcaggtactttagagtcacgttcatgctgtaatatgtggggaagaaagactattccaaatggatctggctttttaaaacaagggaattttccttgctcttgggaaccagcaaaatccagctgctcattgaactgcctgtctggaatctcacaaatttgcaccttgaagttgttaataaaggactaagttgataattcgaacaaaaa

SEQ ID NO: 5564 - protein, 17 aa, Homo sapien
VFRYSSPSKLMHISKLL

SEQ ID NO: 5565 - DNA, 463 bp, Homo sapien
caaggtttacatgaacagggaacttgtctgttttgtttattactgtatcccctatgctggcacatactatgtaataagtgtttgttgagtgcatgagtgaataaccattctaaaaaactctgatgtttaaagccctttgctttatataagaattttacttggaaccctggtatttttgtttgtatttgtttgttaataaatgtcaagagttcagtagtaagataggtttcagaaatgctaagttaaacagaataaagaaagaatatgtattacaggtcctggcagagccttgaatatgctaacatttgacagtgggagtctttgagaattatcacatgaagctgctgtacattacaacacattctaggaaatgctgtcttagacaaaaacctgtcatattagaattggggtaaggggcacgatactgaccgtgaggcagcagattcctatggactacattaaa

SEQ ID NO: 5566 - protein, 31 aa, Homo sapien
QGLHEQGTCLFCLLLYPLCWHILCNKCLLSA

SEQ ID NO: 5567 - DNA, 7265 bp, Homo sapien
  Unsure 5539-5850: Unknown base
ctggggagccggcgctggaggtggtgagtggcgtggggactgtgtcgagtgggtccccaaggtgccggaccctgcggaggggcgaagtttcggcactggggagggcgtgcggacgctttccctacaggcgaccactgctctgcgggcgggtggtcttagctccagtcccccattcagttcctcagcattccaggtcggcggcgaaggggtccccgaacgaagggcgcaaggcagcgtctctgctgggaccgggaagccggacttcagggcctctcggcccgtgggcttctccccgagtctccccgagtcggttggcattaagagtttagcagatactttcagaaatggatacataagaaatggctggaaatcaaatgaatgtccaaagaagagcttagggtcttagtaacattcttttttaaaataactgtctgccaaaatgtcattacacagtactcataatagaaataacagcggtgatattcttgatattccttcttcccaaaatagttcatcactgaatgccctcacccacagtagccgacttaagctgcatttgaagtcggatatgtcagaatgtgaaaatgatgatccattattgagatctgcaggtaaagtcagagacataaatagaacttatgttatttctgccagtagaaaaacagcagacatgccccttacccctaatcctgtaggtagattggcacttcagaggagaactacaaggaacaaagaatcatctttgcttgttagtgagttggaagacacaactgaaaaaacagcagaaacacgtcttacattacaacgtcgtgctaaaacagattctgcagaaaagtggaaaacagctgaaatagattctgtcaaaatgacactgaatgtgggaggtgaaacagaaaataatggtgtttctaaggaaagtagaacaaatgtaaggattgtaaataatgctaaaaactcttttgttgcctcttctgtacctttagatgaagatccacaggtcattgaaatgatggctgataagaaatacaaagaaacattttctgcccccagtagagcaaatgaaaatgttgcacttaagtactcaagtaatagaccacccattgcttccctgagtcagactgaagttgttagatcaggacacttgacaacgaaacctactcagagcaagttggatatcaaagtgttgggaacaggaaacttgtatcatagaagtattgggaaggaaattgcaaaaacttcaaataaatttgggagcttagaaaaaagaacacctacaaaatgtacaacagaacacaaactgacaacaaagtgcagcctgcctcagcttaagagcccagctccatcaatactgaagaatagaatgtctaaccttcaagttaaacaaagaccaaaaagttcctttcttgcaaataaacaggaaagatccgcagaaaatacaattcttcccgaagaagaaactgtagttcagaacacctctgcaggaaaagaccccttaaaagtagagaatagtcaagtgacagtggcagtacgcgtaagacctttcaccaagagagagaagattgaaaaagcatcccaggtagtcttcatgagtgggaaagaaataactgtggaacaccctgacacgaaacaagtttataattttatttatgatgtttcattctggtcttttgatgaatgtcatcctcactacgctagccagacaactgtctatgagaagctagcagcaccactcctagaaagagccttcgaaggcttcaatacctgtctttttgcttatggtcagactggctctggaaaatcatatacgatgatgggatttagtgaagaaccaggaataattccaagattttgtgaagatcttttttctcaagtagccagaaaacaaacccaagaggtcagctatcacattgaaatgagcttctttgaagtatataatgaaaaaattcacgaccttctggtttgtaaagatgaaaatgggcagagaaagcaaccactgagagtgagggaacatcctgtttatggaccatatgttgaagcactgtcaatgaacattgtcagttcttacgctgatatccagagttggctagaattgggaaataaacaaagagctactgctgctactggtatgaatgataaaagttcccgatctcattcagttttcaccctggtgatgacccagaccaagacagaatttgtggaaggggaagaacacgatcacagaataacaagtcgaattaacctaatagatctggcaggcagtgagcgctgctctacggctcacactaatggagatcgactaaaggaaggtgtgagtattaataagtccttgctaactttgggaaaagttatatctgcactttcggaacaagcaaaccaaaggagtgtttttattccttatcgtgaatctgttcttacatggctgttaaaagaaagtctgggtggaaattcaaaaactgcaatgattgctacgattagtcccgctgccagcaacatagaagaaacattaagcacacttagatatgctaaccaagcccgtttaatagtcaacattgctaaagtaaatgaagatatgaacgctaagttaattagagaattgaaggcagaaattgcaaagctaaaagctgctcagagaaacagtcggaatattgaccctgaacgatacaggctctgtcggcaagaaataacatccttaagaatgaaactgcatcaacaggagagagacatggcagaaatgcaaagagtgtggaaagaaaagtttgaacaagctgaaaaaagaaaacttcaagaaacaaaagagttacagaaagcaggaattatgtttcaaatggacaatcatttaccaaaccttgttaatctgaatgaagatccacaactatctgagatgctgctatatatgataaaagaaggaacaactacagttggaaagtataaaccaaactcaagccatgatattcagttatctggggtgctgattgctgatgatcattgtactatcaaaaattttggtgggacagtgagtattatcccagttggggaagcaaagacatatgtaaatggaaaacatattttggaaatcacagtattacgtcatggtgatcgagtgattcttggtggagatcattattttagatttaatcatccagtagaagtccagaaaggaaaaaggccatctggaagagatactcctataagtgagggtccaaaagactttgaatttgcaaaaaatgagttgctcatggcacagagatcacaacttgaagcagaaataaaagaggctcagttgaaggcaaaggaagaaatgatgcaaggaatccagattgcaaaagaaatggctcagcaagagctttcttctcaaaaagctgcatatgaaagcaaaataaaagcactggaagcagaactgagagaagagtctcaaaggaaaaaaatgcaggaaataaataaccagaaggctaatcacaaaattgaggaattagaaaaggcaaagcagcatcttgaacaggaaatatatgtcaacaaaaagcgattagaaatggaaacattggctacaaaacaggctttagaagaccatagcatccgccatgcaagaattctggaagctttagaaactgaaaagcaaaaaattgctaaagaagtacaaattctacagcagaatcggaataatagggataaaacttttacagtgcagacaacttggagctctatgaaactctcaatgatgattcaggaagccaatgctatcagcagcaaattgaaaacatactatgtttttggcagacatgatatatcagataaaagtagttctgacacttctattcgggttcgtaacctgaaactaggaatctcaacattctggagtctggaaaagtttgaatctaaacttgcagcaatgaaagaactttatgagagtaatggtagtaacaggggtgaagatgccttttgtgatcctgaagatgaatgggaacccgacattacagatgcaccagtttcttcactttctagaaggaggagtaggagtttgatgaagaacagaagaatttctggttgtttacatgacatacaagtccatccaattaagaatttgcattcttcacattcatcaggtttaatggacaaatcaagcactatttactcaaattcagcagagtcctttcttcctggaatttgcaaagaattgattggttcttcgttagatttttttggacagagttatgatgaagaaagaactatagcagacagcctaattaatagttttcttaaaatttataatgggctatttgccatttccaaggctcatgaagaacaagatgaagaaagtcaagataacttgttttcttctgatcgagcaatccagtcacttactattcagactgcatgtgcttttgagcagctagtagtgctaatgaaacactggctgagtgatttactgccttgtaccaacatagcaagacttgaggatgagttgagacaagaagttaaaaaactgggaggctacttacagttatttttgcagggatgctgtttggatatttcatcaatgataaaagaggctcaaaagaatgcaatccaaattgtacaacaagctgtaaagtatgtggggcagttagcagttctgaaagggagcaagctacattttctagaaaacggtaacaataaagctgccagtgtccaggaggaattcatggatgctgtttgtgatggtgtaggcttaggaatgaagattttattagattctggactggaaaaagcaaaagaacttcagcatgaactctttaggcagtgtacaaaaaatgaggttaccaaagaaatgaaaactaatgccatgggattgattagatctcttgaaaacatctttgctgaatcgaaaattaaaagtttcagaaggcaagtacaagaagaaaactttgaataccaagatttcaagaggatggttaatcgtgctccagaattcttaaagttaaaacattgcttagagaaagctattgaaattattatttctgcactgaaaggatgccatagtgatataaatcttctccagacttgtgttgaaagtattcgcaacttggccagtgatttttacagtgacttcagtgtgccttctacttctgttggcagctatgagagtagagtaactcacattgtccaccaggaactagaatctctagctaagtctctcctcttttgttttgaatctgaagaaagccctgatttgttgaaaccctgggaaacttataatcaaaataccaaagaagaacaccaacaatctaaatcaagcgggattgacggcagtaagaataaaggtgtaccaaagcgtgtctatgagctccatggctcatccgcagcagtgagctcagaggaatgcacacccagtaggattcagtgggtgtgaatactgatgtgtaggcacttttatgaccacccatgaaagaaaaagaacacttgctcggtaattttctttatgcaggagagtttaagagaaatcagcacagatatttcaaaaaagtccatgtctttttatctttaaaatatctatttatcaaannnnnnnnnnnnnnnnnnnnnnnnnnnnnnnnnnnnnnnnnnnnnnnnnnnnnnnnnnnnnnnnnnnnnnnnnnnnnnnnnnnnnnnnnnnnnnnnnnnnnnnnnnnnnnnnnnnnnnnnnnnnnnnnnnnnnnnnnnnnnnnnnnnnnnnnnnnnnnnnnnnnnnnnnnnnnnnnnnnnnnnnnnnnnnnnnnnnnnnnnnnnnnnnnnnnnnnnnnnnnnnnnnnnnnnnnnnnnnnnnnnnnnnnnnnnnnnnnnnnnnnnnnnnnnnnnnnnnnnnnnnnnnnnnnnnnnnnnnnnnnnnnnnnnnnnatatcttttatctttaaagtgtttaacattggtatactgtctgtagttggttcattagtcgtttataaagggttattttctcatgagtggaaacctgaacaatcagttacctttgtgcctatgccttctctctcctcagacagctgggatgtttatggtgaaatggcctgtacaagtttaactaagacaacttaacttgcattgttaatcaaaaattcttttctcaaagggttaactggttgccattttgaatagtatgttcaagggtgtagcttcctgtttctttccaaattataagtagctacctaaatatagtataattatatattaataatatggcttgctggcacagtagtttaccctgttatctgtgtttcataatgggggctgtatgaatattatttaaaactaataaaatgttgccagaattatactaaactgttggatgagattaggagatcagaggctggaccttctcttgataatgcttgttttgttaaaggtataatgaaataatttgtatatgatttgatgaagattaaagacccttattttccacagctttaaaaaaaaacctttatttatgatcaagtaataaagataatattctacttgtgggatcttacattacggaaatagtttgacgtttttgacctcaagagtatgtataatttgaagagatactttgtaactatgcttgggtgatattgagcagttcctaaagaataattcatttaaaaaaaaagaagaaaaaaaaagaagaattcatttaaataacctgatcctttcatttgcccttttcgaatttacagatactacttgtacatttggcataactagttgaaattggccattcgtaccatgaataaatctgatagtttccttgttaggaagagattgtaagtaaatacagtcattgcagtcagaacagtattagtgaaccttgtgtggtgttttcaagctctttaaaatggtacaatgtagcacatttgctttcatttctttttttatttttggcatttgaccttgtattctttctgaagctctatatgtgtttttattagtcaataatctggcaagtagcactttgcctgtgcagtttgctggagtgtagatgtacatatgaggatttcccgggaggtgcacttctttgaagaacttcctaaagtacctgtatagtagttttcatcttaatattcagtatttaatcttcagtttgtgctttgtaaactcatgacttaattggtcagaaactttttagtgtctttataaaattttgtatacatatttatactaaacacattgtgatactgtatttgaatgaatggtgaaaaaatatttgctattggaattatgtgcactgacaagaaatgttataaagagaatgcctttaataaatcttttcagcattagaa

SEQ ID NO: 5568 - protein, 1648 aa, Homo sapien
MSLHSTHNRNNSGDILDIPSSQNSSSLNALTHSSRLKLHLKSDMSECENDDPLLRSAGKVRDINRTYVISASRKTADMPLTPNPVGRLALQRRTTRNKESSLLVSELEDTTEKTAETRLTLQRRAKTDSAEKWKTAEIDSVKMTLNVGGETENNGVSKESRTNVRIVNNAKNSFVASSVPLDEDPQVIEMMADKKYKETFSAPSRANENVALKYSSNRPPIASLSQTEVVRSGHLTTKPTQSKLDIKVLGTGNLYHRSIGKEIAKTSNKFGSLEKRTPTKCTTEHKLTTKCSLPQLKSPAPSILKNRMSNLQVKQRPKSSFLANKQERSAENTILPEEETVVQNTSAGKDPLKVENSQVTVAVRVRPFTKREKIEKASQVVFMSGKEITVEHPDTKQVYNFIYDVSFWSFDECHPHYASQTTVYEKLAAPLLERAFEGFNTCLFAYGQTGSGKSYTMMGFSEEPGIIPRFCEDLFSQVARKQTQEVSYHIEMSFFEVYNEKIHDLLVCKDENGQRKQPLRVREHPVYGPYVEALSMNIVSSYADIQSWLELGNKQRATAATGMNDKSSRSHSVFTLVMTQTKTEFVEGEEHDHRITSRINLIDLAGSERCSTAHTNGDRLKEGVSINKSLLTLGKVISALSEQANQRSVFIPYRESVLTWLLKESLGGNSKTAMIATISPAASNIEETLSTLRYANQARLIVNIAKVNEDMNAKLIRELKAEIAKLKAAQRNSRNIDPERYRLCRQEITSLRMKLHQQERDMAEMQRVWKEKFEQAEKRKLQETKELQKAGIMFQMDNHLPNLVNLNEDPQLSEMLLYMIKEGTTTVGKYKPNSSHDIQLSGVLIADDHCTIKNFGGTVSIIPVGEAKTYVNGKHILEITVLRHGDRVILGGDHYFRFNHPVEVQKGKRPSGRDTPISEGPKDFEFAKNELLMAQRSQLEAEIKEAQLKAKEEMMQGIQIAKEMAQQELSSQKAAYESKIKALEAELREESQRKKMQEINNQKANHKIEELEKAKQHLEQEIYVNKKRLEMETLATKQALEDHSIRHARILEALETEKQKIAKEVQILQQNRNNRDKTFTVQTTWSSMKLSMMIQEANAISSKLKTYYVFGRHDISDKSSSDTSIRVRNLKLGISTFWSLEKFESKLAAMKELYESNGSNRGEDAFCDPEDEWEPDITDAPVSSLSRRRSRSLMKNRRISGCLHDIQVHPIKNLHSSHSSGLMDKSSTIYSNSAESFLPGICKELIGSSLDFFGQSYDEERTIADSLINSFLKIYNGLFAISKAHEEQDEESQDNLFSSDRAIQSLTIQTACAFEQLVVLMKHWLSDLLPCTNIARLEDELRQEVKKLGGYLQLFLQGCCLDISSMIKEAQKNAIQIVQQAVKYVGQLAVLKGSKLHFLENGNNKAASVQEEFMDAVCDGVGLGMKILLDSGLEKAKELQHELFRQCTKNEVTKEMKTNAMGLIRSLENIFAESKIKSFRRQVQEENFEYQDFKRMVNRAPEFLKLKHCLEKAIEIIISALKGCHSDINLLQTCVESIRNLASDFYSDFSVPSTSVGSYESRVTHIVHQELESLAKSLLFCFESEESPDLLKPWETYNQNTKEEHQQSKSSGIDGSKNKGVPKRVYELHGSSAAVSSEECTPSRIQWV

SEQ ID NO: 5569 - DNA, 464 bp, Homo sapien
aaggtaaaaatgggaaatgttttcagttcagataaggttgactgtgcagctcacatctgtatgtgaagcatagtacggatattcataaggatttttagttatcaaaataggttaaattatattctgtatacttaagatgccagaaatacttctatggaaagagttaaaatctcctatctaaactgttaatattaggtgtttaaagaactcacatagtatgactagtttctctcttaagagttaataaataaggaatctgcactgagaaccattgcaaaggaagctggagacgggtggctttcatagagactgggaatgtgagtgctctctttaaaaaaaaaaaaataccctccttaaaatattataggtgttcctgcatactcatacagtatttcagtatgattttgtccatagactcaaagagactgttttaaagtatagttctgatcatgtcagacctcttt

SEQ ID NO: 5570 - protein, 21 aa, Homo sapien
KVKMGNVFSSDKVDCAAHICM

SEQ ID NO: 5571 - DNA, 419 bp, Homo sapien
gtgaggcatagaactgactttattgttttgactaggaaagagcaaagggtttggaatcaaaagtcccaacttccccaccttcttaatagtgtgtgaatctgagtgccttattaaccttccctggtcccagtttcgtatctgtaaagttagaatagcaatcctgtttaatttgcttctctcaccagggatcagaaggccaaatgagatgatgtatgtaaaattgtaaagtcctccacagatggcacttgccacattacagagaacttgagaccccccccccaccaataacgttccaaatcttccacatgcagatctggagtccaggtgtcctggctcctggccctgaactttttggctgggccaaggggcttttcggtaaagtgctttggaataaaacaggatgaacatgaatcataaaa

SEQ ID NO: 5572 - protein, 31 aa, Homo sapien
VRHRTDFIVLTRKEQRVWNQKSQLPHLLNSV

SEQ ID NO: 5573 - DNA, 1246 bp, Homo sapien
tgaagtagaattttattacagaatttcacaaagaacttaatatctaagtgtaaagatagaaagcattgaaattcattagcatctataaatacaagatgattttctcatacctacctctaccacaaccctaaatcaaaacaatttcttatgaagcttcagttttcccagaggtaaattccagtacaatatttggcatgctattaagtgagtgggtgctgaaatcctacttcgttttccttttctttcaaagaaggaaaataaggactgtgcatatcgaaaatcagcgtttctaggaagttgaaagtttgggacagtcttcttggacactcaatcctaaatacatgaaaggcagctactagcgcagccaaggctgtaacacagtcgtccacctttgtgagcctctccctttctaaatataaagaaaattcgcagacctccatgttgaaagggtttttaacttccaacacaggtgtggacacttgcacctgttcattcatgatgacaaaaaggctgggatcatccccaaaaacatctgggaggagtaaacatgtggctgtcatcttcatgtatttcaacatgtcttcatctgtgtaatgtttcattttttcttgcaatacaatattgattggattgtccaccactgaaaaagaagtcagtatattttctgaataggattccaaaatgtgccttgttttcttataaatatctgttcttgtaagaagttggaattctctgaacatctgataagggcacttcaagaaaggaaacagtttaagaatgtccttcagaggtgttcggctgccaatcatctttcttcttatttccaaagtttggctcattctcttgtcaatttctctccagtccttttctgttttcacgtattcttgctggaaccacttaatatgttcatctagctcagaatcaaaacaaacagcttcttcttttatctggacaagtttaatttcatcaaatcttatatcagcaagagatttccttgtctggcctcttcggtgtccaaatttacacttatttctaatcacttgctcatcatcttctatgggtcttcgaacatatttaaagcgatctttgagggctcgtttccataaaaagaagccacagccatcctcatccaggaaagggtgggcctgcagcagggcattaaccacgtcattgtactgctgggtgctggggtacagtgagccttccagatacttagtcatgtcggcctggagaaactcaatgatcc

SEQ ID NO: 5574 - DNA, 891 bp, Homo sapien
gggacagagtgatcaaggcagagtgatctaaaggacacagtagtacttctttaggaccctggcagaatggaagagagcatctggcttctaaggcactgcacaaacttgaatgatcttcttcagaattgacaaggaaaggccatgttatgttcaccctgggttaagttttaagtgtatcttatttaatttttttcaatatgagtcatctccagatactgtgatgatttccaaataaccagaatctagatgactagaaatttactctagctggctttagacaggaagcgtgaggacagaatccagctgcttccactccagggtaggtctgaagccaaccgtcctcggtttcctggcctgtggcatcagtctggttggattacacacaaagccctgcagatctgctgcttttcctgattctcctgtcctgagtgagtgcaaggggctcccctgtcgccgatgtgttctttgaagcagatgctgtgcctgatacctgctggagagtcccaccgccttgagcttctgggtcgagaaaggccaagttgcacactactgagagactgccatgcaccccctggaggcctcagaacattcgacatgctccagtcatggccacggcagtgactgctgattgcctaaccccacatgtgttctcccccttccctgataatcaagcccctgattttcagctgggcacaaaataattcttcctagaacaactccacgtgtgttatcgcccttgcagctgggggtggccaccactggggagaggcagggtgaagaggtcgaaggagcctgagttagcagggatgagcagtggccaggtaaccccagacccattatcctctggatttcttttatgtgaaacaataaaatgtcttgtattcgaaaaaa

SEQ ID NO: 5575 - protein, 28 aa, Homo sapien [sequence omitted]

SEQ ID NO: 5576 - DNA, 1051 bp, Homo sapien
gacccacttgtgtaatacttaattgcctgtgtttttacaacacaagtcagaagttctggcgatagtggactatcacccaaaaaagattttctgagacatctcatcagagctgctcgagtaccgcgcatgaagacggtgttagctctgcagggcatgtgctaactaccagacgatgaaagaacatttcctctagtttctggataatgagcaggcacacaggtaaagatgcctttctcagggttgacgccttttgtttcctaatgattctgatgattttgttgaactagacttttaaatattaattgttacctgcatatgtttgctgttgtggtttgcagagggctcagaggaacaagcattttaattggtatcctgggactgtaataactttttattaaaagtctggaaagatagtaatcaaaaatagactctcatctctatcttctctgtgcccctggcaaatatcctcttcattaattttgtttttattatttgccgtcaagatggttatctctaaatatcagatgcttcaatccacagtgataaccatgtgtgaattaatgcttgataagcttcaggttatcaggtggagaagtgtggttaaggcatacagaaagaaaaaatgcacagaaggaaagggatagcaaggggatactgtgccttggtaagcgtggtgccaccgcagactaaaagcagatataagtcaagtgctactgacttaagtttggcaaaatcactcctcacagcccgctctgttttagaaatgtttatatttctgatatcacttttgttaatttgaagaacttttaaaataccatcattgtttcaaaacaaaatgtggaaggtgtggatcaccttcctgaatttacagaaaagtttttgggtacatttctttgcggaagattggctgagatgtggttcacggcagggtggtgcccgtgccttgcggatcacgttgtctgtacactgactgacataccaacttagagtctttgaaaatgcccattggtaagtcaacattgttttccctgaaagtcctgagacagaaaaa

SEQ ID NO: 5577 - protein, 17 aa, Homo sapien
MPIGKSTLFSLKVLRQK

SEQ ID NO: 5578 - DNA, 654 bp, Homo sapien
gtgaaaagaaccaatgcctcgctatttggtgcacatggctttgtccgattcctagaatgccatgtgttaatgttacagaaaatgccagagggtatcttcatgcatattcctctagagcttcacagccaaacccttgaggcttattttgccatcagtaactccttcctgttcccccagccatgagtgaatatgctgaatgaggaccttttactgtaaggagttcttctctcaatgtgtgacctgccctgtctatcaccagtgggtatctgagcttaaggcctctgtaatgagatgtgaaaagagagaattgatgtccctgactaacagcatcagaccttttgacacctgcttgaccaggatttggataaaaggagaatttctgcaggaaaataactcttagaaaagaaacttaggaatacagagatttgacagagtggctgatgtcaaggagaacaaggatgcagaagaaactcaagatgtatgtattaaaacaaaagaacaataacctgaagggaccatgattctgttattgtatataacacaaggaaatgccccagattctcctttaaaagatataatgtacatattaagtatactagcctttatagttactgctatctacatgtttatcaaaataaaagactatttttttct

SEQ ID NO: 5579 - protein, 67 aa, Homo sapien
MRTFYCKEFFSQCVTCPVYHQWVSELKASVMRCEKRELMSLTNSIRPFDTCLTRIWIKGEFLQENNS

SEQ ID NO: 5580 - DNA, 1789 bp, Homo sapien
  Unsure 158-235: Unknown base
ttaagagacatctttgcagggccaattcaaaatatgtaaagaaatatattttagagtaaaatgcttttatttctttcagatcccgctatctgtcctgtgatgccatactagagtaaagctggaatttggtgtcttattgttacaaaaagccttaagannnnnnnnnnnnnnnnnnnnnnnnnnnnnnnnnnnnnnnnnnnnnnnnnnnnnnnnnnnnnnnnnnnnnnnnnnnnnnttcccatcatggctgaattactttagaatgcccttagttgagaggaggggtcattcagacggtttggagcttagaattgtgtttagtgtgcatctcctgagtgctggtagacccttcagtgttcattagaactttattgttcagacccaagaagagcaaactttttgatgaagtattacaagagaaaagataaacagccttctgaagaagcaagttattttgttgtagcaatgtctactaaagaaaccaactggcttcttcctgttcgcccacctttcctttgtttattgatatttccaccagaggaaggaccaggcaaaagggagaataaattcactttttaagataatgcttctgagttttagcacagcatcccatttcccgggaagctttattgccaaggcaataaggagaccatgtgagtaggagttaaatgcacagccatttgtgaagtgagactgcttgggttcagatcttgattctgccctttattctatgttgtggaatatattacattgtgctgtgcctcttttaccttatttgtaaaatagagcaagcacccaactcaagcagttgttgcaagaactgcctgctatgctgtttaatacagtatgtggcaaatagcaagtgggtagtaaatgttaataatactgtttggattctcattttacatatgagaaactgaggtttaatgaagttaaaaaaagaaaaaaaacttgtctaaagtcacactactagttagtggcaatgcaaggaaaaggaccaaggtttcaaatctacaactttctcctttaagctacagtgctcccgtaaagagtatttttaaaattggtaataggaagggaattgagatgtatatttgaaaatataaataatccatcctgtccctcagctcagagttctttttaccagacttttaccagactggttcacttttaccagacttgcttgggttatgtcattttagtcagtatatttggcagaactatcagggtgtgttgcagagtgctgtagaatgaaagtcatgagaaatgacttctaatggtagtttcccattcatttacttatatgaccttgacatttctcattccagtgatctctactagtttataaaattacttagttcaagtagttatatgctgacaatacatattctagagaaaatactcattgagattattataaactaagtttttgacttttcagaagttttcaatgcttatgtaaactgcttagaaataaatttatcattttatgaaacttggtgatagtttactattatctcaaattgcttataaattaatggaagtgtctcccatacattttaaaatgacttttctgttgacattttggggtatagcttcccacttatgtattaaaatgcaattaaagaaaaacccctaaactttctgttttagctgcttgttactcacattttgccttggtatatcaccatctaactccataaatattgtcccctattgtctcttgttatttttcacctgaaaattattttgctatgactctttccatcttctaccttagtatcctatt

SEQ ID NO: 5581 - protein, 11 aa, Homo sapien
MTLSIFYLSIL

SEQ ID NO: 5582 - DNA, 1310 bp, Homo sapien
atttctctaacattaaaagggcagagtgggaggaggggatgtggcagccgaccactttgaaggccagttttctcaggcaacttagaccatttttagtcaaattttatcttagattcacagtactggtggttttcgagtatattatgttaccttctgaaatagttcctgtcgttttgaggggcttttctttataaaatagtcaactttggctataaaatgttactttagtgtaattccaactggaccagtcttatctgtagcatgcaagaagttcaagtttctcttttatttttaaaagtggcccatgatacctgtaaatcttgggaaatgactgagtacaaaataacggagattaaattgagcttgaaatttatgggggaaatgcagctaactttgtgcttttattttgaagctaaacagttaacagaaacacaattttgtaaacagataatatctgtggtctgttgagttgctaggatttgtctttagatcaattggctttgagaagtcagcttaattccattttacggcccaattttgcctttttccccccctacaggctggccacttgaatacatgtcaaataatcgaaatatgaagaattcatttttattagaaaaggccttaagggtggaatttaagctcctattaacattcattcagtagaacttaggttactgatcagctcttcactgtgtaaagttgatactgattttggaagcagaatattgagtgacacagagccagaagttgtaaaactgcactgcaggtttcctgcccttttgctctgtaagcagtaactccaaatgtcacttcataacagttcttgtcaaccttaggcaggatgtatcaatgcatgtcagatgggggtagataactttggggcaggttatcacaacctaagagttggtggagaaaacatgggaatgaattctagagaccacaaaatgaaaacttgaaagtgttactctttctcagcttaacgtttttaaatccaaaaaacaatttttacatttcttgggattcgaagagttgaacttcaggttgccgtggttacagtgtacagtatatattatcagtctgtaccagtagaccagtaccctaactactgaaaagaatatggcagttttccatttgtctagtttctgtatgtacaatttactatccaattaattacttaagtggatttcttgttcttttttaaaaacttattgctacattgataggcagaatagcttctgaaagtgaccagttttcaatttcataggaagaggtgactcattgaaaaatagctcaagcaaagtcagcta

SEQ ID NO: 5583 - protein, 63 aa, Homo sapien
FSNIKRAEWEEGMWQPTTLKASFLRQLRPFLVKFYLRFTVLVVFEYIMLPSEIVPVVLRGFSL

SEQ ID NO: 5584 - DNA, 2408 bp, Homo sapien
  Unsure 473-507: Unknown base
  Unsure 768-1062: Unknown base
  Unsure 2175-2286: Unknown base
gttcttcctttccttgtctctcagcaaaatataatcatcttagaaattttcctctcttctattgtctattctatccacatatctagcttatttcctgttactgggatttgcctatgtttttctataccttacttctgtaaaattggtgagtttttctatttatccctctttctccttagttaatgaggtaccctaaagcactagcacttaggaattagtctacttgtcagcaagagcgatctattaacaaagggatatgtaagaaacaggagaactaaaacaatcttgtggaaagggattattttctaagcgtgtgtctactatattagtttacttccgaaaaacatcagttacttctcataaatccatcctgtgtttaagaacataaaatatagtgtggataacaaatgcaaagcatgcaaattttcaggtaatcaggcgagccattacttacggcacaggtgtgccgccannnnnnnnnnnnnnnnnnnnnnnnnnnnnnnnnnnctactcaataaatagagagcataggtgaaagaaggacctaatacagaaatttttaacttttcctgatactgtttcaactttcttttgaatgtctgatttaggctgccctagtcatccttggacgttatccttgggtgattcaattagtagcaaattgagttgattttcaacttctccattaatgtgcaggacctgaaatcaaagcaaaagtgtgctgttgagggaaatgttttgtcacctaggagataagtcaagctgtgnnnnnnnnnnnnnnnnnnnnnnnnnnnnnnnnnnnnnnnnnnnnnnnnnnnnnnnnnnnnnnnnnnnnnnnnnnnnnnnnnnnnnnnnnnnnnnnnnnnnnnnnnnnnnnnnnnnnnnnnnnnnnnnnnnnnnnnnnnnnnnnnnnnnnnnnnnnnnnnnnnnnnnnnnnnnnnnnnnnnnnnnnnnnnnnnnnnnnnnnnnnnnnnnnnnnnnnnnnnnnnnnnnnnnnnnnnnnnnnnnnnnnnnnnnnnnnnnnnnnnnnnnnnnnnnnnnnnnnnnnnnnnnnnnnnnnnnacagtagccctcattaatgggaataaagtatcatctgagagtcatcccaaagcttactccctcgttgagccgatgggctgactgagactctggaacccacgggtcactggggtgtgttagtgctcactgaggagacagagctgttgcaatactgagttcaagcagcacgactgactcacataatgtgaagtgaaaccagacagagctccgaacttggtaccttgggtagcaaaggcggcttccaatgatgattctataccggtgaacaaagaaaaatttgctttgagaagctgagaaaatcgagctagacggcagtgaagtaaaggcttctcttgcaaaatctgagtgccgatctgtgatgggaaaaataacttccagataaagcaaaagttgatgtggacaccagtacccagtaaattactgtgaaaaaaaggcaacttctcttggtccagtttacctttagataaatgttttaagggtaaaaatatgtgtatttcaagatatgtcttatgtaaacttttttaagttatgaaaatcatccatattgaaaaatagaatgttttctattttgaaactgttttgcattgtcagttacttaagcagcctattttacattttggtttttgagaacataatagggacctgtatactccttgtggggccgctattttaagactcctgacagctcatcctgcaaaattaaaatccaaaatctaagtcgcaaaattctcttttctccttcctcagttatttacttagagtgtagaacagacatcctcttagagttttttgtaactatcagttatcattaacatcatatttttattctaaatccttccatagaaacactgcttgtggaaaaaaaaaaggcttttacttggtttcaccattgtacagagggtaaatgaaataactttcgctgaatattgggtctataatactgttacatttcctctattattttaacatctttgtgaaaaattcaaatttttactggttcattcacatatcattttaaattggaggtttagttcacatacgatgaatgcacagctcgtaggtatacagtttaacgacttatgacagtggtataaccacaagaccagcaacatnnnnnnnnnnnnnnnnnnnnnnnnnnnnnnnnnnnnnnnnnnnnnnnnnnnnnnnnnnnnnnnnnnnnnnnnnnnnnnnnnnnnnnnnnnnnnnnnnnnnnnnnnnnnnnnnaccaactattatttaacgtcatgtaaatgcaaatatgtagtatacaatcttctgtggctggattttttttcactcaacatttttttgggagattccttcatttggttgcatgtatcagtggt

SEQ ID NO: 5585 - protein, 111 aa, Homo sapien
  unsure 12: unknown amino acid
  unsure 13: unknown amino acid
  unsure 14: unknown amino acid
  unsure 15: unknown amino acid
  unsure 16: unknown amino acid
  unsure 17: unknown amino acid
  unsure 18: unknown amino acid
  unsure 19: unknown amino acid
  unsure 20: unknown amino acid
  unsure 21: unknown amino acid
  unsure 22: unknown amino acid
  unsure 23: unknown amino acid
  unsure 24: unknown amino acid
  unsure 25: unknown amino acid
  unsure 26: unknown amino acid
  unsure 27: unknown amino acid
  unsure 28: unknown amino acid
  unsure 29: unknown amino acid
  unsure 30: unknown amino acid
  unsure 31: unknown amino acid
  unsure 32: unknown amino acid
  unsure 33: unknown amino acid
  unsure 34: unknown amino acid
  unsure 35: unknown amino acid
  unsure 36: unknown amino acid
  unsure 37: unknown amino acid
  unsure 38: unknown amino acid
  unsure 39: unknown amino acid
  unsure 40: unknown amino acid
  unsure 41: unknown amino acid
  unsure 42: unknown amino acid
  unsure 43: unknown amino acid
  unsure 44: unknown amino acid
  unsure 45: unknown amino acid
  unsure 46: unknown amino acid
  unsure 47: unknown amino acid
  unsure 48: unknown amino acid
  unsure 49: unknown amino acid
  unsure 50: unknown amino acid
  unsure 51: unknown amino acid
  unsure 52: unknown amino acid
  unsure 53: unknown amino acid
  unsure 54: unknown amino acid
  unsure 55: unknown amino acid
  unsure 56: unknown amino acid
  unsure 57: unknown amino acid
  unsure 58: unknown amino acid
  unsure 59: unknown amino acid
  unsure 60: unknown amino acid
  unsure 61: unknown amino acid
  unsure 62: unknown amino acid
  unsure 63: unknown amino acid
  unsure 64: unknown amino acid
  unsure 65: unknown amino acid
  unsure 66: unknown amino acid
  unsure 67: unknown amino acid
  unsure 68: unknown amino acid
  unsure 69: unknown amino acid
  unsure 70: unknown amino acid
  unsure 71: unknown amino acid
  unsure 72: unknown amino acid
  unsure 73: unknown amino acid
  unsure 74: unknown amino acid
  unsure 75: unknown amino acid
  unsure 76: unknown amino acid
  unsure 77: unknown amino acid
  unsure 78: unknown amino acid
  unsure 79: unknown amino acid
  unsure 80: unknown amino acid
  unsure 81: unknown amino acid
  unsure 82: unknown amino acid
  unsure 83: unknown amino acid
  unsure 84: unknown amino acid
  unsure 85: unknown amino acid
  unsure 86: unknown amino acid
  unsure 87: unknown amino acid
  unsure 88: unknown amino acid
  unsure 89: unknown amino acid
  unsure 90: unknown amino acid
  unsure 91: unknown amino acid
  unsure 92: unknown amino acid
  unsure 93: unknown amino acid
  unsure 94: unknown amino acid
  unsure 95: unknown amino acid
  unsure 96: unknown amino acid
  unsure 97: unknown amino acid
  unsure 98: unknown amino acid
  unsure 99: unknown amino acid
  unsure 100: unknown amino acid
  unsure 101: unknown amino acid
  unsure 102: unknown amino acid
  unsure 103: unknown amino acid
  unsure 104: unknown amino acid
  unsure 105: unknown amino acid
  unsure 106: unknown amino acid
  unsure 107: unknown amino acid
  unsure 108: unknown amino acid
  unsure 109: unknown amino acid
  unsure 110: unknown amino acid
MFCHLGDKSSCXXXXXXXXXXXXXXXXXXXXXXXXXXXXXXXXXXXXXXXXXXXXXXXXXXXXXXXXXXXXXXXXXXXXXXXXXXXXXXXXXXXXXXXXXXXXXXXXXXXQ

SEQ ID NO: 5586 - DNA, 473 bp, Homo sapien
gggcaaagagaatttgtctttgggggagttccttgacttgtctccttgcttcctccggttcttccttcccctacgatccccgcctcttcgcatctccgttggcgtctagtaactttctgaatggagagaagaccatagggaaacttaagggttttgctttttgggggccctctcagacctggcggagttgatcgaaaagggtcgtttaaagtcagacctcattcttgagcttaacgtcttatgtggacagtgttgttttggattgtgtgttgctcctgttgtgacatttcttttggagagacatttaagatactgaggaaagtagggaagagcactgtcaggatgtccagggcgatattagtatcaggcttgtgttaattttttgagttactcagattaagagattacctaaatcagtttcaggagttctgtttgtaaactagcttcaaactatagtgtcactgaaattagga

SEQ ID NO: 5587 - protein, 62 aa, Homo sapien
AKRICLWGSSLTCLLASSGSSFPYDPRLFASPLASSNFLNGEKTIGKLKGFAFWGPSQTWRS

SEQ ID NO: 5588 - DNA, 1103 bp, Homo sapien
  Unsure 499-520: Unknown base
  Unsure 786-804: Unknown base
attcggcacctgggtgggttctaaccttgaaataggagcatggggcttgcttccccttcgtcattcctccaagaaagagaaaggaaaggaagagaaaagaaaaagcatcctgtattatgtgtaagtttgtaagaatccttactatgagttctgagtacaacatctttttaactcttttctctccctctcctgcttccttcttcaatctccagctaccattcatttcctgatttcatttataggtcttaccaggcaagaaggctaagcagaaggaacctacatcagggaagtgctgggctacgggccccacctggacttggggttctgggcagcctgaacacaggtttcttagtttcctgaagtaattgagcttgttgccttaacttcagttaaaacactgatcgtgctttacttttaactgagcattgagacctcttataatattccataaggctggatattgttttgaggaagacgatttttcctcttaaccttgccnnnnnnnnnnnnnnnnnnnnnngtcggtgtttagacagttttccatgcatggaccctgattacagcgggagcaggcaacgtgaggtgcccgcaatcagacatccagctccacatggtggcctccctgcccccagctcatccttacgcagtgccttcaaattgagtgtcttcaaaggtgctgcttagtctcactttggttgttgtgtcgctgtcgtatttttcttttttcgcagtattgaaatgttcactcctagggaccgaacactggttttagtgtccatagtggcnnnnnnnnnnnnnnnnnnncaaaacttgtttctatttggtcctctgtaacccaagttgttgcttagctttcctgcctagtaagagccagaaacgagattaggacgtgaatggtattttctgaaccctcagagtgtgtacagtaccattttgctaaagaaaagcatctatattcaaggtagatctaaataattcctagaaatgccaaattgttctcccattcatttttcaagacaaatatgttctaatccataggagagtgagaatttccaagttcattaattcgggttcctgctaccaactcatgttttacagcccac

SEQ ID NO: 5589 - protein, 40 aa, Homo sapien [sequence omitted]

SEQ ID NO: 5590 - DNA, 5010 bp, Homo sapien; identical to SEQ ID NO: 1862

SEQ ID NO: 5591 - protein, 760 aa, Homo sapien; identical to SEQ ID NO: 1863

SEQ ID NO: 5592 - DNA, 808 bp, Homo sapien
gatccagtgtgcccggcaatactgttgacttttaaagatgagtaaaattcagatcagcaaagatgggggtattttacctggcaggagtatgtaaagtgagggtataggtttgtcatgtaagggagtagttgatgatactgctacaaaaataaactggggttaattatgaagttcttgagtgctggagtttaattaaagtcataattgccaccatttttaaagcttttagtatattcctagcaccgtaaaggactctgaagtacattagttgctatccttctcatctctgtgaaaggtatcgttgcaatttatagattgtcaactgatatgtggaggttacctgagcctcagtgagatagatggtattcaaatacaagtaaattttgttcctaagtctgccatttttatgttaatctagcctatatcaagttggcaaattcacatgctaagaggggtgggcagatagtacaattaagtgaaactgtctgagtactgaaccggaggtgacaaagagagtgtagctgtaaagaaactacagatttgtgccctgctgtaggcaacagtaaggtgctagggaagatacttgagggaagcagcctgactaccttggttgtaactggtagggagtatttaggaaggattgaagccggatagagatttaaagacagagagaagaggttgcagtttcctaagtaagggttatgtcattggaaaatgaggggttggattagaaaggaaaaaaatgggtaggacttggacagaaataactgaagcctggtccattgtcactttggaaagtttgtaaaaa

SEQ ID NO: 5593 - protein, 14 aa, Homo sapien
DPVCPAILLTFKDE

SEQ ID NO: 5594 - DNA, 464 bp, Homo sapien
tttacctaacccaatggtttgctggcatttaggttagtgtctttataaagagctagctctcattgggagagttgagccagagcaaccatagtaaacatagcttactgataatagcaattacgtagggataagataacattctctcacttacctaaattttaatgtgtcctgttacataggttaatttgtgcttggaaatgaattttagttaagtgagaaatacctgttgtttgctttctgacattatagtaatatgtacagagaataatttaaaattataatttatgggtctttaaaaggttttgttcctaacaacatttataaaaatttattgtactattgtaaagttttttatatatgggtttttttccagcctcaaattcttttgtgacttggaagagtattatggacagaagcttgggtactgcttaaaatttatgtttttagaagtagaacttttattt

SEQ ID NO: 5595 - protein, 8 aa, Homo sapien
MFLEVELL

SEQ ID NO: 5596 - DNA, 808 bp, Homo sapien
tagtgatacattggatgattttaatagttttattagtgagatatttgaggtattcgaattactaacaattctttccaatcctacaagttaaaaattttgttatggttgctgacttttaaatgctgtttattctctgaaggcagttttatgatgcatttagaaaaaaggtaagagagatgtaggcattatactggttcatcttttacctaatgcatgaccagtatactagaggaagttgtgatggaccagagtctttttgttttgtaatcaaatgaatagttccttcataaccaggacagctagtgtgtgcttgagaatgtctccctcaactatatgatctgggatattctgcattaaaaggactcccttcccagtattgggagaaagagagataaattgacacatttttactctgactccttcatttatcttcccacatacaagatcattttgtcttttaaaatgtacaaggttacaataagttaaatgttattagtggccttctacatttgatcagtaatgtagatggctacttttatttacttgatgttgcattttgtttttttaactataagtttcaatacactaatctgactggcacaagttgcatatagttcccagtggtccacagggttcatcattccaaaaatatttattcataacattgaatggctcagattacataaaattctatctgttgtgaacaggtcacctgattgtaactattatctacacagttggccttcttcatctctgggttccacatccatggattcagcccactgtgaattgaaaatataaggagaga

SEQ ID NO: 5597 - protein, 29 aa, Homo sapien
SDTLDDFNSFISEIFEVFELLTILSNPTS

SEQ ID NO: 5598 - DNA, 2128 bp, Homo sapien
tttgtgtgtttgtcttcccacattggtatattaaatatttttaaacagaatcatgtactttttatgtctatgcctctagggactaacaacatgcttactgaaatgagaatagacaggaaacacaagaccagagcagagatatgacttgtcatcagtttatttgaaagtctactggtatgagagtaagggagagagccaggcccaacctcagttggccttactcaattctttcattttctggggacagtactagattaattataagcagcatccccttcccccatgcccacttttcaagcttcaacttttcttgagttcctaagcaggagacctggacctccagtgaaaaccatactcactgctcctaagcagaaatcccttccttctcacctgttccaccagcccaggctataccctgggcctgtcagcaacactgcctcctctagcgcaggtctcactctgaatctcattggcaggtcacttggtacatatgaccgtggtctccggcaacgtgactctgaacatctctgagagcctgcctgagaactacaaacaactaacctggttttatactttcgaccagaagattgtagaatgggattccagaaaatctaagtactttgaatccaaatttaaaggcagggtcagacttgatcctcagagtggcgcactgtacatctctaaggtccagaaagaggacaacagcacctacatcatgagggtgttgaaaaagactgggaatgagcaagaatggaagatcaagctgcaagtgcttggtgagtcaggggagccaaagagcaaatccccactccagtggccccagatggaccactgtagggcttcctgggaggcatggggcactctcggggaggaggagagaaaaacctcaggacaggtttgattcatttttccttgatccaattctatttgggagtgagcctaggtcaacagatatccaaattaacaatcttaggacatttaacacctcttctgaagttagtgagtctaagctttgaagagaaggaaaactagagatttttcctatttccttcattttgtcctgtgatcaacctaaatcagctcagctcatcttgattatatctccgaaattaggcttcattggacttaagaaaaaagagaatgtattaatataaagaatggggcaggagttatcaggagaatttttcaactttcataatgggcaggacaaaaaaacttccactcatagctccagtctaaccagtgtatatggaataaggactcaggcattatacctggagccagacagacttgggttcaaaactggtcagttgctcactagctgtgcagccttgaaaaaagatcttcacatctctgtgcccatattaggtaagattcttttgatagcaaataacagaaactaattcaatgtacctttaccaaaaaaggagaatttagtttaagaaactagggctatttaaagcaattcaaagagtttaaaagagctaggaagggcttaaggggagaagattgaaaaccaggttcgggccagaacccctagcttcaggaatctgtggactgtgcctatggatttggattcctgccattttacacatgttatctctcaaaacttagacttttgctcctctgagtttcaattctcagggcaatttaaagagagagaaactgatagtcccaatttagttcaggtgtgtgtacctgatctaaacatttttggtgaaaggatcagattatagggcagaaacatggatatggggaggggctccaggggttggggtatgcaattcttgtagaagagcggggctaaataatccaagagtggtgttcccttgagagccttgggttcttcatcatattatgagaataattctacttacctttcaggctgttattagagtcaaagtagataaggaaagtgaaaacattttttaaaatgtcaaaacatgcaaatgaagagtgttgtatacattcaagttccaccagccagacagtccctgatccaagcagtcagattccccttctaactcttcttccatgtcatatgggctgaaaattcagaaagtcctgggaacaaaaagattcaaggtctcttacagtggtgttctggttaacaagctctacaagattt

SEQ ID NO: 5599 - protein, 136 aa, Homo sapien
MTVVSGNVTLNISESLPENYKQLTWFYTFDQKIVEWDSRKSKYFESKFKGRVRLDPQSGALYISKVQKEDNSTYIMRVLKKTGNEQEWKIKLQVLGESGEPKSKSPLQWPQMDHCRASWEAWGTLGEEERKTSGQV

SEQ ID NO: 5600 - DNA, 703 bp, Homo sapien
  Unsure 99-116: Unknown base
agagaataagtggttgaaagtcaacatgcctagacaacccagcaaactagaagacaccataagaatgcgtaattattattctttatatgtttataacannnnnnnnnnnnnnnnnntaacagctcaagacgcaggtagtatagtaatttttgccccatactgctgaatgttttgcctggcaaatactgggaatggggcaattcctgtggcagttttgttttccaataattgttttttcttatatcggggatgacaaatgcttgtcacaaagagtagccttgttgattacacttataaatcttcgggagacttcttcaatgagtcagtgttagagctttcagtttccataaatgcagatttcctttactcagttttcttttaaacatgagctgatctttcttagtttgcactataataccctccactgaagtctcactgcaactgcttttaagtatatgtgaagagaaactagccctttgctaaaatagttgcatgtttcacgggccagtgagtcatttagtcatacacttaagaactttccacctttcaagtgtttatcatcacctcggatttcacggcctaatgccagtcaatttcatggggcatagaagccctgtacgtattagtttgggccattattgtatcagtcttgtttattcccagaaaagtcttatcaagaaaagagggagtgactataatcaga

SEQ ID NO: 5601 - protein, 69 aa, Homo sapien
MFHGPVSHLVIHLRTFHLSSVYHHLGFHGLMPVNFMGHRSPVRISLGHYCISLVYSQKSLIKKRGSDYN

SEQ ID NO: 5602 - DNA, 1217 bp, Homo sapien
aatagtcataggtcgaggcccgggtgtaaatcgggcgagggccggcctgttgcctgtggcgactgcgcgcggggttagacgcaggcgccgcaagccgtgagctctcagtgcaggcgcataggctgcggggttgaggcgcattgcgtgcgcgtgcgcgctgctcacacgcggacggttctgtgcgccgcaatggctgcccgcgagtatcggagaggcggagctctcagtcttttacaggaccgggtctcctgatgccgccggtggttcctcgaggcccccttccacgcatccgccgccgctgcttcatcaggacttcatttcggtgacgcagagctttggcgagagctacggcaacagcaagaactgccggcggctcttgtgctgcagggtgaggaccgcgccgggcggaccgaggcccggggtcgctgcgcccgccgccctcccagcctgcggctccgagcggggcctgggcgggcagactcgactccccccgacgccgccctctccacccttaccccgcaaaaaggggcaaatctgctttccgggccggggcagccgtggtcggcacgcctgcagcggtctcagcggcccaaattctgcggggcggtggtggtgggaggaagggttggagccccagcaggttgtctgggcttcgtttgattttcggcaaggtcctggcccaggccccagtccctcttggagcggaagcctctggacctgttgctcctaagaaagcaagcggcccctgacgcgttgctgtggcctggtttgaccctcgtagccagcccatgttctgtgaggcatgaagcgccacgcagacaccacgacaaagtgagatgaactaagacctcttcttgattctaagcagggaacgcacagctcaccctgtcacatgcagcgatcataagctgagaattaccctcttccttcccacagcgtctaatcttttttatgtttttgtgggcaaggtctcgcttagtcgcccaggctgagcgcagtggcgatcatggcccactgcggctcgacctcctgggctccagcgtgcgtctaatctagaaccaaatcctccttccttagatcatcccccaaatcacccaactacaggtgaaatcctgtaatagtttcctccgaacaccctgttgctgagacacctcaacgtctcaacctggtgtgtttgtacgtagagtaaaagacccaacttgtttaactacaggcgt

SEQ ID NO: 5603 - protein, 32 aa, Homo sapien
IVIGRGPGVNRARAGLLPVATARGVRRRRRKP

SEQ ID NO: 5604 - DNA, 4988 bp, Homo sapien
tacccagcacctaataccttttaacataagtattgcattaagattttctcttctctttgtagcttaggatttcctggaagctggctgtctatcagtgtgtgttaagtgtgatgcttccataatacatttggatgctgtcagctaagttcacttctgaactaaggggttcctccaaatgttggctgaaattcatcccaaggctggtctgcaaagtctgcaattcataatggagctactgtactggctattggaaggaggagattctgaagataaggaggtaatattatctcttttaaaagaatactttcctctgtaatcctgaatctttattacatgtaagaactttgtgcagtagacagcaatttctttgaatttggtatatggaaacaattttattttcctctgctaagtttttgagcctgcctcttctagtgccatggactgcattggtagagctgagaaatatcatttagccatactcagcacccttaaaatagcttctttctgagaattagatctgtgaaggtgtcctgcacagttcttgtagatgtcattttagtttgtggttgacgtgcatgcatttagcatgttgcttaaccgtcctcattcgcctcccagttctttgttgccttcatttggggggatgtgttttctgctggatgatttactgctagacatgaccaaactctgagtataagacttggtgtttggcagctggttccagtgctctgctgagaagtagttgggcccagcctggggcattgtagtgtcctggaggccgggagctcctgcacaggggttcttttcctggttcagagccttaggtgcctttccacttttcacgtaatcttttcctaggttggcttgctgcttactttgcagctgttgcagggattcacatggaatggagggctcccttttattgtggattatttctttgataatttacccatgtgctttttcattttcaaaaacccagtggtgtttaagaatgaaagattcttgaagaacaaaaattgggttaaatttgtatctatcagaaaagattctatcctctgatgctatgtaggcacattgaatatgcaggctaaattaaaaacagagtaaaacctttttataatatgccaattactatatctaagaatgtttatacaggctgaaattttgtaatggtatttatatctgttttcctttttaaggaaaataatatacttttctaggcatcaaaaatatctgcccctttcactaatgctgatgtaccacttcccccaaccccaacgctaaatttgactggcttaaaaacatctgccccctgaactatatctggggaggaatattaataaaacaatgaaggacttcatggtgtctagttatataattaggaaattggttagaaacgtggctaaaaccagtttctttcattaaaagaactagtgtacatttaaaaacaaaaacttcaggaaaaagactctttgatctttaagtcaaatagtatttttggttaacacagcaggaaggggaaatataccaatttcagattcttttatttatgcctaagtagaggttgtaagcagctaaggaagtgattaaaatgtagtctagtaaaaaatggtgctgattacttggaaagcagtttacatttgcaaaaaaattcagtattatgaccttcaccaacttttacacatcatatacttgggttattacttatggtatagcttgtgtatggaatgcaagggtattttcaaattgactaggtcttgctggtcatcttaaaatatgttacaatattacaaaattgaaatgtaatattttttaatagaaggaaaatataaatttaatatctgggcaattgagacctttaaacttactttaaaagtatgatcttgatgtatatgatactgttttgtctttgctatattaacagaattagaggggtgttctgcaattcaaataccttatatattccaaattttattctctataatggacttttaaaataaaaggtatatgtgcttcaagagggcaaaatttgaatcatgagctaatttgctaagcatcagattatagaaaagcatccttgattaatttggaactgtgaaagggggcgggtaaaactgttttctgcagaaatttactagtgcagcaaccatttaaattaaatgtttgttaacataatagtgatggcattttctcctccccctccttgtggtttgtccaactagatgttacagtggcagttgcactgactgttaagtgtttaaatgatgacaccattatgtgaagtgattttgaaatgagagattccagccaagaattacatctgctcccatctccttcaaatcatactctctggcagtacagattatgattgatttgtttgtgacagattgcaggaaacagtcattgatttttcaatattttaccttaaaattatttacagttgtaaccatggggaggtattttcatgggctgtcagcccctgaaagactaggataatattccctgctctctgacaagacaaattacctgtaatgagtgcagtagctgaagggtatacttttattttaaaatatgtcaataaccccagtgactaaacgaatattgatttagcataatgaagcctgagtaacgtgaaaatgagctttttcaaggggcatggtaaagtctttctttttagctggttgtaagaagcttttgattcttttcagccagctggtaggaatatagaattttataagcaaaccatcaggaatgatagtgttgtttctgataagcaacatccaaatattttgaccctgcttttagtggtttttttcaaatcttattttgagtcttacttttagtcatagaatagctactgatttgatgcggtctttaactgacttaatatttttacaatttcaatatattttgcattggaatctccagtaatgaatattaaaatatatgtacaatcatttgtagatgatatcaattatattaagacatttcagatgggctattgtagtatttaatgtgccgtattttatggtagaataattctcagtctctggacatcaagattgctttcagtgggaatgaagattaatttacttcagtcctgattttttaggcatcaatgcatgttttcatttttgtcagacttttaccctcttttaatgtaattctcaacttcttatggatttacttcccaatacataaaatccttcaaaacaagaatgataataatttttatactttttataaaaataaatttatttttagtccatcaaggtgtctgaagattttatgcctaggtatctccatatctaacttgataaggaaaataggataaacaatgctggtaatagcaggaaagtaagtatttgaataagatgtcaaactgatatttcatgtgaacctaactcattttatggtaactaataattatcttatttaaatcaataggtaaaacctgtttagaaattaaaaatgagttacgatttaaagaaaattcagatgactcattgtgagtgctagttctcttgtaggatgccactggaaatgttgaaatgaaaaatgtaagtatatcttttggtggaaaaaaggatagtctctaggacacaaaattactgttttatttttttctcaggagtttgcctaagggtgtgacagatgatctctgtcacttgtcttagttgtgtcctgcaataaactggatgctttataaaatactagacctgtgatttcgtatgctgtaatatttcatttctccatcacccctccaaattatttcttagtttggagtaaaataataaatgtattatagtcaacatctcttgacccctctttagtttcagctaaactaagcatgtgtgtttgtgtgttcattttatagttcatgtgtagaactatgtgaattaaatttaagaaacatgtaaagtagaggaaatagttttctggagaaatttttcctttttggatattatgcccttttccattgcttttctctgcttgaaagcaaaaaaaagtaccctacccctgttctcctttagggaaaaactattcctataaagtatttttaaatcgtgcaagtcattgcctagggttagctaaaacatttctttttaaaaaggagaaaatgccctggctttaacattttcttgtatttgtatctattaagataaacagtttactttgatacagtacataccaatctacttaattttttttccaggattccttttactatgtttggtctgaccttttatgataacttaatatgggaacaaattagcatataattctattttccatgtgacctcaaccagttgcagaattgtaccactactttagggggggcaatttgacagtttatgtagactatagcattaattgttcccaaatgttcagtgcatcctggctaatgtgttattgaaggtgttttcacgtaagcagttagaggaagcacttcacccctattactaagttattaaaatgcctcctaaaggtagcattttaaattagtatacataattgattagtaatttgtcttctcccaagcataaaacagcatagcagagttaagtgtgaccagtgaagtataagatattagggattgatggtgacaatgatcatagcaactaaatggattttttttttcttttagattcagccgttggtctttgaaatttcctgtgatgtgtttcaatctagatgcaaagaacatggaaaaatcaaagtgctcgagtggtttaaatatgttttgggtattcctgtttatagactataatacttttccaattaaaatcctcagttgtcacgcagaagaaggttaagctgtatttgattgccagttttactgaaaatgcttagtattttacagtatcaccaaatatattttgtttagccaaggtataggaaaaataaaataaattgtataggttgacttttttctaaaatgtctttattggattgaatgaatgtttatacctgaaaaaaaaaggttc

SEQ ID NO: 5605 - protein, 21 aa, Homo sapien
TQHLIPFNISIALRFSLLFVA

SEQ ID NO: 5606 - DNA, 2636 bp, Homo sapien
gaaacattaaatgcaaatataaattctaccaactttgctccggatgaaaatcagttagagtttatactgatggtgttaatcccattgattttattggtcctcttacttttatccgtggtattccttgcaacatactataaaagaaaaagaactaaacaagaaccttctagccaaggatctcagagtgctttacagacatatgaactgggaagtgaaaacgtgaaagtccctatttttgaggaagatacaccctctgttatggaaattgaaatggaagagcttgataaatggatgaacagcatgaatagaaatgccgactttgaatgtttacctaccttgaaggaagagaaggaatcaaatcacaacccaagtgacagtgaatcctaaacctgaatggcgctcatgttttccaagagaagcagcccctgagggagtctgctgaggctgccaacagaggatgaagaggatacaaatttaattaatttcaaatcaacatagacacaagaaccttttgctgtttcttccaacgcccactcttcctaatgatggcatcacttgcacttggaagaatgtgcaattgagaagtactaggaaaaggcctggctgccatccatcgctgcctctgagggtggagaaggaggcgggtgatgtgctcacttctgatcaacatgtgttgcctcctctcagccaacttctagctcactgcactcactctggtcatgataaatgttcgtcacctttctgcttcattccttagggcctaaatcaggaagctgttttatcgatggtttccttttgggtcagtaaccagctttggataatttcctctgattattcaagtcgtgggacaggtaaactacattcagcaggaacttttctcgaggagtgttatgtcatggaaaagacaccaaacacagcaagtattttaatgaatacaccatcccagggggtcagtaagctctgcctgccaagaagacacagtgagaggggtccacagtcctgatgaggtggcgtttggtaacttgtagaccctagcatggccaggtctggtcacccttaagaacttctcagagaaactaggaatcttcagtgaaagaactaatgttctcctcagctgaaattcccttgcttgtcagcatttctgcaaagctcacacttgtttcaccatacctcccttggatgtgacatgtaggtaggaagtatgtgcaggtgggagtcatctgtcagccttctatgtttcagagatcctgaaggtggtttgaaacaaacagaagaggagcaggaaatatccgtgcctgtggcagatctcactcatcatgcttagcattctctcccgccaagctgggataagcctcatgtcctaacacagcacaacaggaggtctctgtcagtccatcagagatgacattctatgtgatatttttgacatccttgtgctaaaagcaatggcacaaaatggaaaagggcctattgaccacacctactccagtaaaattgttcttcatttattccttaattttctaaatctgacccctttaaagcaatctagcaaattgagaatcctcagctctccttggatacctgatattttatttcaagaaagagacaaagaaggaaaattttatttattttactacccacatataaaccgaagggagatgggactacccaaacatttgctgctcaattttgtgtcttgtgcttgaaagtctgccctaatgcataacaaaaactacttgtctcctaccttttgggatccctttaacaagtatttgccttctgaactacgtggataatttcaaaggcagagttccagaccagagaggtctttccatacaatgaaagctataactagctggttgtgtttaaccactgctatcacgctatcctgggactgcatagaactttgacaaaagacagacttcatggtacacaacttcaacagattttctgtcatattctcaccagcacatctgaatgaggctttgtgttttccttgctctcttgcatgttccttttcaactcatggcccacagtgactctcagagatttatgccaaaattgcatacaattgttttctgaatcataacttgtctatttttctgcctatgtgtgctactttcagtttgtttctcatcaacattttgactctcagaagagcctccatttgcccctttctctctttaggtatctaagatctttgaacacctggacctttacatttgatccaaccctatcaaataatgaacttctcagagaggcatctggggtcctggaacttcatgttgatgaagtcatattatataatatgataaaaatattctcatgcagtattttaaataatttcaaattctagaagaagcaaatttcagcgacatgtcattgagtttttatttggtaaagctataattgtgcagtgtacaaagcactttttaaaaagatagtttattctgtcagggtatatgaagttagtatacagccagaacagccaagcctcaattcttgtaccttgtgtctttttattactgtttaatcaatagatatcatatgtttatgacagtttcaagaattgtttttaaacccaaacttaattttatgtttcagactattgttagaaaaacaaaaaaaaaaaaaaa

SEQ ID NO: 5607 - DNA, 794 bp, Homo sapien
gccagggaggccaggacagagggtggagcagcccttgaggggcagaggggatgaagtagttgaaacctgatcagctcatagttgtttttccatgtgggttagtgtccgaatggttccccaaatcccacttcatcactcataattcaggctagagctccggaggctgctgggctgtggtttggggtgaggagagtgtgttgtgcaacagcggccctgagatttggcatttgcatcttgtaattagtgctgtgggagggggatcgggactccaataggagggggtgggccctctcgtgtctttccatggaattctccccaccaccctatgaaacagggtttagcatctctgttttataggtaaagagacttgcctgtggttacagagcattaatgtcacagctagaattccaacagctcaagcttttaaaattaccccatgccacttccagggcactgcattgaaagtcagctttggtttaggctctgccaccaagttatgtgaccttggacaaatcccctcactcacaagcccactttccctaaactgcaaaatgaggtcaggggtggtggacccttagtcctcagcagagtcctgcagttcctgtgtccctggagcccgttggtctccctctgtaagtctgaccttgggcagcacggtgtctttgcccagagcggttctcattcccttctaaggcagtgtctgtcactcatgccttttgggagctggggctcctatgtggactctgatttaagggctataaggcctgtctcttcctacccaatagaggtttcct

SEQ ID NO: 5608 - protein, 27 aa, Homo sapien
MPFGSWGSYVDSDLRAIRPVSSYPIEV

SEQ ID NO: 5609 - DNA, 882 bp, Homo sapien
gctattttgcacttcagttcacatactatttatgggtaagtgacatttaatgttttgctgccattattactcgtgacctttctcctgaaacactttaggctgtacgcagatttgtcttttacaaattatgtagttgcgtacagagatctgtattactgttcataatcaatttaataatggataacattttaaaatatgttaggcatctctcaagttatgtgtaaatatcctttttaaataagtcagaactccaaaagaagagctatcataaaacaatctgttgatatttttgtttctttgttttggggagataggtaagaaatagttacccaggaaagttgaagcatggtttgatggctaagaattttaaattgtttctgaaactagcattatttattttgctgctgccaggctatttaaacttaatgattttttcccctgtgtatgaaatatgatgctacttgggttcactttagagcttgcatttatttatgtatttattattttagctttagcttgtaattttccagtgatagaaattaccaaaatttgtgtgtgtcaatatgtttttgtatattttattaagtatatttttaggtagctaggtgaatggcagcataaattttctctttaataattattttatattgttcaaaactacttggctaatgagtatttttgctctagcatggaattctggaggagaaggttgcaatgtgatcagtatagacagtgtcttaatcttgagtttaaaagagaagaaagaaaaatacccattcaagtgaagatgataccaagcagtaggatgttgccagtgctgctgtacttatcaaaaagtgtttttaaaaactctttgtttattgtgtgcagctgaggagaaaa

SEQ ID NO: 5610 - protein, 15 aa, Homo sapien
YFALQFTYYLWVSDI

SEQ ID NO: 5611 - DNA, 464 bp, Homo sapien
aattaggtaactcaatccagtgtggtgctacaccaatcatattgtatgaaatgctgttaaaaacacgcacaaagttggcttcctttgtcttcttaaaatttgaacagactaccaagcatatttgaatactatttgattaaaatagaagcaattatgaaagcctctcttcatattatcaggagtgtaacattgggtctttgtctttttttatttatctattttccttcatagtacctttaaaatatgagctataatttgaattacttaacagattttcttatgctgatatgtagaagcctaccttttagtatcaaataattgaaaaaaagttcatcttaatttagttgtcaatatctctttgatcacagtagataaattctgaattgtgaagggaaatgaatacccttcatagatagagccaatttgtgtgccagttggtgctcataattggcctgatgttattt

SEQ ID NO: 5612 - protein, 40 aa, Homo sapien
LGNSIQCGATPIILYEMLLKTRTKLASFVFLKFEQTTKHI

SEQ ID NO: 5613 - DNA, 1893 bp, Homo sapien
ggaaactgaaaacacacctgcagcatctccggtggaaaggagcgaagaacacggactgggagcacaaagagaagtgctgtgcgcgctgccagcaggtgctggggttcctgctgcaccggggcgccgtgtgccggggctgcagccaccgcgtgtgtgcccagtgccgagtgttcctgagggggacccatgcctggaagtgcacggtgtgcttcgaggacaggaatgtcaaaataaaaactggagaatggttctatgaggaacgagccaagaaatttccaactggagaaggtcagtgcaccagatattctgaaacctctcaatcaagaggatcccaaatgctctactaaccctattttgaagcaacagaatctcccatccagtccggcacccagtaccatattctctggaggttttagacacggaagtttaattagcattgacagcacctgtacagagatgggcaattttgacaatgctaatgtcactggagaaatagaatttgccattcattattgcttcaaaacccattctttagaaatatgcatcaaggcctgtaagaaccttgcctatggagaagaaaagaagaaaaagtgcaatccgtatgtgaagacctacctgttgcccgacagatcctcccagggaaagcgcaagactggagtccaaaggaacaccgtggacccgacctttcaggagaccttgaagtatcaggtggcccctgcccagctggtgacccggcagctgcaggtctcggtgtggcatctgggcacgctggcccggagagtgtttcttggagaagtgatcattcctctggccacgtgggactttgaagacagcacaacacagtccttccgctggcatccgctccgggccaaggcggagaaatacgaagacagcgttcctcagagtaatggagagctcacagtccgggctaagctggttctcccttcacggcccagaaaactccaagaggctcaagaagggacagatcagccatcacttcatggtcaactttgtttggtagtgctaggagccaagaatttacctgtgcggccagatggcaccttgaactcatttgttaagggctgtctcactctgccagaccaacaaaaactgagactgaagtcgccagtcctgaggaagcaggcttgcccccagtggaaacactcatttgtcttcagtggcgtaaccccagctcagctgaggcagtcgagcttggagttaactgtctgggatcaggccctctttggaatgaacgaccgcttgcttggaggaaccagacttggttcaaagggagacacagctgttggcggggatgcatgctcacaatcgaagctccagtggcagaaagtcctttccagccccaatctatggacagacatgactcttgtcctgcactgacatgaaggcctcaaggttccaggttgcagcaggcgtgaggcactgtgcgtctgcagaggggctacgaaccaggtgcagggtcccagctggagacccctttgaccttgagcagtctccatctgcggccctgtcccatggcttaaccgcctattggtatctgtgtatatttacgttaaacacaattatgttacctaagcctctggtgggttatctcctctttgagatgtagaaaatggccagattttaataaacgttgttacccatgtcaaaaaggagataacccaccagaggcttaggtaacataattgtgtttaacgtaaatatacacagataccaataggcggttaagccatgggacagggccgcagatggagactgctcaaggtcaaaggggtctccagctgggaccctgcacctggttcgtagcccctctgcagacgcacagtgcctcacgcctgctgcaacctggaaccttgaggccttcatgtcaatgca

SEQ ID NO: 5614 - protein, 381 aa, Homo sapien
MRNEPRNFQLEKVSAPDILKPLNQEDPKCSTNPILKQQNLPSSPAPSTIFSGGFRHGSLISIDSTCTEMGNFDNANVTGEIEFAIHYCFKTHSLEICIKACKNLAYGEEKKKKCNPYVKTYLLPDRSSQGKRKTGVQRNTVDPTFQETLKYQVAPAQLVTRQLQVSVWHLGTLARRVFLGEVIIPLATWDFEDSTTQSFRWHPLRAKAEKYEDSVPQSNGELTVRAKLVLPSRPRKLQEAQEGTDQPSLHGQLCLVVLGAKNLPVRPDGTLNSFVKGCLTLPDQQKLRLKSPVLRKQACPQWKHSFVFSGVTPAQLRQSSLELTVWDQALFGMNDRLLGGTRLGSKGDTAVGGDACSQSKLQWQKVLSSPNLWTDMTLVLH

SEQ ID NO: 5615 - DNA, 665 bp, Homo sapien
tgggctgcaccactcacagagctccctcccccaggcacttagttggggcccagcactgacctttcccctgagcccaggatgtggccagagccccctctgggacccctctcgccccttctctgcctcctcagcttgagctgcctgcccgaagttcggctgttccggggccagtgtgtcacctgccaacttccacatcaccctcctccctcgctccctcctctccttccccaaggacctccccccatttctggcagccaagccattaatctggagacagaaatgggtttgctatcgattctctggccactttttctttcattacaatttgtaccgtgattcttctcacccttctctgcgtccatgcatttaaagagttgtctctttaaatgttgaagcttccggaagcctgatgctattctgtgtctcctttcaaaggaagaagggggggcccagctatgggtgaggactcaagttattagtttggaaatagagcaactatgtgtacagcccaccttagaggtcatgttacccccttcctgttaaattttacaattaattttggttcaggaaatgtaaataaatttgttaattaccaattaaaaaaaaaaaaaaaaaaaaaaaaaaaaaaaaaaaaaaaaaaaaaaaaaaaaaaaaaaaaaaaaaga

SEQ ID NO: 5616 - protein, 85 aa, Homo sapien
MWPEPPLGPLSPLLCLLSLSCLPEVRLFRGQCVTCQLPHHPPPSLPPLLPQGPPPISGSQAINLETEMGLLSILWPLFLSLQFVP

SEQ ID NO: 5617 - DNA, 583 bp, Homo sapien
ggtttatagagacagagtctgctatgttgcccgggctgtggccctattttttaaagtacagtatttaaaaagaattttattcctttagtttttggtccacgatgtgcatgggggactgtgctgtgtgccacaaaggtgatgagggtggaaaagatgcggctcccactattcgtgtggttggagatgcaccagctaatttggaggctttcttgattccatacaaatatgacattgaaattagagttaagctcactcaggagagaggagattgccactgtttctaggactttaaagttgctgattcaacggagcttcaggtttaaagtcttcaggtttgatagactatatcagttctatcaaactagtttttgtgatattccagtatgttcttgcatgttaatattttagaatcctaaaaaaaatttaagtagatataaaactatgtcaatctctgaattagcataaaatgtgtgtttgcatatttatacatgtatatacacttacatatagaatacttttaaaataatagctttattgagatgtaattatgtaccataaaattcaaccttttaaaaagtaagac

SEQ ID NO: 5618 - protein, 60 aa, Homo sapien
MTLKLELSSLRREEIATVSRTLKLLIQRSFRFKVFRFDRLYQFYQTSFCDIPVCSCMLIF

SEQ ID NO: 5619 - DNA, 1585 bp, Homo sapien
  Unsure 1103-1185: Unknown base
gccaggctggccgagcggcaaaaagttcgcgctgctggtcccgcgcgggcggcccctgggctttgtgtccaccaggacagcgggccgggctccctgcaggcgcgggcggcgccgaacggtgctcagcaaccacccggacagggccaggccgttttctcccgctcaggcattagtcgttggctgtgggccgccgcgggaagttgaggcctaccacggaggaggctgctgaggtggatctcaggggatccgcaagggctccctcacccttgccgggaccctgggaacccgaaacaaaatcctacgccaccagcccgccgaatgcgccccctcggccgggggtcctgggtcttcagagaagaactcggccgaatgcggtcagaaagcccgcgaaccgcctggacctgcaggccccgccgcttggagctcccgcctttcccgaccgagcccgtgtctgctcgtgtgtctcactgatgtcttaggtctcacaaaaccatcaacccggaaaaggtttttagtagacagaagagaaatggggccgtgggttcgtggtcccagggggaaactgacgtcgcatgaggtcgtcgtccctcagcttgagctcagcggaacataagcttgcagaggtggaaaccacggaaggtttgggtgtcttggagctctctggacaccgaagcccggacacagtcccggggtccgcaccgcctgtgacctgtggcgggaccgccggggtgggcgttttctcagctggcgcgcgcgtaggtggaacttgggaaactaactggagcgaagtggcaaaaaaccaagacagggccggtgacctcgcgcaggccgtccttaactgtggagtattccttcagctaacccctttatttcatgtgtccaagtctggtttctgggtttctttgtagtccctccgggcctgttcgtgcgccttcacttgcaaaaggttcgtcgtggagggccgtgtgcttgtttgcagcagtaacgatgcccttcccgagcgtgctggagtggctcctcgctgacgcaagctcaccttgcagcctcctcagcaactgcaacttaaacgcgccctcaggaagccctggaatctcgctcagaannnnnnnnnnnnnnnnnnnnnnnnnnnnnnnnnnnnnnnnnnnnnnnnnnnnnnnnnnnnnnnnnnnnnnnnnnnnnnnnnnnctcaggaagccgtggaagctcgaccgccagaaacttccttctcctgactcaggccacagtcttctgtgtggtgagcggggtgtccagcggtctcctggttcccagactcggaattgggtggtttgagcaaactctgggcagtgggctcattagagcaggggccaggcaggcaacacagccaagcgagcaggggctgcacccacaggatcacactttccaggaacagagacccagaccgcgcctgaatctcacaactgttacgtgttacaatacatttacaactgtgggactgaggggatgtgcccaggtttgcctagactgtgttcctcagaaccccagagtcgtttctgtggacatcctagagaggttctgctaatgttggacttgggtcttatttcag

SEQ ID NO: 5620 - protein, 145 aa, Homo sapien
  unsure 77: unknown amino acid
  unsure 78: unknown amino acid
  unsure 79: unknown amino acid
  unsure 80: unknown amino acid
  unsure 81: unknown amino acid
  unsure 82: unknown amino acid
  unsure 83: unknown amino acid
  unsure 84: unknown amino acid
  unsure 85: unknown amino acid
  unsure 86: unknown amino acid
  unsure 87: unknown amino acid
  unsure 88: unknown amino acid
  unsure 89: unknown amino acid
  unsure 90: unknown amino acid
  unsure 91: unknown amino acid
  unsure 92: unknown amino acid
  unsure 93: unknown amino acid
  unsure 94: unknown amino acid
  unsure 95: unknown amino acid
  unsure 96: unknown amino acid
  unsure 97: unknown amino acid
  unsure 98: unknown amino acid
  unsure 99: unknown amino acid
  unsure 100: unknown amino acid
  unsure 101: unknown amino acid
  unsure 102: unknown amino acid
  unsure 103: unknown amino acid
  unsure 104: unknown amino acid
MCPSLVSGFLCSPSGPVRAPSLAKGSSWRAVCLFAAVTMPFPSVLEWLLADASSPCSLLSNCNLNAPSGSPGISLRXXXXXXXXXXXXXXXXXXXXXXXXXXXXLRKPWKLDRQKLPSPDSGHSLLCGERGVQRSPGSQTRNWVV

SEQ ID NO: 5621 - DNA, 2118 bp, Homo sapien
cttctcctgggcttgcttcagggaaggagactggcttcccggccttttcggaatccagcaggagccctcagttcagccccagcccctgaaacttggcagtgtccgtacagacaaagtaagtcctcagctcgcctttgcctttgacgttgatcaggccacggcattcacaagagtacccgaggccctggaggatggtgcaggtctcctcggtaacctgaaaaggaagagagacctgttgtcttcagaggcgggaagaacacctgtcatggtagggacagatagagactgcccaggcatgcagtctgccttccctggagagtgtgatagctagaaccatggctgctgggtgagacagcagctcttaagtccaagtcccctcacctctggggaagatcttttccccttagtcaactgcttccccaataggtctttacctggattttcccaagttctccagtgctttccattcggctggccacattgacagtgtttccccagatgtcatactgaggttttcgggccccaatcactccagcaatcacaggcccatggtttatgcctgaagatgatgtttacagttacccaagcgtgcaggcaaagcctcaagcttctgcccttagaggaggccagagaatccataccccagcacaggatgcggggacaaaacaactagagtgaaggctgggttgcttcccagagtcactgcgttgcagtcgggcttggggtatgaggagggcattccccggccagctctttttcagactcagaagtctgggtttgatgttaacacttgtatctgctaatctctcttttaacaaagaatactttgttaaaagtattaacaaaggcctggctttgagcgcaggcccgcaactatttaggtttagtaactttgcttccttctctatattttaaggtcacctgtttacagacaataattttggttctccattttctgtagttacgtattattaaaactctcaatggtaactatatgctaactatatgcaaaacatcagaataattgtccaactgctgagcttgtcagatcagagggatttctaaaacctttcataatagatggcgaggtgcagctgtgccacacagactgggtggactggcctagaggcaggggctccccaccccgctccatcacccgggctcaccgacgcggaggcggaaggagttgaaggagtgcctgttgatgccgtccagcttactcatcagggcgatgctgaactccaccatgacaccaatgtgggcatgctgccgctccagctcctgcgggacaggctgtgggtcagatccttgcatctccagagcccccagacctagtgggccctggcgcgccactcttgttgaggatccccaccactaaaatcctggctgagccctacaagtacctgtgcccctcccccaggacgagataagggcacaccctttaagtaaggtgacaggtcacctttaagtgaggacagtcagctgaatttcacctcttgggcttgagtacctggttctcgtgccctgaggcgacgctgagccctgcagctgccatgtacgtgctgccgatggtcttgatcttctccacgccgctgaacttgggcttcagtaggagctgcaggcaagaaggaagcggtgaagcagccgccactccatagccgcagccaggctgcccctgcttctcaggaagggtgtggggttccctccacccatcgccgcctctcgcacacacgtctcatggctgccctgccagctgagcgcatgactaagcatggtgaggacatggcccttggcggctcctgctcttcctgttgtctccgtccccacactgtctccctcttcccttccatctgtgtctgcacagagcaaacacagcattatctacacaggaatgtagattctttgtctccagcaaagaattcaacccaaactgatttcctctgtttggcttggttgatagcgtgggcttagttggaaatgaagctaaggggcctgagtctaatcttagcaagctgcccatcacagagaagatgccaacgaattatttgctgcataaaacagaatgaaaaagaaatgtgtacctttatattctgtgtaatgtatgttccccccaggcgg

SEQ ID NO: 5622 - protein, 109 aa, Homo sapien
FSWACFREGDWLPGLFGIQQEPSVQPQPLKLGSVRTDKVSPQLAFAFDVDQATAFTRVPEALEDGAGLLGNLKRKRDLLSSEAGRTPVMVGTDRDCPGMQSAFPGECDS

SEQ ID NO: 5623 - DNA, 476 bp, Homo sapien
ttgcttctccaccaacgtaacaatttataaagcaagagatgagaaaaagagattattgggaaatgtactgaataatgaggagtctggggaatagaacaaaagttgtaagtcgtaacctgacccatcttacttcactggtaatcaagtacagtcgaaaggatgaaataaagaagtgagtagtttaaaaactctgttggaccagcaccttgaatcaaatggatgttttagggttctgtttcccactgaaccaagaattgtatccctccatctctccttgaggagaggccctatgttagaccttggctactcatcattaagataaaatcttaatagataaaactggaattccttgaatccatgaaaagacagtgttcattaagggtttgtgcagtggatgctccttatgtcccatggtagaataagatctccttagctccgccaagttaaaggctcttgcaagggcacttagagatgtt

SEQ ID NO: 5624 - DNA, 1081 bp, Homo sapien
gaccgctgacctagagggagttatgcacatgggcttataaggttagccaagagaaaggacaagaagacccaaagtcggcaagcaaatttattaacctgctgggctgctctacagaaatctgaggaggcagacaccgggcttacaggctaaggggtataagtaggtctgcaggggttttgtgtgtgtgtgcgggggtgtcgggggggcaaggccatttgtggagacttttcctcccagtatggccacatcctgcagtttgtcagtttttgcccccgcctggctcagggtaccaggatgtggtttagcttaggggtggttatagtggcacctaagttctgggaacttgcggtgggggcgaccttttggacgaaaaataagctgcagggcagctaggggagggggcttgttatattcctctgggggcagggtgtccctaactgggctcagtcggaaggaacttgaccaaagtctgggctcagttgggcatcactcaggctaatggtcgtgtgctggatgccatcagagggaagtaccaatggtaaagtggaaacaatgtgcagctttcaactgggtggaggctgctattctgtggacagtgagatgtttccttggcactgtcaatagacaatctgcgtagagaaattccaagctgaaagccaataatgttataataaaatagagattcttcagaagatgaaaggaattaccagcatggaaattgtgtcataggcttaagggctaaagaagaagccttttcttttctgttcaccctcaccaagagcacaacttaaatagggcattttataacctgaacacaatttatattggacttaattattatgtgtaatatgtttataatcctttagatcttataaatatgtggtataaggaatgccatataatgtgccaaaaatctgagtgcatttaatttaatgcttgcttatagtgctaaagttaaatgatcttaattctttgcaattatatatgaaaaatgactgatttttcttaaaatatgtaacttatataaatatatctgtttgtacagattttaaccataaaaacatttttggaaaaccataaa

SEQ ID NO: 5625 - protein, 12 aa, Homo sapien
TADLEGVMHMGL

SEQ ID NO: 5626 - DNA, 2547 bp, Homo sapien
agctgcagccacccgcgtgcggcacgcgccggccgcctgcccggatcgcggccaccagtgccgcggcctctcgactcccgccccgccgagccgcgcgcgcgactgccatcctcctcaattgctttttacgattttttttgtgcatgcattcattttctgttccgttttgtcctttttaaggcggtggcggcggcgacagcggcgtaagctcgcagcggggagggggcggccggaggatgcggcgcggggctgcgctcgctacgtccgctgctgctgcccggctcgggcctgagcgccgagcaggatcccaagtgatggtggtttcctcggagggcgagctgagtcctgcgcgactggttagcacggtggagctggtagccacgcctgctggctggcgtgcgtgaacaggtgtggaccgcaggatctcagcactctgacccaaggggaagcatgtcgaagaaaggccggagcaagggcgagaagcccgagatggagacggacgcggtgcagatggccaacgaggagctgcgggccaagctgaccagcattcagatcgagttccagcaggaaaaaagcaaggtgggcaaactgcgcgagcggctgcaggaggcgaagctggagcgcgagcaggagcagcgacggcacacggcctacatttcggagctcaaggccaagctgcatgaggagaagaccaaggagctgcaggcgctgcgcgaggggctcatccggcagcacgagcaggaggcggcgcgcaccgccaagatcaaggagggcgagctgcagcggctgcaggccacgctgaacgtgctgcgcgacggcgcggccgacaaggtcaagacggcgctgctgaccgaggcgcgcgaggaggcgcgcagggccttcgatggagagcgcctgcggctgcagcaggagatcctggagctcaaggcagcgcgcaagcaggcagaggaggcgctcagtaactgcatgcaggctgacaagaccaaggcagccgacctgcgtgccgcctaccaggcgcaccaagacgaggtgcaccgcatcaagcgcgagtgcgagcgcgacatccgcaggctgatggatgagatcaaagggaaagaccgtgtgattctggccttggagaaggaacttggcgtgcaggctgggcagacccagaagctgcttctgcagaaagaggctttggatgagcagctggttcaggtcaaggaggccgagcggcaccacagtagtccaaagagagagctcccgcccgggatcggggacatggtggagctcatgggcgtccaggatcaacatatggacgagcgagatgtgaggcgatttcaactaaaaattgctgaactgaattcagtgatacggaagctggaagacagaaatacgctgttggcagatgagaggaatgaactgctgaaacgctcacgagagaccgaggttcagctgaagcccctggtggagaagaacaagcggatgaacaagaagaatgaggatctgttgcagagtatccagaggatggaggagaaaatcaagaacctcacgcgggaaaacgtggaaatgaaagaaaagctgtcagcgcaggcgtctctgaagcggcatacctccttgaatgacctcagcctgacgagggatgagcaggagatcgagttcctgaggctgcaggtgctggagcagcagcacgtcattgacgacctctcactggagagagaacggctgttgcgctccaaaaggcatcgagggaaaagtctgaaaccgcccaagaagcatgttgtggagacattttttggatttgatgaggagtctgtggactcagaaacgttgtccgaaacatcctacaacacagacaggacagacaggaccccagccacgcccgaagaagacttggacgatgccacagcccgagaggaggctgacctgcgcttctgccagctgacccgggagtaccaggccctgcaacgcgcctacgccctgctccaggagcaggtgggaggcacgctggacgctgagagggaggcccggactcgggagcagctacaagctgatctgctgaggtgtcaggccaaaatcgaagatttggagaagttactggttgagaagggacaggattccaagtgggttgaagagaagcagctgctcatcagaacaaaccaagacttgctggaaaagatttacagactggaaatggaagagaaccagctgaagaatgaaatgcaagacgccaaggatcagaacgagctgttagaattcagagtgctagaactcgaagtaagagactctatctgttgtaaactctcaaacggagcagacattctctttgaacccaaactgaaattcatgtaaagctctcagatgttttcaagcatgtgtaaaggggacatgttatagtttctttctttctttctttctttttttttttaaatctgtatgttcagaataatttcactgccttaatgtgttctggagagcgtgctcacccaagtctatggacatgtaccagagctaatatatttattgcctatggcttgttttgcacttaataaaataatttgtttttgc

SEQ ID NO: 5627 - protein, 626 aa, Homo sapien
MSKKGRSKGEKPEMETDAVQMANEELRAKLTSIQIEFQQEKSKVGKLRERLQEAKLEREQEQRRHTAYISELKAKLHEEKTKELQALREGLIRQHEQEAARTAKIKEGELQRLQATLNVLRDGAADKVKTALLTEAREEARRAFDGERLRLQQEILELKAARKQAEEALSNCMQADKTKAADLRAAYQAHQDEVHRIKRECERDIRRLMDEIKGKDRVILALEKELGVQAGQTQKLLLQKEALDEQLVQVKEAERHHSSPKRELPPGIGDMVELMGVQDQHMDERDVRRFQLKIAELNSVIRKLEDRNTLLADERNELLKRSRETEVQLKPLVEKNKRMNKKNEDLLQSIQRMEEKIKNLTRENVEMKEKLSAQASLKRHTSLNDLSLTRDEQEIEFLRLQVLEQQHVIDDLSLERERLLRSKRHRGKSLKPPKKHVVETFFGFDEESVDSETLSETSYNTDRTDRTPATPEEDLDDATAREEADLRFCQLTREYQALQRAYALLQEQVGGTLDAEREARTREQLQADLLRCQAKIEDLEKLLVEKGQDSKWVEEKQLLIRTNQDLLEKIYRLEMEENQLKNEMQDAKDQNELLEFRVLELEVRDSICCKLSNGADILFEPKLKFM

SEQ ID NO: 5628 - DNA, 2377 bp, Homo sapien
cttcagactcaagactgcaacaccgtgcctgccctctagctatgctttaaggcaggcctatcagcccagactggagtcatgtaatacatggctctgtcagtagctctccttcccacaaataagttttgatgatcttacactcatccctgccgttagcattcaggaccaatcttctatagcctatacgccacactggtctaggacagcacctaaataatactcatgctataaaaaattcatcaagttatatatttttaaaaacatccctaaaattatctttttcctttactgaaaagaatttcaggatcccctctctctcactgcctctcttcacacacacctaccttagttggtcacctattttgtaaacatatcttctttaaaaaaagaaagaaatggcagtacatgaaaaactgcttcgtaaacagaaactatattatttatatttgtagcatttttttccccttgaggttaatttcctttgcttcccataactggaagccaatgattcagtgccattatataagcttattttccctcttggaaatagtaaattataagaggtttgacccaaaaatatacatcaaaattaggcagtattcggtgtttagcctccatctgccttgtcttcttgtctttagttgtgcaagtagatgctgatgatttctggcagagctaaagtaagtaaatcatgtgaatttattttttttcctcataaaacagatggcatggtctagctctgggcttgtatgtttcatgaagtacatgggtctgagtgcgtatttattttgtgagccaaggtttatgccttcttctataattttctttcaccgaaaattacctggagagctagaaactccatttgtgtcagcgtaagaagctttagaatctatatccagaccaaggccatggaacaatgtagattcactcagtaaaaactcactagcggccttctttgtactagtctgtcacctttgcttggctttgggaagcttcaaactagggcagtttatgtttgggagtgaccagtcaaatagcaagacagacataggcaaggatgtaatttttaaaaatttaagtggggaatggtgaagcatgaatcaaaacagaaggtagtcttaccttcttggaactgtaaaataaatacatttgaaaaaggcaccctctcaaccttctgcgagtcagaatttttgctgccacccctcattttgaatctctattctgcattttttattcttttttttaggaaggaggaagaaaaatttctcctgaagaattcattggaaattaaaattaacttgcgtattttgtattctttggaatgtgatgaagactgatttgaaagggcagtgctggatttggtcaggcataggaaaggaagacatgcagtcgtcctgcctagctcatccccgccacgatggagaagtggggttgctttcgttgtactttttttcatttgtttcttgccaagcccagtggcttctgttataacatgtggcagcttctcccttggagactgattcagtccaagttaccataatatttaggaccagctacagagacgtttcttcccctaaacccatgccaaatctaaatcaaactatcttcttctccttagccgttcaaatagctccagctcttatataaaaatacgagaaatacacaggcctcttttcgttttattcctgttcaaacagataaacaaacaaggcacatcatgcctaggttgctttgagcttgatcacttcctcctaaagcagtcttacgctgtgttgattttaagaattgcaacttaggtgttctagaacatattctgagagcatagtcatagtctgtgatctcagaatatgtttgcttccttctagaacatctgagttctagaaattgcgtacaataaactgctgtcagtgctgctggaggaaggaagagtaactctgacatcactggccttcaacaggtgtggcgctgagcttctgggcctcagaagccctgacttctagaggctgggggccagcggggcagggaggtgatctcatcatggatggccacagatcatccacctgccaaacagttaaccctgaacaagtcatgtcaatttattttgcttttaaaaaagaaagtctgcaaaatagaaaaaaaaaaaaagattcttcataaatacatttgttctgatctgtaaataccctggtcatttcccccttggcatttgatacacatagtatagacatattttagtcatccttgctcaagtaattatattccataaccaactttattagcataaattaacttcctcatatttttagcaagagttactttccttcattgcttagcttattgttttgaaatatgaattacttcagcacagttcattttt

SEQ ID NO: 5629 - protein, 33 aa, Homo sapien
FRLKTATPCLPSSYALRQAYQPRLESCNTWLCQ

SEQ ID NO: 5630 - DNA, 982 bp, Homo sapien
tccagagctagttggtcggaggataataaaccactatccctgactttttctgtgatccttgcgaatatcttgcagatttgtttggagtacctctctcttctgaagcctgtaaccttacctatttgtaaaatagatttaagttctcctgctctctggtatctcaacatagggggagaaaagacccaatttaagtaacttttatagatctaaatttcgaaggaggatcctttcttattcaaaaccgaactaaaactaagtgacttgattcacagaaatcttaatattgagatgtctaaattgggtgggtttcagcacgtaaatgttgacaactaatagacattttaccatcgctgtggctttaccttgttgtggaagttgggttcggacaccaggataatagaatcttcctctcatttcccccagatccttgacagtataacttgatgacttctaatcctaaggaattgcataccttggttttcaggtacagccatttaaacagggtgcagtgtattgacagttcaaggaagtccaggagtcgcgtggatttgtgtgctacaattttgttgtggaaaattgtactgtaatacttctcttggtactgtaagaatttttaatgtagaaattatgctctgtaatgttgtttttggaaataaaactgtttaaactctttgggttgtttaaccttttaaagtgaaatagctgtgacagtgaaatgttacttttgagagtagtgtcttaaatctaactttacagataagccaagtgtatgtagtagctcagattgtctagttgggcactgactttcagcacattgtctcatgagacactacctcttaatttattttacttgtatcaactttagagtagcatggccatttgtttattttttaataagtgatttgtttttaaaaattaaagtacttgtgaccctcaaaaaaaatctatgtcgggtgcggagaaagaggtaatggaaatggca

SEQ ID NO: 5631 - protein, 64 aa, Homo sapien [sequence omitted]

SEQ ID NO: 5632 - DNA, 1567 bp, Homo sapien
atttgcaacaagtcctttgacttttggagccacagataaaagtcggtgcgctggtcctgcctcattaatccagggcttgcagtgctttgaagcccagtcgttgttggcctttgtgatgaaaatacctgtgaagatgagtggccggggaccaaaaggaagaattggaagcgcgatggttggatggaacaaaaagatgttagctcacccacagatctcatagtgattaaaatgaaagaacgttcaccccaaatccttatgatgtggtttaaaaataaagagttatagataagaccctattttcgaaaacaaagtgttaaatccccccacccccacccccgggccccgtgttaccttttgaaaggttgagcgaaagtgagaatgcaaggttttcctgaacgacgttgcttagaggtaacgcggggctgtgatgtctgttaatgggcatccttgcaaaagatgtcgtttgttgctagtgacgtttaaggtttgaacctgctgttcgtatctactgcattttatgtagtaacacatttaaaacaattaaattgtgcttaactgcaatgttcctaaaagccttatttttttgtatttcccaggtccctatgagaagtttaatgaaatattactggctaatgtggttttcccacctccattaaccatcatattcgtgactagttgctcaggctttttaaaaaacaaggaaactcaagagatctttactgttttatttttcaggaatgactttgtgcctctggtttaaatattagaaaacagaaaaataccagttggctttaaatgtttgctattcagttaaagactggatttgtttaaatgtaatacattgtaatcaaaggttaagtttttaaatctttgtgtttttaaaattgtgcttatgttttaaataataatacttgagttgtgtccattacaaatcagatacattcctcgagtgcaacacaggttctaacgcttataagacctctaggaaatttttttccttttatttatcaaatgaatataactgcgtttaaaagagggctgtaactgcaaggaacaacgattgagtgttcaagactgcctttattagctttacttacaagataatacattggttcacctttctatgcacaataaaagaagaattgggtctcaattttagaagttaagcttttttcagtacctcttaatgaaatatttttaggcttttgcatacttaatttgagagggacatctcccttatccggatagctgggtggattcttatccctgtgcagtagcaagtgctgactgggcaggaggtaaaaagagattagttttgtggacccaatgagggactccttttaaatgtaagttttcaatgatttgtataaggtacctactgcattacgtctaacacagttgtataattttaccagtaaaatctttatatgtttgaatagattaatggcgaggataaatagaggcattgtttttgctactttgcatatcattggccaatcaatgattgattgatttgtatatccttttacattaccgcttcttgctgtggtagtttctgtaccaaaaa

SEQ ID NO: 5633 - protein, 72 aa, Homo sapien
FATSPLTFGATDKSRCAGPASLIQGLQCFEAQSLLAFVMKIPVKMSGRGPKGRIGSAMVGWNKKMLAHPQIS

SEQ ID NO: 5634 - DNA, 5092 bp, Homo sapien
  Unsure 4191-4322: Unknown base
gggggggctcgtgcgttctgcgcccgccgcggcggtgccgagcccgctggctcccgattgtcctctgcggcggtggcggtcgctgcctccttgcctccgggcccggggctgcaggggccagagcgagtgcgcctcctgcccgcggaccgcggcagcccagagcagaaacggcttacaaaatatacagatcttggtagacaacgtggctgcaggctgttgaattggaattccctgtggctgtccgaaggcagggtgtccggagagcggtgggctgacctgttcctacaccttgcatcatgccagctttgtcaacgggatctgggagtgacactggtctgtatgagctgttggctgctctgccagcccagctgcagccacatgtggatagccaggaagacctgaccttcctctgggatatgtttggtgaaaaaagcctgcattcattggtaaagattcatgaaaaactacactactatgagaagcagagtccggtgcccattctccatggtgcggcggccttggccgatgatctggccgaagagcttcagaacaagccattaaacagtgagatcagagagctgttgaaactactgtcaaaacccaatgtgaaggctttgctctctgtacatgatactgtggctcagaagaattacgacccagtgttgcctcctatgcctgaagatattgacgatgaggaagactcagtaaaaataatccgtctggtcaaaaatagagaaccactgggagctaccattaagaaggatgaacagaccggggcgatcattgtggccagaatcatgagaggaggagctgcagatagaagtggtcttattcatgttggtgatgaacttagggaagtcaacgggataccagtggaggataaaaggcctgaggaaataatacagattttggctcagtctcagggagcaattacatttaagattatacccggcagcaaagaggagacaccatcaaaagaaggcaagatgtttatcaaagccctctttgactataatcctaatgaggataaggcaattccatgtaaggaagctgggctttctttcaaaaagggagatattcttcagattatgagccaagatgatgcaacttggtggcaagcgaaacacgaagctgatgccaaccccagggcaggcttgatcccctcaaagcatttccaggaaaggagattggctttgagacgaccagaaatattggttcagcccctgaaagtttccaacaggaaatcatctggttttagaaaaagttttcgtcttagtagaaaagataagaaaacaaataaatccatgtatgaatgcaagaagagtgatcagtacgacacagctgacgtacccacatacgaagaagtgacaccgtatcggcgacaaactaatgaaaaatacagactcgttgtcttggttggtcccgtgggagtagggctgaatgaactgaaacgaaagctgctgatcagtgacacccagcactatggcgtgacagtgccccataccaccagagcaagaagaagccaggagagtgatggtgttgaatacattttcatttccaagcatttgtttgagacagatgtacaaaataacaagtttattgaatatggagaatataaaaacaactactacggcacaagtatagactcagttcggtctgtccttgctaaaaacaaagtttgtttgttggatgttcagcctcatacagtgaagcatttaaggacactagaatttaagccctatgtgatatttataaagcctccatcaatagagcgtttgagagaaacaagaaaaaatgcaaagattatttcaagcagagatgaccaaggtgctgcaaaacccttcacagaagaagattttcaagaaatgattaaatctgcacagataatggaaagtcaatatggtcatctttttgacaaaattataataaatgatgacctcactgtggcattcaatgagctcaaaacaacttttgacaaattagagacagagacccattgggtgccagtgagctggttacattcataactaagagaaatttccataattgtctttttctatagagtgcatgatgaaatcaattacagttttggtagtagggtttttaaatctatatcactgtcatagatgtacaatcttggttcaagttgaatgctggttttgtttgtatctttttacagccttatttcaaacgccatgtgttagtataagatccgaaatcaaaatatgcacagtactgtattctaagcaaaacctcaaaccttctcgttgtcttcaataccgctctatctccaagatgaggctgaaattttcagagagacttagctagaggcttagtatgtatgggagttcagcgcttctgctggtctcaggtgtggctgctgctgtcgagtttgaatgttagctgttgaaggtatcaattcagcagccatgagcagctccagacagacaggtgagctctgctgtttctgggtggatcatcacagatttagccgggcaggcagtaaggtgtcctcttactattcaaaaagtgtagactttcttacatattcgcaatacgttcacagtgtgtgcattttaaaataattcttaaaggagtaactgaaattttaccttgagtgaatggccttcataatatagcttgagaagtccttttgagtacctgtcagtgactcaacaacatttaataagggaaagtagacttttaacagttattatatatgtaacgaaaagcctttcctttgggattaatataagtaagaatggtagccttgtggcaagaaatgattacaaaggatatttttatttgtaattcctcagaagacaatttatgaagtcacccaaaatgttattttagctggttttggatttttccaataaattagaagaaggatttctattctaaaacatgtaaaacctgttttacatattactgatacaattaaagattatttttcatctatgtgcaatagatcacccctctttaaattgctctaagatttattttagaaaacttttcatgtgatgttatttctttgtcatcaaaatgcttgttaacactgtccagacaccatcctaaccttgccattgttaaagaagtttaggaaagactcttatattgtaaatatttagatgggttctctcacttttctttgatactactgattttcagcaagtgaattatataattcaaaatgctagaaatgtctatccgttctataagagagcatatcctgccgttcttgcatgcagtgaagccctgcccgtcgaaaatcattgcatctgtgactttcaaagtggaaaaaaaaatgttatttttttgttgatttgtaaagagagtttaaatgtcatgtgaaaaaaaatagaatgtagtaaaattctatatatttatgaaatattttaaaggcatatttttttaaatatcaaacggggctattcataaaataaactgattgtatgtcaagatgtcctaatttaaaagagtagttttataaatcatggtcaacattccatgtaaatatttgagctttacaaagatagatccaagtgtgcgatctgtgcactgcacatttgatagcattattcactggttttccttcatacttgtcaagttcatattagaagcagagacaaaaaccactccaatggccttgacacatagtcacaccaaaatagataatcagactaagtattatataacaacgtgatccagacagtgagttctaagtgtattaattaaatagcaaaaaattttgtttttaaaaaatgaaagagggagggttgccaacctgaagtcttaagtagattgtttgggtagcatatttccttctttgaacattgtctgaaattttctataaatcaagacttcttgtacaaagaatgatgggacatatgtaataattcaggcaatcacctgagtaatttaggcagtccaaattctttaccctgaaatacccacattttaaaaaaattgcagataattgcttcagttatttactttggggacagagatatagtgtaaagtgggagaaactgagtccttttttggtggtggtaataataagatgttataaaaatataacattttaaaaaagaaaggtccagaccttaagcgcagagctagaacaatattttttaaataatggggggaaaagggggcactttggtaattttagaaatcaggtagtatacnnnnnnnnnnnnnnnnnnnnnnnnnnnnnnnnnnnnnnnnnnnnnnnnnnnnnnnnnnnnnnnnnnnnnnnnnnnnnnnnnnnnnnnnnnnnnnnnnnnnnnnnnnnnnnnnnnnnnnnnnnnnnnnnnnnnggtagacgtggtcttaaaaacagtgtttacatggccatcttgatgcttagaaagataattgattaaaatttaataaggcagggccaactccgagagttcattgacaacggcagcaaaaaggccctgaattctgtactttcttcccccagcctccttctccagcaaggagaatagcactcctccctccagaagccagctccctaagttggagccactatgtaagagaagaggaacgttcactttttaaaattcatatatttaaaaatcaagaccaaaaagtaaattctgtactcctattattgactgtagtcaatcaaacataaaaaggtgaaagtaaaatttaattttttacccttattttactgaccaatatggaagttcttggtatctttaaggctgaccttcctggtattgtgtaatgattgaatgtatctaaactgtaataatttgaaactgacaaacataaccttctcagacttacaaaactatgttctttctaaagatacagatttttattattttattttgactaggaaggatttataaataaatgtaatgaaaaatctttgatcttaataaagtaccttcaaacagtgtgtgtacttacttgaaaattgtttttgcacttggatattctattttattatactactattgtgatctattccattatactatttcccatggtagaacaaattatattttctactgtgatatgaagtgatgtaattgaacttgccatgtctaaaattaaatttcatatttttttc

SEQ ID NO: 5635 - protein, 576 aa, Homo sapien
MPALSTGSGSDTGLYELLAALPAQLQPHVDSQEDLTFLWDMFGEKSLHSLVKIHEKLHYYEKQSPVPILHGAAALADDLAEELQNKPLNSEIRELLKLLSKPNVKALLSVHDTVAQKNYDPVLPPMPEDIDDEEDSVKIIRLVKNREPLGATIKKDEQTGAIIVARIMRGGAADRSGLIHVGDELREVNGIPVEDKRPEEIIQILAQSQGAITFKIIPGSKEETPSKEGKMFIKALFDYNPNEDKAIPCKEAGLSFKKGDILQIMSQDDATWWQAKHEADANPRAGLIPSKHFQERRLALRRPEILVQPLKVSNRKSSGFRKSFRLSRKDKKTNKSMYECKKSDQYDTADVPTYEEVTPYRRQTNEKYRLVVLVGPVGVGLNELKRKLLISDTQHYGVTVPHTTRARRSQESDGVEYIFISKHLFETDVQNNKFIEYGEYKNNYYGTSIDSVRSVLAKNKVCLLDVQPHTVKHLRTLEFKPYVIFIKPPSIERLRETRKNAKIISSRDDQGAAKPFTEEDFQEMIKSAQIMESQYGHLFDKIIINDDLTVAFNELKTTFDKLETETHWVPVSWLHS

SEQ ID NO: 5636 - DNA, 2158 bp, Homo sapien
  Unsure 1816-1839: Unknown base
gccccttccctcctgccgcagcctgcgattggctgagaggctctgacgtccgtgtttccatgacgtgttggtgcaggagggagcggcgggggaggagggggtggccaggcgcgcggggaggtgactccgtcagtcacagctgctgtttcggcgcggggccgggccgctgccgcgacgtgtggaggcaggagagcgatgattgccgcaggagaagtgcgggcgcccttcacctggggcccctcccgaaccgcccccgggcccatgcccctccagggcccaggagcgagccagcgggagggcgagggcgagcgctcctggcgaggacagattaaggcgaacccccagtcagcggacatttgagcggctcctcgccgcgtctctgcccccactccaaaccggactcgacgcctgtcccgggccgtgacgcacgcaccggaggaaaaagtgcttctcggctcgctccctctttggggaagagagctcactccccatgcgggcgcgggacactccatctctgttcctgccggtcgggtccgcaaacaccggggatcccagctgcggcgcccaaagggttaacgcaggcgttcggccagtgcaaaccggcctcgcaggatccgcgcttaaaatccgggtgttttcattttgggtttgtttcttctactatgccaagctggtggctctcttttaattctcttgtaacatctcaaccctgcacccatctttcctgaggggaaaaggaaacgggataacttgcggtatttcgatgctcaaaggtaaccggcggctctgctccaaccttcaagagattttgcaagttgaaaaaaaaaaaaaaccatccttcgtaacatctacttaaaaaaaaaaaagcaagttttccttcttgtacacgcatatacacagtaaagatgtgtatcttacctaagataccgcgcttcatcttcatctaatctttatttgaactcaccgtcgccactggcccagagaccttgtcagtgttattttcagtatcagttaatcagaacaaaaagataagttctgcaatcttctttctcttaattccagaactggaaaattaatatttatatagcctcctcaaaagcatacaggcaataggaagtatggtattatgttcacgatctgatgatagcatttgttttaaaatattttaaaagattagacacaaaatgtgtaaaagacgtttaaaagtgaataaatataaatcaatgctgttgcaaataatttttttatcagtttatgtatctcactaggcttgacattaccagccttctgagctgtgcccttgatgtgtaagataaacgaacattgaacagaatgatagcatttttcctctcttcagtcactgatggagaattggttaatgtggtacaataaatagcccttcctgacactatttcaaatctttttaacagaagaataacctaaatttcacctaataaatttcaatattatttccccctaaaatatctttcaaaacgactcagagacatttaagaatcactggcttttttccaacttttcctccaaggaagttacaatacaatgttgaattatgtattctactttaatcaagaatttgacattaaagtaatatgtgaatcattgctatagtacactagcaaaatgggtaataaactagaatctgttcactttgtgggtttgttccagttccagattataaaatgaatgctcttaaagtgttgtggtcatgaaacaattattgagcatctttatttaagaacacgattcaattaaattttcatttatatcgataaatctataaatgaaacatacggannnnnnnnnnnnnnnnnnnnnnnnaaatgaaaacgtgtgtgtgtgtgtatcccggaacatatttgtatgcattttaatgaaatgtgagtcatatgcaatgacaaacttttactgtcatagtcaagaaaattgtactgtagtttggtttttatatttttattcttcaaataggaaataaagggtgaaagcaatatagaaataactgttcacattacattaagaaattcaatttttttctcccacaggcttagtactaaagcatccctcacacatatttttcaatgtaaaaatcaagaaaatattgcattgcttactgtttccttgaaaaaaaattgaactatct

SEQ ID NO: 5637 - protein, 109 aa, Homo sapien
PFPPAAACDWLRGSDVRVSMTCWCRRERRGRRGWPGARGGDSVSHSCCFGAGPGRCRDVWRQESDDCRRRSAGALHLGPLPNRPRAHAPPGPRSEPAGGRGRALLARTD

SEQ ID NO: 5638 - DNA, 6364 bp, Homo sapien
  Unsure 4747-5018: Unknown base
gtcgactttttttttcctctcccaggtgcgcttccctgcttgatctgtgtaccctgctctttctccttcattccgcagcctcctttgccctgtgacctgcaggtactggacggtccctagagaggataccgggacgctcctgaagccgcgagatgatttcaagcagatgcagcctgaccattagggccaaggccaaattgcaaaaaaaaaaagaagtttgcctttattctactccatccacatctaaactttggaggtcaaggctgtggacagatcagaagacatagttccctccttctggggctccacatccttcattcactgatctctgggaaggaggatgggtggcaggatgggtcttccatgatactgaagggagagccacatgttgatgcccaggaccagctgcctccttggtctgaaaggcctgatcgaggccaggattggctatgagagctgggaaatgggaccatctttgaagccatgggagagggtgagagccaccatcactcatgttcttgaatgggaactgcctggagaccctgaagaagaaggagcctgaaggaggaaggaggaggctgagccatcccgggaacatgggctggatgaggccaagccaggagacgacaccaccagatagaagtcaccattcaggatttggacttttctgtggagatcctggccccgagatcgaacccttctccctgtgggtgttcccgcaggagatggtgctggagatccaccagctgttcatggaccatgaatacccatgtcaccacatcacttctcactgcacctgggtggcagcacactggaccacgtctcagagctgcgcagcatggcagggctgcaggcgggcttgctgctccacgtggtggaagagccctgcacaatgcacaaggcccacggtgatgagtgccacatttgagactgctcaggagcctggacccagctgatgcagctccttgtccttcctgagcgtcttcactgacagtggcctgagagacggcaggagcagaaagacttggagatggaccccaccgactgcacaccacccaagtacatcctgctagggaccctggaacagccactgtgtcccctgcaaccccagaacggtgactaaaagcccctgaaagtgctcaccgtgagcggctggtacctgtcccctgggaactgcaagatgcacaggaccttgtgtacctgtttgtgatcacagccgaggaccagcgaggtagcattaccacatccacacagggcttttaccataaccgccccagtactggaacgaggagctgcagatgatgagggacctacccaacaagaaccaacctgagcagctgcttcaagaaaaagccatgttcaaggtgcctgaatcccctggtaagtgagtgacagcctcacagcctcaggcccacctggctcctgctggaaggttttcttgtgctcgggagagaagtgagggaagccggcagtcccagccctgtcaggtgccctgaaggcccgtcaggtttgccctgcaaggccttctagcattctgcttcctgggagaccatcccccacctttctccggcctctgagactttgagtccttgggaggagaaggccctccttgctatctgggctgagtggccagggccatccagcttcccaccctccactgactgccatggggccctcccctgagcacatggtgcccaactgtagcccttctagggcaggggctcattggcagcacttgcagcttgctggcacttaaaagtcattagtgcggttactgagagaaatgaggaaaaaataattgttaaaaaaaaaaaaaatctctcctaaacttactgtgtaacatggaagaagtaacagccaaaatttcttgggtactaactttaccaggatgattccaagtgctttataagcattatttcctataatcttttggaccccttgtaaatgtcaatactttccatcatcatcgttgcatagacaagaaactgggtctgaagttacctgccctggtttgcctggcacatagctggtggatcccaaacctgccgcagccctcatactccttggtagccactaaactctgtgcctctttaagcataagtgtttacttttttgtagaaatgattttcttgcccttctctaaatataaggaaactgaggcaagggtctctggctcccaaggcaggcctggttgcctctcccatcttggcgagctggaccaggtggatgtagcctgaggcttttgtgggcatggcctctcaccctcccagccttggtccctcccaggtacacagcaacttcagaatggcagccacatggggcgccatggtagtcagggaggcatcgtcatggccatcagtcccagtgaggagaccaagctgcagatgttcatgtggagccgcatcatcttcagcctgggctttgtcattagtggccactacaaggactttgccagggatgtggcagcctccatagcattcaccaatgacctgaacggtgagcacccgcacaaggcagcggacatggagggtctgtacacgctggacacagcagaggtggatgaccgcagctactgggtcaggttccagtcctcatccctggcatcctggagtgggaccaggagcagagtgtcatctatggctccactgactttgtaagatggtggtgtggcccccatcgtgttgcctggatctgctggagcatgagttaactgctcaagaccctgtgccactgcatgctcaaccagtgcaacgatgaggcggagctcttctcggttgagggcaagtgtgtcactggcaatgacagatactacctgctgagccccctccccctgacctcagcttcctgcctgtgccccacaaggagctgccagaggagtgctcccatgccagcttcccctgcacccacaggcacaggttctgtcgcttgtgccaggagctggtggatgtctttgtggagcacagttgaggagcagccctgtgaggctgaggctgcagccagctgcactctgctgcgggcacgggcaccctgggttgttctggggctggatcgttgaagagagaagctctggacagtgaagaagagctcgttttggccacactcactagagcccctttcccatcccccacccacctgccatcaggctcccagatgcagaatctggagctttgtgttggttgcaagccagcaagcagtcaaaccagtgacccagctgagctgtgctgttctcctaaggagcatttggaagtcactgggtgggttgtgaaggtcacagtccctgagtgttggtgctgctggtttttagtgcttaggagttggccatgttaaatttcccacaccacaagtaactcttttccagaagccagtggcattcctgtctctgttggaagtcctggtctgaatgtggaccctctctccccgacctctatactctggctgtcttcttcctgtctggggagatctggcagccaccaccttgttgcctgggtctgtgagagcaaagctgagttctggtccggcttgtagcagaagaaggaatttgacaccatctataaggcccaggtgggctgtggcagggccggtgggttgagctgcgcctgtaggctgtgggcagctaatcctttcctgcctgtgctctctcccctgttttttggtgagaaccacgagaaggaaagctccgagatcctcaagtgcccggcccagcaggccatggcccagcagcacactgtgaatgggagatactggtcggctgcagtgccagcatcctgcccctccagctatatccctgggtggagctgggcccccacccggcctgggtaggatgagcctcactcacagctcatccccccacggcccctcagttcacagcccccagtatggccagcgtcttggagcagctccaggtcatcggtgatgtcctcttcattcttctcagctgaggcccctccatggctccctacttagaagttggcctttagttttttaagatatgtaataggctgacatggctcaaaattgaaaagtgtagccagtgatgagaacttccttgtgaatccttccagaaatactccatgtgatctttatccccctctttttttttctttggaattgtggcatgccacggatgaaggttattattgtttacttcatttaacaacgtatcttggtgatcttccatttcagttcctaggtagtggctttattccttcctaggctgcctgtggttccagtgcaaaatgtgccttaggagcaggccctgaggactcccgcggtgctgtcacaagcagtgctgcctttgggagcccctaacctcctgctttttctctcctcagtgtgggaaaggggtttggtcagccaggggtgtcagcagccctgtcccacacccattgtctacacctaatctggtggcagggaggccacagagtgcagtgattggaactgggtgagagggttagaggcaactgggccctaggccgagtcaagtgcatggaatcctgactgtcagcaattagggatctttctgcttttgggagggaagtacttgttccacgcatctcactgaatatggcacggaacctgatctgtcccaagtgggagtttaaccaagctagcgggggcccagggccctggcccagtctgacacctacctcctctcccaccttctactcacccagaagactaggagaatctgaaagcagaggtggtgcagcgtcactagctccaggaatccagaaaaacagggataggnnnnnnnnnnnnnnnnnnnnnnnnnnnnnnnnnnnnnnnnnnnnnnnnnnnnnnnnnnnnnnnnnnnnnnnnnnnnnnnnnnnnnnnnnnnnnnnnnnnnnnnnnnnnnnnnnnnnnnnnnnnnnnnnnnnnnnnnnnnnnnnnnnnnnnnnnnnnnnnnnnnnnnnnnnnnnnnnnnnnnnnnnnnnnnnnnnnnnnnnnnnnnnnnnnnnnnnnnnnnnnnnnnnnnnnnnnnnnnnnnnnnnnnnnnnnnnnnnnnnnnnnnnnnnnnngggctggggacccctatggccactgaatctgagcccctgggggcagaggaactgagctcccagccctgtggctgccaaggatcctttttccttgagcttgcagggattgagagagagagagtcagcggccctgatgttagcgatgcagactccaggagaagggggcatgctcgcagtttagaggaagtgagcccctcttccacgttccactcccaccatcctcctgggaccccagcctgcatgccccccaaaagatgcttttgcactgattcaacaaagcctaaagatgcaaaggcctaattgaagacctgtgaatggcatgtacggtcctcagttcccagctgaggggccactcgggctccccatattcccctcagcctctccatcttccaacaggggtgtggagtgcatccatggccatgagtattgatctgtcccagcctgtgcattgctccgaggcagttctgagtggatgatgtacagatgggattcctcagctcatttgcgtggttgacgttatggctgctggttttactgccacaactcccaggcccaacctggcttaatgtctaagttttaagccaaaaaagatggggagcagagctttgtggcagggctgggggttggggtccactttagttttgtggcaggatgaaggctgcagtggttttattaatcatgattggcctggccgtagctccaggctgagagggacaggtttgtcagtggtggtcccccagatgtccctgtgcccagccctggcctgtctgccctcaggcccagcaggaggcgctaccacaggctctgactggcgtccctactccctgtaccccagatggacagaaccttcgggtctacagtcggaatatatcattctccccattttaacctgagctgcctgacacacggagggtgtgctgggtaaggggcctagggagccagggttgaatcatggatcctggggaaaggttgcagacacaggaagggttgtcacctctctgtggagccctgctgcttaccacacagcaccttctgcagagactagctctgagggtggcaggggaccccacaggccatggccactccctctctgcacctgtccgtgcctgctgtggaagcctggactgggggaggagattgctaccctgtgagcctgagggagccacgtccagctgtgacctctacctggggctttacagagagttgtttatgggtaacagacaccttgtttcagagggaatgggcatgagctggcaagtgaagcacccccacagcttatcaggaactttttctcatttttaaaccatcatgtcttcatttcacattggaataaagtgaggttttgg

SEQ ID NO: 5639 - protein, 39 aa, Homo sapien [sequence omitted]

SEQ ID NO: 5640 - DNA, 1184 bp, Homo sapien
atcttattctggctctcctttaaatagcaaaacagtagcctgggctcataatatcttgttgctctgtttaccatcatataacaaatgcttttctctgggtcattctctatccatttagggactattttggctaatagtccctaaaaccattagctcctccatatgtgccatttgtataattctttagtaaattgtattaatgggagaatctgtaagttatgtctgaactttcaggttgtcttataattgtctttttccttatgtcagatgttctatgtcataagaataaaatggttcacaccaatacaagtacttagttgtggaaagggagagtagaagataaaaatggagattttcctgtgctacaggcttagtcaagcttatggtctatttaatggttatcaaaggcaattaaatagtgttgagtgttctgcttttacctacatttcatttttcatgtacttagttacaaattgaaccctcttctatttttttcctgctcctgtttctgtttcattttagttttccttttccctgattatcatttaggcatgtaagtgacacccagtagcattgctttaattctgctggtgacagtgccaaagctttactatactctttttgttgtctgttgcttttctcttgctaatttgcttgactagataactaagaattcaggtaagcattagctctttgttcactgagaataatacaacttgcaagataattaatttggattgttctacatgtatttcgtttatttctctttaccttgttcatttattacgacattttgaattatttacatacccatatttcttctttcttttatggctcagctcactatgcttttttttaatactggtagcttcctcaaggttggaaaacaagatctgaatactatagaaaataataactatttttctgtggtcatattaaagatataatggctttggattttggggtgatttttctactgtcagtttaaaaaaaacttgtctatttgcatttgtgtgttattacttctagttaagagtatttccaaggaaagtttcatgttacttattttgtttccatgtctttttccaaaagaacttattttttatattataataaatatcagtggaaaagtaggtttcgttatatagaaattaactttaggctgggtgcagtgctcaagccta

SEQ ID NO: 5641 - protein, 35 aa, Homo sapien [sequence omitted]

SEQ ID NO: 5642 - DNA, 2457 bp, Homo sapien
agttggagttgcggcggcgggaacgattgggctgagcagaggacgacatgttgcttttcgtggaggtagcatctaaaggaactggtttaaatcctaatgccaaagtatggcaagaaattgctcctggaaatactgatgccaccccagtaactcatggaactgaaagctcttggcatgaaatagcagctacatcaggtgctcatcctgagggtaatgcagagctctcagaagatatatgtaaagaatatgaagtaatgtattcttcatcttgtgaaaccacaagaaatactacaggcattgaagaatcaactgatgggatgattttaggaccaagtcataagcgttgtattgtaattcttagagagattcctgaaacaacaccaatagaggaagtgaaaggtttgttcaaaagtgaaaactgccccaaagtgataagctgtgagtttgcacacaatagcaactggtatatcactttccagtcagacacagatgcacaacaggcttttaaatacttaagagaagaagttaaaacatttcagggcaagccaattatggcaaggataaaagccatcaatacattttttgctaagaatggttatcgattaatggattctagtatctatagtcaccccattcaaactcaagcacagtatgcctccccagtctttatgcagcctgtatataatcctcaccaacagtactcggtctatagtattgtgcctcagtcttggtctccaaatcctacaccttactttgaaacaccactggctccctttcccaatggtagttttgtgaatggctttaattcgccaggatcttataaaacaaatgctgctgctatgaatatgggtcgaccattccaaaaaaatcgtgtgaagcctcagtttaggtcatctggtggttcagaacactcaacagagggctctgtatccttgggggatggacagttgaacagatatagttcaagaaactttccagctgaacggcataaccccacagtaactgggcatcaggagcaaacttaccttcagaaggagacttccactttgcaggtggaacagaatggggactatggtaggggcaggagaactctcttcagaggtcgaagacgacgagaagatgacaggatctcaagacctcatccttcaacagctgaatcaaaggctccaacaccaaagtttgacttattagcctcaaattttccacctttacctggaagttcatcaagaatgccaggtgaactcgttttggagaataggatgtctgatgttgttaaaggtgtctacaaagaaaaggataatgaagagttgacaattagttgcccagtgcctgcagatgagcagacagaatgcacttctgcccagcaactcaatatgagtaccagttctccatgtgctgctgagcttactgcattaagcacaactcagcaagaaaaggatctaatagaagattcctctgttcagaaggatggtctcaatcagacaactataccagtttctcctccaagtactacaaagccatcgagggaaccccgaaagttaagttatgctgaagtgtgccagaagccccctaaagagccatcttcagttcttgtgcagccactacgggaacttcgctccaatgtggtgtctcccaccaaaaatgaagacaatggagctcctgagaactccgttgagaaaccacatgagaagccagaagcaagggctagtaaggattattctggcttccgaggcaatataatccccaggggagcagcaggaaaaatcagggaacagagacgccagtttagccatagggctatacctcagggagtgactcgacgtaatggcaaagagcaatatgtgccacccagatcaccaaagtaaaaaacaacaaaactattcaaaaacttcactctcttcccattaaacttgaactgtggctatattgaactgttttggaggggagggggtagccaggaaggaaacaagagaaagtacgtccatttcattatggattttggagttgtgagtgataggatcccaaaattcatctctaatgtggtttttaaatgctggaggattccaatcaatataaatatatatatatatatacacacacatatataaaaagtataatttttctatttttgtttttggttttaatttgcagagatttgctgccaggaatcaattttgagggttcagatttagcttggaagaaaaaaaagaaacatacatccttcagtataggagatgagggaatgagagaaaatattttttgaagaagcatttctgtaaaattagaaattactttttttaatctatttaaagtttggcttgaagaatgccatctctgactatatggccttgtattgcaaagcagatcagtggctggggtgcctgttgtgggtgtgagtgtgtacaagagcgattgaagccaaatctgttgtcatgttagtaaatgatttgaaaactg

SEQ ID NO: 5643 - protein, 605 aa, Homo sapien
MLLFVEVASKGTGLNPNAKVWQEIAPGNTDATPVTHGTESSWHEIAATSGAHPEGNAELSEDICKEYEVMYSSSCETTRNTTGIEESTDGMILGPSHKRCIVILREIPETTPIEEVKGLFKSENCPKVISCEFAHNSNWYITFQSDTDAQQAFKYLREEVKTFQGKPIMARIKAINTFFAKNGYRLMDSSIYSHPIQTQAQYASPVFMQPVYNPHQQYSVYSIVPQSWSPNPTPYFETPLAPFPNGSFVNGFNSPGSYKTNAAAMNMGRPFQKNRVKPQFRSSGGSEHSTEGSVSLGDGQLNRYSSRNFPAERHNPTVTGHQEQTYLQKETSTLQVEQNGDYGRGRRTLFRGRRRREDDRISRPHPSTAESKAPTPKFDLLASNFPPLPGSSSRMPGELVLENRMSDVVKGVYKEKDNEELTISCPVPADEQTECTSAQQLNMSTSSPCAAELTALSTTQQEKDLIEDSSVQKDGLNQTTIPVSPPSTTKPSREPRKLSYAEVCQKPPKEPSSVLVQPLRELRSNVVSPTKNEDNGAPENSVEKPHEKPEARASKDYSGFRGNIIPRGAAGKIREQRRQFSHRAIPQGVTRRNGKEQYVPPRSPK

SEQ ID NO: 5644 - DNA, 1479 bp, Homo sapien
ggatttccccgacaggtcccccagacattccctcaggctggctcttctacgacagccagcctccctcttctggatcagagttttaaatcccagacagaggcttgggactggatgggagagaaggtttgcgaggtgggtccctggggagtcctgttggaggcgtggggccgggaccgcacagggaagtcccgaggcccctctagccccagaaccagagaaggccttggagacttccctgctgtggcccgaggctcaggaagttttggagtttgggtctgcttagggcttcgagcagccttgcactgagaactctggtagggacctcgagtaatccactcccttttggggactgacgtgaggctcccggtggggaaggagactgacctctcggttcacgtgtcttgccatagagccactctcctgagtgggtttttctcctgatcgtttgggccaagtgacttctctctgaacctcatgtttctcttctgggataataaatggtcaccctttcaaggggttgttttggaagatattgtgaacaatggtaaataagggcttaattaatgagggtaagccctcagtaaattgtcactgtgtgttcatttcttcctctgtgtggatcgtgaccgagagcccttccccctagcctcctcctggtatgggtacccaaaacctaggtgagcagggatctctcccaggggcagagagcttgtgtactctgggtgctagagggctaaaatataaccagtcaacaccacgttgcccatttctggtacttccggtagcagcctgagtctcaattatcttgcccagatgatctgaactctgacctctagcctgtttcagcataggcagagagcttgagtaggtgagtttgcattcctcatagcagctggctgagcctagtctggacttctctttgacctgtaacctacaggcccacaggcccaaggcaaccacaggttgcttccagggttaccacacaggtggtttctcatttctaatgctaggttttagataattgttgtaagtgaggggccctggcaggcaggatgacatcctgccaataggagttttctgtcactttcccacagagccctggctactacatactcttgctcaatttcgccagtaattgcgtcaatgtgttcatatcaagtttgggaagaacatcttggaattggtcagacgtgaactgtggtaataatgggggcttgtttttttaagcagataattaaattcctttgcatttgatgattattctgggaagcagactagtcccataaaatgaaatggactctgccttgctgctaagtgtctgacttgagacatgctatcgagtttctcaaaatctcttccttgtgtaaaatgtggttgtcgatgattaccttacaggggtttttttaagactaaatgagatcgtgtacattaaatgcaggcactcaggctgggcatggtggctcacgcctgtaatcctag

SEQ ID NO: 5645 - protein, 101 aa, Homo sapien [sequence omitted]

SEQ ID NO: 5646 - DNA, 381 bp, Homo sapien
tgcaggcctctgcccttaaggcctggggcgggaaaaaggagaaccttaaggctgcgcaggaggagtatgtcaaacgagccctggcccacagccttgcctgtcaaggaaagtaccctccgagcggtcaggctgggggtgctgccaacgagtccctttttgtctctaaccacgcctattaaacggaggtgttcccagggtgcccccaacacttcaggccctgccccctccccctttttaaaaggaggccgcctcctcgggggtccaggctgggttggccgcgctcttttttccctcgtgacagtggtgtgtggtgttgtctgtgaatgctaagtccctccccccttccggccccctgcccaataaacagcttttttagggggg

SEQ ID NO: 5647 - protein, 87 aa, Homo sapien
MSNEPWPTALPVKESTLRAVRLGVLPTSPFLSLTTPIKRRCSQGAPNTSGPAPSPFLKGGRLLGGPGWVGRALFSLVTVVCGVVCEC

SEQ ID NO: 5648 - DNA, 933 bp, Homo sapien
ggggagagtcaaaacgccatacttgtttggctcctctttttaatttgcgggtttattgggcttgttttctgttttctagggagtaggttagtggaaaagaaaaagggccgaattcactcccacgacctctacagccgcccctgaggggaagcggtcagcgtaagtcccggatccccgctccggagccgcctcgtgggagcggggcaaggagatccaggaggggtctcgaatctgccatggcgaaccggcgagtggggcgaggctgctgggaagtgagcccgaccgagcggaggccgcccgcggggctgcggggccccgcggccgaggaggaggcgtcttccccgccggtcctgtctctcagccacttctgcaggtctcctttcctttgcttcggggacgttctcctgggagcctcacggacgctgtctctggccctagacaaccctaacgaggaggtggcagaagtgaagatctcccacttcccggccgcggacctgggcttcagtgtgtcgcagcgctgtttcgtgttgcagcctaaagagaaaattgttatttctgttaactggacaccactcaaagaaggccgagtaagagagattatgacatttcttgtaaatgatgttctgaaacaccaagctatattactaggaaatgcagaagagcagaaaaagaaaaagaggagtctttgggataccattaaaaagaagaaaatttcagcctctacaagtcacaacagaagggtttcaaatattcagaatgttaataaaacatttagtgtttcccaaaaagttgacagagttaggagcccactacaagcttgtgaaaacttggctatgaatgaaggcggtcccccaacagaaaacaattctttaatacttgaagaaaataaaatacccatatcactattagcctgctttcaatgattgccatggt

SEQ ID NO: 5649 - protein, 228 aa, Homo sapien
MANRRVGRGCWEVSPTERRPPAGLRGPAAEEEASSPPVLSLSHFCRSPFLCFGDVLLGASRTLSLALDNPNEEVAEVKISHFPAADLGFSVSQRCFVLQPKEKIVISVNWTPLKEGRVREIMTFLVNDVLKHQAILLGNAEEQKKKKRSLWDTIKKKKISASTSHNRRVSNIQNVNKTFSVSQKVDRVRSPLQACENLAMNEGGPPTENNSLILEENKIPISLLACFQ

SEQ ID NO: 5650 - DNA, 1582 bp, Homo sapien
  Unsure 146-168: Unknown base
gtgtttgtagttctgtccagctcacattttatcttcatactttgagtagcctccttccatgaatggatcatccagtggccgcacttaggttctcctatgaagatttttgttgtattgtacctcagaaccatctccatattctctannnnnnnnnnnnnnnnnnnnnnnattgaatagaagtatttactagatgaggaggaaaaccctaaaacaaaacatgaacataaaatatttttaaaaggaagacatacaaacagacactataaccaaataagatgacagaattaaggccttatgccacagccagagttgaaaaatgcagaaaaaaagtttaaaaacaaggaattaaagccaaacctaacttttatcaaaataaatgtaaaagtgatgaaagaatctgttaagatatcagattgtaatataaaagatactagaaacaaatgccaatagaacacttaagtacattttatatattcatccattagaatatatagctgtcagaatgatagaagaattacatatgtgtgcaaaagtttttgtatccatgtggaaaacacaggaagctaatagtactgtttttctctggagtgggtgtaagggtagagacttaactctttacatccttatggcagccttcgaataccttttaactcccagttcccttaactgggggtgtgtatcctagaatcctcgacccattagaaagtatattgtagacatcatactctttaccctttaacactacacatgcacttcataagaacaagcatgctgtcttacccaagtacagctatcaagttcagaaatttaacattgccataatactttacagtccatatttcaatttcatttgctgttttattggtaatttttttcagctccacgatccagcctaggatcatatgttgtattgccataaccctctaatctggagcagttcctcagcttttctttgttttttataatagtaatatatttgaaaaatacaggacagctaaaggatagagtatccttctatttgggtttttctgatgtttcctcatggttagattggggtagtgcagtgagggttgaaatgctgtaagtgatatgtattgcaggtatacatccagatgcacagaatgtccatttgtcccttattggtgatgctaattttgatcacttgggtaagatgtccagtttctccagtgtatcgttattgtttttccttttgcaattagtgggtaatttgtgaggagaaactttgagaccttgttgacaattctgttcctcatcaaatctacccctcctaggtttagcatcctttgacgattcttgtctgaataaatttttactaggatgtttccaaaattgtgattgttctaactccattattatttctgtattaattagtcatcattctactgtaaggaagaggtttccctttatcatcaacttcgagtaagtacttttttctgagccatttgaatattccttactagatgtggtgcctctttaccccaattacttaagtttgtatttccaaagaacaagggtgttttcctgcatagccatagcacaattaccaaaatcagaaaattaa

SEQ ID NO: 5651 - protein, 60 aa, Homo sapien [sequence omitted]

SEQ ID NO: 5652 - DNA, 898 bp, Homo sapien
  Unsure 167-292: Unknown base
  Unsure 670-695: Unknown base
gcatgagccaccatgcctggccggatgtgaattatcttaaaaattttcaggtaattctaatgggccaaggttgagaacccctgctctgggcccatccgagcaccaggctgtcacaaacgcatgcatgcactcacgcccgtgggcttggggggcttcggaaatgtgcnnnnnnnnnnnnnnnnnnnnnnnnnnnnnnnnnnnnnnnnnnnnnnnnnnnnnnnnnnnnnnnnnnnnnnnnnnnnnnnnnnnnnnnnnnnnnnnnnnnnnnnnnnnnnnnnnnnnnnnnnnnnnncttctggttttcatgatgacctggggcccaggcatactacacttgtgctgttcaggggccagtcctgcaccaggagcccatcagccacagctccgccgagaagcactgatatgcagagctaagcagctttgtttccacgtggatcctgcgtaggttttcttggtccatccgtagacaccgcactcctgcagaggatcttctcgggatgccccactgtctctgttttccctcttcactgaacactcagtcggggctcgccatgatgcctctgtgtctgctggcttctcccccattggaacagccttcttggcacgccacactgctagctgctgggcactgtgctttctgcctttaccgttctgccgtgatgttgccaannnnnnnnnnnnnnnnnnnnnnnnnnaggctgggcactggctcatgcctgtattccagcagttcgagatcagctgggcaacatgccccaactggaccctaggcaaaagtgagtggcactcctctgccaggactccaggcaagccccggcatcttcttgctgccgtcccagacaacagaagttaccagatgaacagacttggatgggtaatgggggtggagagcatggga

SEQ ID NO: 5653 - protein, 13 aa, Homo sapien
MNRLGWVMGVESM

SEQ ID NO: 5654 - DNA, 772 bp, Homo sapien
cagcgttccgccgcgcgaggggccgggagctggggcggaaagcggaaccgagagcgctttccgccgtgcggcgatgaacctccgggaaagacgctgggaggcccagggatgcccggcgcaactggacgctcatcgggagtcacggggtcggccctcaggggaacggggactatccgtatcaactcggtgtttgttcgttttcttcaccttgcggtttgtgccctctccacatttcctctctgtgtctaccattctcctgggggacgtggcaaaccgtgagccgctgcgtttgagttttgggaaaccctgcggaaacgccctggcgccggtggttttgcgcgtcctaccctgtgtcacctcagggttatgatctggcccctggcaaggctccccaagtgtgatgcctccccccgtccagatgactgcattttgaggatggagtcagtctggtggcattttttgcttaagtaaacaattgtaaccgtttgtgtagcatcagcgttcaacagctgcctgtgcaaatcgaaaaaagcgaaactttggaaactaggaagcatcagatgaataattctgaagacttgatgtcaacgggagtatcttgtttttaaacttttggttttctgttctggagacaaacagttcatatgcactaaagaaaaaagtgtcattatttcagatgctcattgccagcaaagagaactgtattgcaagtcaggcttcactcccagtattttctgaatgtttcaataaaatgaaatatatacgtcaaaaa

SEQ ID NO: 5655 - protein, 122 aa, Homo sapien [sequence omitted]

SEQ ID NO: 5656 - DNA, 407 bp, Homo sapien
ccctgtctcaaaaaaaaaaaaaatacttgggggaaacaataaaaataaccatagaaaatataagttaatataattatatagtattcacacttttaagtattataaataatatagagatgatttatacgggaagatgtgcataggttatatgcaaatactacaccattttatatcaggtacttgagcatcctgggatttgagtatctatgggggtcctagaaccaatctccctcaggtaccgagggactatactataccttgttcttgaacgagatgatttgacattttaaatagatgttcccctagattaatctgtaaatataatacatttccaaccagaatgctaacacattaatttttttttttaacgatctggaaaaaataaaaatacataggaaaatctgaaa

SEQ ID NO: 5657 - protein, 23 aa, Homo sapien
PVSKKKKILGGNNKNNHRKYKLI

SEQ ID NO: 5658 - DNA, 5279 bp, Homo sapien
ggcagcaaatcatgcaagcgaaatctgtctcagatgtatgagatcattctttttactgcttctaagaaggtgtatgcagacaagttactgaacatactagaccctaaaaagcaactggtcaggcaccggcttttccgtgaacattgtgtttgtgtacaaggaaactatataaaggacttaaatattcttggaagagatctttcaaaaactataataattgacaactcaccacaagcctttgcatatcagctttctaatggaatccctatagaaagttggtttatggataaaaatgacaatgaactcctaaaattgattccattcctggagaagcttgtagaactgaatgaagatgttcgaccacacatcagagacagatttcgcttgcatgatttgctgcccccagattaagtacaaagacttgtcaaatcactgaagggggagagaatgcaggacccttttggactaagacaaaaacattgccattactgttgaaattttgcatttttgtaccccgtcttgcttttcttatctttggtgcccaataataattaagggttacagaaagagactttatctatctcagatcgaatacatatagtaggtaggctaaaacagaagagtctttagaactagtgcaactccagtgaaattttttatgtacaggacatctgcagtttataaagaattctgtttctgccaccagcagtttgacctgtagtcacacaggattttatgataataacagagatgaaaatggacttttattttctctctgtttggtgctctaagtgggtttgtagccacttttctgttactttatgattctcatttcaacaggaatggccagtaaaagttgttttatttttcctgttaaggtttataacctttttacatttttgacctgtattagattagaatttcattatgcattccttttagttgaggcgcttcatagttttctggagatagtcaatttttagttttttattatacatttgaatggccgttttcctgctttgtctgcctgcacattgtatatttgtttaaaaatattctctacttttagtctatgtaagtttcatttagaaagacatgcatttatattttgtttctgtaatattctactgtaggtgaaatcttttcaaaaatcaagagactgggtagataagaatatatgaatgactaatatacaaaagatttaaaccattgtgatggcgtatattctcaaatggtaatatcttgcaatggcacacagatttaatggataaaggtatacctcagacttcactgtgctcacaaatctttgaggagaaagtttggtcacctgtttggcttgatttagttactgctgcctttggttttctccaggaatgaagtattcagcacagtgactcagtatttttagttattttgcatgggctggtagtacctctgttatgctctcagttacaatcaatttaaaactgtataacagtcttggtacctaacagtagctatgcataatcctgtggcacagtacactcccaagccaccaatgcagttaatatgctctcatagtggtttttctatgctatatgaaaatagtcttcaagccttggttctctaatgcagctaccacaagaggttgatatttttatagtggcgtgtaatctccttttcgggaggctttttatggaaggtagaatttgtaaaagttcgtatgctttgcctctcaactgcattaacatgccacaggctcagactgtttttgtgtaaaggatgtcaaagaacggcactttttctaaagagaagtttgatattttgtatgcttgttaagaaagtacagtattggaaattaaaggtggacaactgataattgaggagtatgtcaattaattttttatgtatattacctgtttacttgtacaacttactgtacaaattacatgcagcttcattttcaaatgaatccttaaaataaggaaatctttttaggaaaacatttaatttttgtatttttgattttaaaggcatgagttatgtcaattttcagtgtattaatgaagattttaacttttcatcaggttgagtgttttcttactatattatctgttgtgtatgtagttagcatattgtgtcactgaactgtttaaaaatctagcatgtagagcaagcctgttttgtggaaaatccttattcattaaaaaaataatcatggcagattttctgcaaaaaaaaaacaaaagcatttgcaattcagaatactgatttttttaattttatttaaagaaaggtattttgcttgcaggaaaaaaatactacagattcattttaatgagaatctttgaaatgtatttatctttagggcatctgggcatctttatgctgtttgtcttctgtctttcttgaaataaaatgtacatacgttacctttacatatgctcttgctcaaaattgtgaacctagttacattttctccctgctcccttcctttttatgctcaaacagcgaaacccaaaacttaaaagatctgaactttcagcatgcattctgattgctgaaagatttcctgatttagtgcattctcaaaagggctttcccataatctaaagggaaatgtaagcacctatactcttgtgcctgtgggcacttcaataataaaaaccaactttttaaactaatcatcttttatcaatgataaagttgttttcagtcccacactaggagagttcctttaagtcagctgatcaagcataagatacttccgtaaagaaataaactaagaaaattttttatggcttgagaaaattccttgaggccaaattaatatatttttctttgttattttatttgagtcattttaaatttgttaatacaaaatttaagataatttacagagacaatttatccagcttccttctaccttaatacaatgttttgtcttcccattatcctctcttttctttatctgttggtagatgtaaaaaacttccatttagttaatcggaggtgtgtattttttaaattgaaatgtgcccagccccttcagctcacacaggaaacatgaactcttaaaaaactgactagtaaatgcaggagaggtggatacctgatgagacacagcgaaagtgacctgtatacacattacaactctggagtacatattaaagtcgtgctatttccagtggtaaatgtctgacttttaagacattcttttaaatatttgtatcattgttaggatgttttaatcagttgttttttaattccatgtaatatatgtagccctcatcagatttatatcaccatatttctccttgtgtcctaagagaattgatgacaattcgtaaccataaattgttttatattagctagtatgtatatttatttttacccaatggctttatctgtttcccaaaatttgtttgggatttgttgaaagcattgtgtaacttctataaacggctattttcttgtaactgtcagtgaaatgaatgtgtacattgttttcttgtatttctctgggttgttttttgtttttttttccaagggttaacatagaatgtttttttttaaaaattatctttggccaatgactttttcatctagatcttactttcattcaaccttctaaagaagttcgtttctcattgttttgttctgtcaacttgcctgaaaaacagagacttcatctcatcaatgaagaaagcatttcattattcctacagatctttcctgcgagcacagaattcttcataaggaccagatctcttccatgtctgtgtcaatcacataaagctaaaatgtaaaggacattgaagcctttatttaattgtactaatatgatggtgttatatactacatcattagctagttaaggttttctgacctgacttctctttgtcttcctaggtatttatttgttatcttttaatcttgtgtatctaaattaacttagttaatagttacccaccgaataactatgccaagcaactagtaaagaatgtttattttatttccccttataggggaagagtggactgggaacaaaaatgtatgggccaaaaggccttagggttgtcattcattgactttcttattcctctcatgagctataattgagtatagtatttttttagtgctgatgtcattacttctcatgtcttcccctgagttgaaagcctacgacaaacatgtataaaatacatttaagaattttcagaatatgaaccacaaaactcagtatcttatatttaaatgctacttaagttattattggaatccaagtctcactaactagggtacatttttataaaatgtttctctgtatcttgaattgaaattacttgcccagaggcaagagttctggggatataacatgatttgagatcttttttaaaaaagggtggggcggcgggggagagagcgacaagtttatactagtttatgcttttgatattagtattttaagatacatcagttgatcccgaaacctgaccattagaattactctgaggagcttttaaaatagattcctggagcctacccctggaaaattgtctcgctggatctcgagaggggcctgagagttctggcttttttttttggttgggttggtttggttttgttttgttttgttttttctttaaagctctcctggtgattctaatagccagtattgggtaatcaatgttttagctaaatgtgacactggtttgagagtaggcaacaaaattaaagttcaccagacatctctttgtggtagagtttttttttttttaaactgggaccagatttcacagagcttattcaagatacatggaggaataataaagaagattaaggctactgctcattatcatttttgtctttcatattttttaagggtttgcatttctaggacttggaatagttgaccatatacatagctaaaggacatgtccctgaatgagaccattatatatattatctgtaaaatatttcactatttttttattttataaatctttgtagaaataagcaatgaaatactactttcatcttttgaaatgggatttttcaaggcagtgtccttttggcattaaggtaggggggagttaatattctctctgccttgtttccacgtgaatcaatattaaagtcatggacattttaaaatctcaatttaatttcttcttatttactatgcagtatagccgtgaacaagtaatgtagatttagttttctcatcttcaaatgccctgatcaccctacctcacagggttgttgtggggataaataaaacttttatggaagcaaaa

SEQ ID NO: 5659 - protein, 136 aa, Homo sapien
GSKSCKRNLSQMYEIILFTASKKVYADKLLNILDPKKQLVRHRLFREHCVCVQGNYIKDLNILGRDLSKTIIIDNSPQAFAYQLSNGIPIESWFMDKNDNELLKLIPFLEKLVELNEDVRPHIRDRFRLHDLLPPD

SEQ ID NO: 5660 - DNA, 2591 bp, Rattus norvegicus
cgtccctctttctccaccccgccgagcctaaactagtgacggggagggagacgggatagtgtttctgtttccgtggtctttgaatccacaacctctagtctgaacacagagaacacaaatttgtcgattacttcaggaagcccagggggaaccgcgccccgctgaagggctcggggaaggcgcgctcccgcgtcccgccccctcctcccccagcactcacactgtggtagcggcggagggcggagggatccggaggcggcggagggagacgtcattgcagggttgtttgtcagtctcggcggcggcggcggcggcggcggcggcggcggcgatccacagtgattcggccgcgccgccgggggtgggggggctgcgcgggacttttttttttttcagactgaccgcggggcagctgcggagcatgtcgaccccggcccggaggaggctcatgcgggatttcaagcggttacaagaggacccacctgtgggtgtcagtggcgcaccatctgaaaacaacatcatgcagtggaatgcagttatatttggaccagaagggacaccttttgaagatggtacttttaaactagtaatagaattttctgaagaatatccaaataaaccaccaactgttaggtttttatccaaaatgtttcatccaaatgtgtatgctgatggtagcatatgtttagatatccttcagaatcgatggagtccaacatatgatgtatcttctatcttaacatcaattcagtctctgctggatgaaccgaatcctaacagtccagccaatagccaggcagcacagctttatcaggaaaacaaacgagaatatgagaaaagagtttcggccattgttgaacaaagctggaatgattcataatagacaactggtctgttaatctttttcatcattgttgtgtataatttacctctcattagaaaggctaacaaattttaagtgccacaggttttaaggattctgcagaaaaaaaagaaaaaagtccttcagtttagaacctacaaaagcttgtgtatcttgattaatgtactttttattgcatggtgtgaactaagttattgctgcataaatttgtaatatatcctgtttgtatttttttccaagtgtataatgttggtgtggagttttcatgacagaatatacacattttgtaaatctgtacttttttcaaatattgaatgccttatttttgaattctttagatttttaaattggagaaaagcacttaaagttttttatatatgaatattacatgtaaagctgttaaaatacataacttcagtgcaagagactttgtcacttatttccttatgtgtgtaggaggggttaataagtctctagctctccatctattgatagtttcatttacaatttcaaaagaacattcttatattttatcaaggaagtcttcaaatttgattctaaatagcgattataatctccaactttattttgaatgtacctctattagtttcaattgagtaattctagacataactggtttgactctgtccaactctgtatttaggccatttgttacagtttcttcatgcattacttactgttaaaactgtaccttttgcgatttcacagttggcacttctgccatgagcagagaactgatgcgacttgttttgctgcttggtagcactttaaaaaattttttgattaatgaagaaagtaaaaccataaacattgccaaaaattcatgccccagtattagcaatgaattagttgaattggtttgagaaaggcacatattggagggaaatcttggtgtaacttaaatatttgaaaattacctttaatgcaatgcatatctgtttattctgggaaatgttttaatgccagggcctgctgagttgcttcttcttgtggagattttttttttaatctcctgagttgtataaaagttgtactgcatcttagtttactggataaatttaaaacacagtattgtagaaagctaatacaaaactatcctatgccttcaaatagtatagaaaatggaaaatatacaagtaaattctgttgaaccacctgtgtagtctctctagtagttaaaacagctattttagtaaccccaagagtttcttctcatatccataaaattggattacagtatggcaatatctacagcttctattcattatgcaacgtttaacattgattggataaatgcttataggctgggccaggtggctcccacctgtagtcccagcactttgggaggcaaaggcgggaggatcacttgaggccaggactttgagaccagccagggcaacataataagacttttctctactttaaattttttaaaaaattagttgggcatagtggcacttgcctgtagtctcagctacttaggaggctgaggtggcagaatagcttatgcctaggaggttgaggctgcagtgagctgtgattatgccattgcactccagcctgggtgacagagcaataccctgtctttaaaaataaaagctattacttggcaaaaaattccgcactatataattcgcacacattaattagggtttatgtaccatacaaaaaaaaattaattagggct

SEQ ID NO: 5661 - protein, 152 aa, Rattus norvegicus
MSTPARRRLMRDFKRLQEDPPVGVSGAPSENNIMQWNAVIFGPEGTPFEDGTFKLVIEFSEEYPNKPPTVRFLSKMFHPNVYADGSICLDILQNRWSPTYDVSSILTSIQSLLDEPNPNSPANSQAAQLYQENKREYEKRVSAIVEQSWNDS

SEQ ID NO: 5662 - DNA, 706 bp, Homo sapien
  Unsure 257-280: Unknown base
gcggccgggagagtagcagtgccttggaccccaggtgagctggcctcctgtcgcaggccttgcgccgggagtgggcagatgatcaggtagatcagagggtccgttgggctggcctgcgcgcacgccgcagggctggaaggaggtagggacgatagcagggcgggggcggtgagaccagcgcccagattggggctagtgtgctgacctgctcccttttaccagctcgggctagcgcttccggctcgatcggtccaacnnnnnnnnnnnnnnnnnnnnnnnnactgcttctcacggctgtttcccttctccgcccagctctcctccccctttctctctaaggatggcccagaaggagaactcctacccctggccctacggccgacagacggtaaggcccttccctccgtccctgcgcccccatgaccccgcatggcgagttcctgctgggaaacttgagatcctgcaatgagcaatcctttaagcactttcttccccgttatgctccaaagtacgggtcccaagtttgacgacagaacccgctctggtcatttgtagccacatcctgtcaggtgctgccaacgtgaatctgaccagccagtgactcccagctggtgaggacctctgcagggctcgtcacatacaaatgatatctgggactgagcaggcagggctggccttcagcattgattcccaacccatatcctga

SEQ ID NO: 5663 - protein, 20 aa, Homo sapien
MISGTEQAGLAFSIDSQPIS

SEQ ID NO: 5664 - DNA, 752 bp, Homo sapien
  Unsure 115-255: Unknown base
ccactgtgcctggtcttgctggtgatattttgaagaaacatattcttgtacattgatggtgggacaccattctcatgggggggcaattggcatacctaacaaaattagaaatggnnnnnnnnnnnnnnnnnnnnnnnnnnnnnnnnnnnnnnnnnnnnnnnnnnnnnnnnnnnnnnnnnnnnnnnnnnnnnnnnnnnnnnnnnnnnnnnnnnnnnnnnnnnnnnnnnnnnnnnnnnnnnnnnnnnnnnnnnnnnnttgcggggggaaatgtcctcagacccagtaattccacccctaggaatccagcttacacacacaagaaagaaaagataaatgtacaaggttagtcactgcacagtgagacagcaaaagattagaaagaacccaagtgattattgatctgggttttattcctttatagcccaaccatatgatggaatactataatgttgtaaaaatgggttaagagttctttatgaattggtgtggaaacatcgccaagatatgaaagccaaatgcagaaaaatatatgtggtatgctattatctatgtgaaaaagacattactattctctggaaggataaacacaaatttgagaatggtggatatctggggtgagaggtatccttttcactgttctttaaaagttttgatattttggtgtttgcctattcaaaaaaatggttaaaatcagttgccaccaattaaaaattaggagaatgcatataaagaactgaatttcctgttaaaaa

SEQ ID NO: 5665 - protein, 90 aa, Homo sapien
  unsure 14: unknown amino acid
  unsure 15: unknown amino acid
  unsure 16: unknown amino acid
  unsure 17: unknown amino acid
  unsure 18: unknown amino acid
  unsure 19: unknown amino acid
  unsure 20: unknown amino acid
  unsure 21: unknown amino acid
  unsure 22: unknown amino acid
  unsure 23: unknown amino acid
  unsure 24: unknown amino acid
  unsure 25: unknown amino acid
  unsure 26: unknown amino acid
  unsure 27: unknown amino acid
  unsure 28: unknown amino acid
  unsure 29: unknown amino acid
  unsure 30: unknown amino acid
  unsure 31: unknown amino acid
  unsure 32: unknown amino acid
  unsure 33: unknown amino acid
  unsure 34: unknown amino acid
  unsure 35: unknown amino acid
  unsure 36: unknown amino acid
  unsure 37: unknown amino acid
  unsure 38: unknown amino acid
  unsure 39: unknown amino acid
  unsure 40: unknown amino acid
  unsure 41: unknown amino acid
  unsure 42: unknown amino acid
  unsure 43: unknown amino acid
  unsure 44: unknown amino acid
  unsure 45: unknown amino acid
  unsure 46: unknown amino acid
  unsure 47: unknown amino acid
  unsure 48: unknown amino acid
  unsure 49: unknown amino acid
  unsure 50: unknown amino acid
  unsure 51: unknown amino acid
  unsure 52: unknown amino acid
  unsure 53: unknown amino acid
  unsure 54: unknown amino acid
  unsure 55: unknown amino acid
  unsure 56: unknown amino acid
  unsure 57: unknown amino acid
  unsure 58: unknown amino acid
  unsure 59: unknown amino acid
  unsure 60: unknown amino acid
  unsure 61: unknown amino acid
MGGQLAYLTKLEMXXXXXXXXXXXXXXXXXXXXXXXXXXXXXXXXXXXXXXXXXXXXXXXXAGGNVLRPSNSTPRNPAYTHKKEKINVQG

SEQ ID NO: 5666 - DNA, 1021 bp, Homo sapien
cctgatagagtccttagaagccttcacaaagcagacgatctttgagctgtgtctggaagtaagactgtgtctttcaggctgacaagagggggaaagccgagggagaaagtgtttatctgcaccactcagggctcattcgcttgagtcttacacggcttttgtggtcggagatgttcttgcagattgaaatgaaaactgcttcataagcacaaataatgttttcaatgatgtcagctgttcttcatgctttgggggtgattgagagaggcaagtaggtttgaacgagaagctaggggtgcagatatgcaggaaaatatatcagagaaatataaacataagcgttaagggcatctgtttagactgtttctcaagtctcttagtcctggaacagccaattccatggagcatgccaccaggagttgcaacttatagcctaggtggctcttgggaggtgaacgtctttgtggctatgtgagcagcatggaattgtctacgccttttgattggaatgcactcccccttggtgaaagggaatctatgtcttttttctacatgcagttatataacacttagaatcaccattctttcccataaggcttgtacataagccctaccttttgtccctaaggaaggagttggtgaaagtcggcctgtgagtaacattggaattaggcagtagaatttgaagaaatggtagcaacagacagccctctgctcccttaaggctttctttgcctgattattgattttgtagtagatcaagggggatgccatgcagagaaagaccatcaatcctgggttttaggttcagggtcagttaccagcctcaggatcccggtcagttccgtgctctgtaaaaccgatacctgctttacctaccttccaaggttattttgaaaaggaagtaagattatgcatgtaataaatatcttatgaaagtaccttgaagcgttcaattatttcacaaatgcatggtggtggtgttattagtatttattaaactgatattgtgaaaaattgt

SEQ ID NO: 5667 - protein, 26 aa, Homo sapien
LIESLEAFTKQTIFELCLEVRLCLSG

SEQ ID NO: 5668 - DNA, 2711 bp, Homo sapien
  Unsure 1074: Unknown base
  Unsure 1078: Unknown base
  Unsure 1084: Unknown base
  Unsure 1091-1092: Unknown base
  Unsure 1171: Unknown base
  Unsure 2062-2257: Unknown base
tacgaaccctgagggcctacttggctaggtgctcacggtctggtagaggagacaaagatacaaaaacagagtcacagtgtgtaatgagtgccatgggagcataaaaacagcatgcgcagggcttgtgacactcaaccgccaccccgcgcagcttccaatggaggcaaagtcacaattgaccccaatagacaggcttgacagagttagttggatgggaggcaggtggggcagcctgtccagaggcgcagacctgtgtgtgtggggaaggggtgatgggagatgcagactcggcagtgcttgttaacagaggtgtgaatgccgcgccttgcttgcctgaagatttccacccaggatcctgacaaaagtcagatgtgcacttcagaaaggccaggcgggctgcagtgaagagaatgactcgagggggtgcgggtgtgggacaggccatcgaggcaaggaggccaaatggaaagctttggtcaggacacaggtggtgatggattcgggggagaaatgggggagggtgacgcaggcagagtggccaggttatcaagtggcatcattcaccacaaaatgcagccttatggctgacgagctaccttactgagcatattcctgcctctacaccagagactcactctgtggtccggtgtcacctcgattctaaattccctgcttcctggtgaatgatgctatcacactttagaaacctggccaataaatgctttgaaatttaaggatagctatcctgaaaaaatttaatataacctaaattgatagtctaatgacatcagtattcagaagaggcattctatttcagcaagtggttttcagaaaaaaaaaaaaataagtaacctgagtttttctcctgccactctcccctcttgcttttatgctgcaaaaagagcttgtggcttgcctgacacaccgtgttgttctctgccttcgaagatctagctccctcagcctccccacgttgtccacctctccaataccattgctccactgggaagctggcccggaggtgctctaccacgttcatctctcgcagcccagggctgtctttaacgttacagngacncagatntcaaagnnttgcaatttatttggctttcattaatttgccggaagcaagggagggtagatacaaagtactcctctaccctgttatttnccttggctgttaaaatgtaaagaagactgatgtaagaatctctgccttccaccagtcataaccatggtatgcacagagcttatgaatcatcttctaaattcacagctagttttaaaatttagcttccaggctagatctgcaggaaatgattgggagatcgtaagtgctatggagtgaatatgaagttacttaccagatcccataaagttagctcagggaatcctgaggaaggtgtcactcagaaagctgctttcaaagctgagtcagacctgcatggtgtttattacctccattgtgttaccatgccaaacatataaatagcttcaaagtgagttcagattaaaacacagaaaaatctttggatatattcacaggccagtgggggtcatgtaacaagtcagcaaggaaaataaaagatatttgaggtacagcctcaactttttaagatggatcttgaataaaaaggtctaatgaaatattttatggtattgctctctgggatttaaaaaaacaaagccaaaccaaaaacgaggcactggaacaatgtttagatagatcacgggtgttttccagtatgcattttttagtgcacttacttaactgagaccctctcatatgaaactggaatgtcaccaccatgtgataaagcgtagactagctgtgacctaatacgtactgatcatgactaacgcagaagtccaggtcactgcggttgtatttcctgtggcctcaatgttctggggttagggttaacagggataattcatttctgtgttcaagtctctaattcttccatcatgtaaactgtaagtgggagcagactggattcagcattgctacaagagaaaaacaacaaataggaacaccaccaacaccatgtgttgggagccnnnnnnnnnnnnnnnnnnnnnnnnnnnnnnnnnnnnnnnnnnnnnnnnnnnnnnnnnnnnnnnnnnnnnnnnnnnnnnnnnnnnnnnnnnnnnnnnnnnnnnnnnnnnnnnnnnnnnnnnnnnnnnnnnnnnnnnnnnnnnnnnnnnnnnnnnnnnnnnnnnnnnnnnnnnnnnnnnnnnnnnnnnnnnnnnnnnnacttttcataaataaatgactcgtgttggaggtgtttgtatccttggggccactcagttttattcagccagctttccttggttgtggttttaatgtgttagggaagaatgaatgtattccccacagctgggcatctttgtgctggatcacctggccacagctcatgaatagtgcagattatcacaccccacccccatgactccagcaaatgtgctgtgggtataggagagtatattcaaaaaaggcaattaacaaagcaactgtcccaactaccaagaaaaacaaatgtggcataacccatgatagaaccctcttttttccttattagacatgaacagaagctcattaatgccgtccagtaagttcaagccgcataacttacatacactgtcaggacccagaaagaaacctgttgtcttgtgatgttattgttgcttggttgacctcatcatgt

SEQ ID NO: 5669 - protein, 33 aa, Homo sapien [sequence omitted]

SEQ ID NO: 5670 - DNA, 1574 bp, Homo sapien
caattcctaaccttttttaaagtttcctggtctccactggacacagagctttggagacggaggatcccagagggcagtctcagttgcaatcagtgtgtgcccagcctgggcagacaggaaattcctcggatacattattttttctttctttcatagctgtgtctcagaaaggacccatttgtggctctttttcacctcaaaataagatcgatggtatcttgtaaaatgagggtagtgccacttcttagtatttttgaaagctgttttagatttttattttgttattttgccttttctagccatctaaattgactcttccaatataggtctcagaaatccaatatttggagtacaatttcttttaatccagattacacctgccttacaaagcaccccctccttgttcccctctgtttcctctactcagttgggggagaaactcacagctcctccgggatacatatgtgccctcagcagcagctcccaggtgaagttaccagacccctgggcttctccccagctttttctgagttgagtcagacatgtagagtttgggtcacacaggcaagaggaattttccctcggccttactgacaaggacaccaacctagggtgcaaacagatggactatggttcaaggacactggaattgaggagctgatcaaggctctcttcagccttgctctgtccctgcctcttatcagagcacaggtagacacacgggcatagccagcccactcctactgtcacaggcgccccaccattcaaccttccgggaggtcagggaccttctatatgaggcgagtgggtctcagtctgcttgaatggtgatgagattctgctggatctcagcacgctgcaggtgtcttttgagagcattcagtaggacatggtgatccctatttcagcctctaagatgactggtattctatctgaaatgcagagattaagccaaatacctgatgtattgtgaaagccactgattttaagaatggagagaaagggattttttactgcatccctctgtatgaatatgaaatcagagaccagggcatgatgttgctaggattagagcctctcagtctggcctcttcacccaagtgcaagaactcagtctcttactgttcaaagaatcttaacagttgaattatggagggaaattcccttttgccccaagcatttctatatttaaagcaatatcccaggagaatatgttagacttaggatgataccttcagccacttgaagaagaaatagaaggcgctcattccaatatagtctttatttcccattcagatacaggttgagcatccctaatctgaacagttaaaacccccaaatgccccaaaatccaaaccttcctgaacgctatgacaccatgagtggaaaattccacacctaacaaacacatttgctttcttatggttcaatgtacacaaactgttttatatagaaaatgatttcaaatatcataaaattaccttcaggctatgtgtataaagtatatatgagccataaatgaattttgtgtttagactttgtgtccatccccaagatctctcattttatatata

SEQ ID NO: 5671 - protein, 51 aa, Homo sapien
QFLTFFKVSWSPLDTELWRRRIPEGSLSCNQCVPSLGRQEIPRIHYFFFLS

SEQ ID NO: 5672 - DNA, 1516 bp, Homo sapien
acccagtagaactgttaaaataataagttgagaatctagaaagtagagcaaaaacaaagattgagaagtagttagaggctgggattacaggcgtcagctaccgtgtccagccgaaacatgaagtttcaaaatgccaagatgtatcacagaagacactcagcagtcagccacatttatcttggagaagagttccaggacttaaatgtttgaatagtataaactagttttttaaaaagtctgcctgaagccgaagattaaatactttaaaaagttcactgggtgatcttggcatgttgacattatcttaacagtctaagcttgttaccttacaccaacctgacaggttcattagaagcacatgaatacatataaaaggcataaaagactgggtcaatgaatatgagctctgaattctaaaattcctttgcatttctaggcagtacttaccatagtatgtttacgtacctggtgagtgacaatgctcaaaaatttctgaagtattcatccacattatgctagcgaaatgtcaaattgtcctttaatattcaaatgcatgaaccatcactccttggccttttggccaagatcaagtgtagtatcaaatgcatgaaccatgaaagctatcttaaaaggaaagtaacatttaaaggaattgaatataaaccttcggttaatcttgctagcacgtagtcaatacatcagtatttttctgccccttttatagtcttactggaaatgactgtaaaacagaaacaaagctaagccatggtaaatagaacattaaatgcccaacctaatttattttgctaagagaaactgatgaactaaaagagaaacaactattgtctacattttagatatgggggaaaaaaccctgagattactaattatgtatcaccatcctcttaatgtagatcctgaaaatgatggtatcaatataatacatacagtggattcaccttttaaactggatctattacctttgatatttgtcttacactgaaaaattctgacatcttcaggaaaccaatatgatggataagctaaatgttgacttaaaatagttaaaccccttaataacatcctttagtttctattatttcactgcttaagttcagcatctgaataacaaaggtaacataagtagtacttaagatcccaaaggcccattacattctatcaataaagacaaaacaaaactacatgtttactgaaaatagtctttttttctttgctttccagttttacacttttgttgaacacaaaaaagtggacaagatcaaataactagatggtaaaacactgattttttaaaaatcacatctttaaacccgtgagaatcacaattcaaagtatggccactgggggcaacctgtaaacctacaaccttttcttaacactgacactatgtgactgatttttcttaaaacacaaatgccattaagaaagtattttttgttgacacattcggctaaaaaaaatctatgtcgggtgcggagaaagaggtaatgaaatg

SEQ ID NO: 5673 - protein, 9 aa, Homo sapien
PSRTVKIIS

SEQ ID NO: 5674 - DNA, 1638 bp, Homo sapien
  Unsure 993: Unknown base
ggatcttttgccagagatgagggcatactggcctgacgtaattcactcgtttcccaatcgcagccgcttctggaagcatgagtgggaaaagcatgggacctgcgccgcccaggtggatgcgctcaactcccagaagaagtactttggcagaagcctggaactctacagggagctggacctcaacaggttgcagattttaaagatgcccttgccagagtatatggagtgatacccaaaatccagtgccttccaccaagccaggatgaggaagtacagacaattggtcagatagaactgtgcctcactaagcaagaccagcagctgcaaaactgcaccgagccgggggagcagccgtcccccaagcaggaagtctggctggcaaatggggccgccgagagctggggtctgagagtctgtgaagatggcccagtcttctatcccccacctaaaaagaccaagcattgatgcccaagttttggaaatattctgttttaaaaagcaagagaaattcacaaactgcagctttctaaaaaacaactccaaagtgaagtctgtttattttgctgtttcccctccatgcctgtgaattggatgttgtggtccctgtagagtgagtgcatgtggcgtacacggggagaaaggagctctcccacgcctgagtggctgttttgtgcttgggataaagctcacagattgtttttttttttctctattaaactcttcagtgccctggtagatcaggcaggcatacttggaatttagacagatggcactgattcaggggactctcttgctcgagttttcccctcggagcctgttgccttcttggcgcagggaccctgtcaagacgaagagctccacgcatggcaggagcccacgctgatgcctggtgggcctggggggtgtctctagctcagactgggtctgttccatgtgaccagagccccaggacatcgttccttagccagctgctccgttgttggaggcctggtntggtcacaggtgtgtcctagaacggtgactttgcccctcctgccctaggagatttgggtgtattcacagagcagccatctcctgtctccgtcagagcagtctctttccaggttactggaaggtcagtttctgtcaggcctcacttccttcttattcagaggtagccaggtccctgcactggtatctatttagaaatgtacatggagcccccagcgaaatgtgcctacattgtgtgttccagaaccggaggtacccttaccttctagatatgtgatgacatggctctcacgtcaggcagactgctgcacccacgctctcggcctgccgtgcagggatttcactcgtggagtgaggcatctgggggctgtgcagtgaggagctttccatgtgttgttaagacaacctgttagcattgtcttctcccgcgtctcctggcctcttctctctttaaatccttttctctgtttgtcttaatcacattaacgtcctatttatgttttattcaatatacatttaaaatagaacttactatgtgccaggcattgtgttcaacacgtgaaatatttaatccttagaataaccatattgtcagcataatttacaaaaaatctatgtcgggtgcggagaaagaggtaatgaaatggc

SEQ ID NO: 5675 - protein, 75 aa, Homo sapien
DLLPEMRAYWPDVIHSFPNRSRFWKHEWEKHGTCAAQVDALNSQKKYFGRSLELYRELDLNRLQILKMPLPEYME

SEQ ID NO: 5676 - DNA, 1494 bp, Homo sapien
cagcaagatgcgaacgagccgtacagatcccgggctctccgaacgcaacttcgccctgcttgagcgaggaagagaaacttcaataagttaacactgaagagtagtaaagaatgagataaaaaccaccaaccttctgaataccacattggctagacactgtcttggcttctcccagcctatcttctgaaccacatagaagtatacagtatcagtgaagcagctagctgtaaaatgtgggctgagtagcataacacttttatctgaaaaccttcaattcatagtatctgaaagcattaatattctcagtcattaatttttccaactacaaaatgaaggcactttgcaagcatcacagacttattgtaatagttaattcttgtttttgattattgtcatcttttgggggattaaagtgttttggcatgttgggctctctaatcttttcgctactttcagaatttgtgctttcaagtgtcattgtatatgcacaggacacagttgggacatgaagataaacctcacctaatagagtagatgtcatttctgggtaaggttaactgtgggaaacagaaatgtgttcactaaggaaaccttaggtcacaacctccagtttcctgaaggaaatgccaataaatgctccaaagacaaaaggctggaaacaaactggaatgtctctctccatctgtctgctaagggcggaaggaatgatttcatgttacattcacttcctagactttcattacagagtcaagcataatggaaaagtatgtccattttgtgtttctgtggaagataaaatgttcatattctccgacttatcttcataagcacagtagtgattcatgatatggggaaagatgggataaggtggctggctttgggagatggggagctctttggtgacacttttccccctgtgaccacattatccagtgattagatgtactttcttcctggaaactccagactgtgcatttcattccaagaaagctgggtagtcatggactgtggttttcctgggcacatgtgtggtagagccccagatcagaccaagaagcaaagacataagaagaaggaatccttggttgtctcccaacatgaatatctggttttaattcagtgtattctcagaagtaagaatgagaaaaaaatcttagtaattatatgtttgtactaaaaaatacacatataaggtctttgattttaacaattgtagtgtttttcaagaggagtgaaacagatcctggacaatacttgacatattctgtaaaaagttcaattgactcaaaatagtcaggaaagttatgaagtaacatcatataatactttatccccaacaatattaaatgtgattacaattttacagaatattcaaatcaaaatgttatataagacaaattattattcttgcttttacatctccttagaaggagaaacattcaattgttttaaaaatgttctatttatttttcaggaaatgagggtgttgccttc

SEQ ID NO: 5677 - protein, 78 aa, Homo sapien
MYFLPGNSRLCISFQESWVVMDCGFPGHMCGRAPDQTKKQRHKKKESLVVSQHEYLVLIQCILRSKNEKKILVIICLY

SEQ ID NO: 5678 - DNA, 988 bp, Homo sapien
  Unsure 153: Unknown base
caaaatcttccaaatgttaccaggtcatcatttctgcagtaattttcaaataagtcccctagatagtaatataaaataagtttatttactagatacctaaatgtttggggataacctatctaataaattttatatatggagatatcacagttntgcatcacctaatggcccacatatatgattacaatgctgtatttttactgtaccttttctatgtttagatacacaaatactcatggctgtgttacaattgcctacagtattcagtacagtaacatgctatacaggtttgtagcctaggagcaataggctacaccatatagcctaggtgtgtagtaggctataccatctaggtttgtgtaagtacactatgatgtttgcatgacaaaatcgcctaatgacacatttctcagaatgtagttggaggaaaaaaattgaaaggagagtattacttcatgacacaggaaaatcatttgaaatacaaattccagtgtccataaataaagttcactagaatgtggccatgctcattcatttacatgtaatctgtggtagtttttgtgctactgtggcagaattgaatacttgcagtggaacttgaatgggctacaaggtgtatttagtacctggcccttcacagaaaaagtttgctgacctgattgaatgtgcttgtgtgtatcacaggaagctcaccaggactcttggtatgtagcctctagctcccaaaggcatctgagccccactggcaggactcagttacctgtctctgtctaagcatgactccacccattagcgtccagacaacgaagaaaacttctattttaaagagcttgactaaccccctccttattatctaagttagagtagctgtgccaccccttaagtagcttttccttcttcctttcaaataggggttggaagagtagcaggtgagaacaacctctttcttcctcaattgtagagactcaatagtctaggctataaatta

SEQ ID NO: 5679 - protein, 25 aa, Homo sapien
KIFQMLPGHHFCSNFQISPLDSNIK

SEQ ID NO: 5680 - DNA, 2171 bp, Homo sapien
atcacactgagagatttttaacatatcagtggggaaatggggttcttgaacctctggaaaacttgaagctgagattgttcaggggtccatgagtctgatgttggtaaacattcctcatgtacaagccaaagattatttgtataaattttggaatggtgatgtgaaccttaggtatgaaaaggcagtaacatataacaagaaaataattttctagatctggggcaacagtgtgcaaataatgtccccagtagagaagcaaatccttttcatggactctagggcttgctactctgagatacaatgcctctaatttcatgctatgtggctgctttgtctttgatcagatttagtgtcttaggtaattaaatcagaaagtctatttagctattctagaagtgtatgtgtaggtattgggtgggtggggttctttgagcgaacttgtcagaaactccattcttaacatcagaatcagggcaggattgaaaacattgtggctggatcttgaaattgctataacatctattgcagaaaatgataggtcagatggatagcaataataattatatatcagatcttagtaacaaaattaccaagctttatctagtggatatatgtaaaagaatatttttaaatgtccagcattgatgtattttctttaagaattattacagtatataagcattctttgggaatacagtataaaaacataaattttttcttatttttaattttttttatttttttgttcaaggatgaatcttccctttaaatattaattttctcttaatttcgtgtttccttgcacataatagcactgcccctaacttcagagatgctgattgcagttaaaaaatcaaaaagaaatgatgtgaatcagaaaataccatgttgtattgaaagcaaatcaaatagtgtaaacaccatcaccagaaaacctctgtgcgaacaagctcccaagaggagggcagcttgtaacttacaaaggctgttagagaactcagagcatcagagcataaagcatgtgggatccaaagagacacatttggaattccagtttggggatggtagttgcaagcacctaaacagtttgccaaggaatgtttctcctgagtttgttccttgtgaaggtgaaggaggctttggtttgcacaagaagaaagacctactcagtgataatggttctgaatcacttccgcattcagctgcatacccctttcttggaaccttaggaaataaaccctcacctagatgtacccctggtccttctgaatcaggatgcatgcatataacctttcgcgattctaatgaaagacttggtttaaaagtatataaatgcaatccactaatggaaagtgaaaatgctgcatctgagaaaagtcaaggtttggatgttcaggaacctccagtaaaagatggaggggaccttagtgactgcttgggctggccttccagcagtgcaaccttatcctttgacagtcgtgaagcatcatttgtacatggtaggccacaaggaactttggaaataccaagtgaatctgttaaatccaaacagttttcaccatccggttatctttcagatacagaggaaagtaatatgatttgtcaaacaatgaaatgtcagcgttatcaaactccatacctgtcagaagaaaccacgtatttggagccaggaaagatcagtgtgaattgtggacacccatctcgtcataaggctgatagattaaagtcagatttcaaaaaactgagcagtacattaccatcttcagtgtgtcagcagccttcaagaaaattaattgttccgctatctagccaacaagatagtggctttgatagcccatttgttaatctagactaattatggtacagtatttaagaagaatcattaatatattaacaaaaatggaagggaagacctcatactgaaaaaaattgtgagccctgcctcttttgagatgttttaataacatctgttatataagtaaagcattcttctaaaattgcttgagatatttatgttgccttaatattccaaaggcctgatggtgtatgtataatctgcttttgtgtggtgcttatttttggtttctaaaccatctatttttatacttataaattgactcactctgcagtgttaacttatttaaataaacttgcatatggtctgaaaaaaa

SEQ ID NO: 5681 - protein, 340 aa, Homo sapien
MLIAVKKSKRNDVNQKIPCCIESKSNSVNTITRKPLCEQAPKRRAACNLQRLLENSEHQSIKHVGSKETHLEFQFGDGSCKHLNSLPRNVSPEFVPCEGEGGFGLHKKKDLLSDNGSESLPHSAAYPFLGTLGNKPSPRCTPGPSESGCMHITFRDSNERLGLKVYKCNPLMESENAASEKSQGLDVQEPPVKDGGDLSDCLGWPSSSATLSFDSREASFVHGRPQGTLEIPSESVKSKQFSPSGYLSDTEESNMICQTMKCQRYQTPYLSEETTYLEPGKISVNCGHPSRHKADRLKSDFKKLSSTLPSSVCQQPSRKLIVPLSSQQDSGFDSPFVNLD

SEQ ID NO: 5682 - DNA, 340 bp, Homo sapien
  unsure 134: unknown base
  unsure 135: unknown base
  unsure 136: unknown base
  unsure 137: unknown base
  unsure 138: unknown base
  unsure 139: unknown base
  unsure 140: unknown base
  unsure 141: unknown base
  unsure 142: unknown base
  unsure 143: unknown base
  unsure 144: unknown base
  unsure 145: unknown base
  unsure 146: unknown base
  unsure 147: unknown base
  unsure 148: unknown base
  unsure 149: unknown base
  unsure 150: unknown base
  unsure 151: unknown base
  unsure 152: unknown base
  unsure 153: unknown base
  unsure 154: unknown base
  unsure 155: unknown base
  unsure 156: unknown base
  unsure 157: unknown base
  unsure 158: unknown base
  unsure 159: unknown base
  unsure 160: unknown base
  unsure 161: unknown base
  unsure 162: unknown base
  unsure 163: unknown base
  unsure 164: unknown base
  unsure 165: unknown base
  unsure 166: unknown base
  unsure 167: unknown base
  unsure 168: unknown base
  unsure 169: unknown base
  unsure 170: unknown base
  unsure 171: unknown base
  unsure 172: unknown base
  unsure 173: unknown base
  unsure 174: unknown base
  unsure 175: unknown base
  unsure 176: unknown base
  unsure 177: unknown base
  unsure 178: unknown base
  unsure 179: unknown base
  unsure 180: unknown base
  unsure 181: unknown base
  unsure 182: unknown base
  unsure 183: unknown base
  unsure 184: unknown base
  unsure 185: unknown base
  unsure 186: unknown base
  unsure 187: unknown base
  unsure 188: unknown base
  unsure 189: unknown base
  unsure 190: unknown base
  unsure 191: unknown base
  unsure 192: unknown base
  unsure 193: unknown base
  unsure 194: unknown base
  unsure 195: unknown base
  unsure 196: unknown base
  unsure 197: unknown base
  unsure 198: unknown base
  unsure 199: unknown base
  unsure 200: unknown base
  unsure 201: unknown base
  unsure 202: unknown base
  unsure 203: unknown base
  unsure 204: unknown base
  unsure 205: unknown base
  unsure 206: unknown base
  unsure 207: unknown base
  unsure 208: unknown base
  unsure 209: unknown base
  unsure 210: unknown base
  unsure 211: unknown base
  unsure 212: unknown base
  unsure 213: unknown base
  unsure 214: unknown base
  unsure 215: unknown base
  unsure 216: unknown base
  unsure 217: unknown base
  unsure 218: unknown base
  unsure 219: unknown base
  unsure 220: unknown base
  unsure 221: unknown base
  unsure 222: unknown base
  unsure 223: unknown base
  unsure 224: unknown base
  unsure 225: unknown base
  unsure 226: unknown base
  unsure 227: unknown base
  unsure 228: unknown base
  unsure 229: unknown base
  unsure 230: unknown base
  unsure 231: unknown base
  unsure 232: unknown base
  unsure 233: unknown base
  unsure 234: unknown base
  unsure 235: unknown base
  unsure 236: unknown base
  unsure 237: unknown base
  unsure 238: unknown base
  unsure 239: unknown base
  unsure 240: unknown base
  unsure 241: unknown base
  unsure 242: unknown base
  unsure 243: unknown base
  unsure 244: unknown base
  unsure 245: unknown base
  unsure 246: unknown base
  unsure 247: unknown base
  unsure 248: unknown base
  unsure 249: unknown base
  unsure 250: unknown base
  unsure 251: unknown base
  unsure 252: unknown base
  unsure 253: unknown base
  unsure 254: unknown base
  unsure 255: unknown base
  unsure 256: unknown base
  unsure 257: unknown base
aattaaaaacaaaaatactttagggtgatttgcaatataattttccaaatgtctcagggattataaatacagacttgcactattatgatgcctctagttatgtatggctattgaagtaaaattaaagactcagnnnnnnnnnnnnnnnnnnnnnnnnnnnnnnnnnnnnnnnnnnnnnnnnnnnnnnnnnnnnnnnnnnnnnnnnnnnnnnnnnnnnnnnnnnnnnnnnnnnnnnnnnnnnnnnnnnnnnnnnnnnncactatttaaagatctgagctgaaattgtactgactccagaatctacaatagggcattttgatggtatttaaatagaaatcta

SEQ ID NO: 5683 - protein, 58 aa, Homo sapien
  unsure 11: unknown amino acid
  unsure 12: unknown amino acid
  unsure 13: unknown amino acid
  unsure 14: unknown amino acid
  unsure 15: unknown amino acid
  unsure 16: unknown amino acid
  unsure 17: unknown amino acid
  unsure 18: unknown amino acid
  unsure 19: unknown amino acid
  unsure 20: unknown amino acid
  unsure 21: unknown amino acid
  unsure 22: unknown amino acid
  unsure 23: unknown amino acid
  unsure 24: unknown amino acid
  unsure 25: unknown amino acid
  unsure 26: unknown amino acid
  unsure 27: unknown amino acid
  unsure 28: unknown amino acid
  unsure 29: unknown amino acid
  unsure 30: unknown amino acid
  unsure 31: unknown amino acid
  unsure 32: unknown amino acid
  unsure 33: unknown amino acid
  unsure 34: unknown amino acid
  unsure 35: unknown amino acid
  unsure 36: unknown amino acid
  unsure 37: unknown amino acid
  unsure 38: unknown amino acid
  unsure 39: unknown amino acid
  unsure 40: unknown amino acid
  unsure 41: unknown amino acid
  unsure 42: unknown amino acid
  unsure 43: unknown amino acid
  unsure 44: unknown amino acid
  unsure 45: unknown amino acid
  unsure 46: unknown amino acid
  unsure 47: unknown amino acid
  unsure 48: unknown amino acid
  unsure 49: unknown amino acid
  unsure 50: unknown amino acid
  unsure 51: unknown amino acid
  unsure 52: unknown amino acid
MAIEVKLKTQXXXXXXXXXXXXXXXXXXXXXXXXXXXXXXXXXXXXXXXXXXLFKDLS

SEQ ID NO: 5684 - DNA, 1283 bp, Homo sapien
atgaaggcttatctgcattcattccccggccctccctgccgtctgcacagcctcctccaggcctccccttcccagtgaaaagcaccaccatccagacctcaggaagcaatcattttagcttcttctccttctccctcaccatccaggacatcactgagccctgtcagttctgcccccagaatatctaagttcatccaatgccccatttccactgctgcttcctcacccaaatcaggatgtttctggccccgtctccctcctacctggtctccctgcctgtaccctcctctccactgggcccattctccaccggcagccagcatgatctctaagaaatgtacatctgtcatctgtcatatctgctgaaaattgttcagggcttcctgctgccttgagaatgagggtctgaatcccaaacaagggttcaaatctcaacctctcaggcctaccctgaccttacgtatctttcctcagggcctgtgcacatgctgttccttcttcctggaatgcttgtccccatagttttcagctggcgaatgtgagtcaggtctccccttaaatgtcatctaagagagccctttctaattcctccccttcatcttaactctatccccaatacactctctcacagagactgttcttttccttctgagaccctactccagcttgtagttctaaatctgtgattatgcactgtctgtcttcctcttgaggtcaggggccatttcttttgttctctgctatgctcaggacccagatcaaaggagctcagtaactatttacaggcgtacatcatatgtggaggacacttatgctgtgatggccccacacacagcttcctttggggtctgtcccctgctctccgttacccgcgtggtagccactgagcactggctcttcctggcttcactctctggcatcaaaacttatcagtcctacatctcagtcttttgcaaggtgacacttatctgattacctaattcacacgaaggtgttaatggtggtaatggcatagtatttattaccccaggggacccagaacggtggtatcaaaacatatcattccccagtggtttaaaactctggtagctttccagggagtccaagtggagtccagtctccttagctgagttcacagggccccgtctgcacgacttggcttctgtcggcttccctagccctgacttcccaagccttagtcatcaccctctctcccacccagggctcagcacagtacctggaacagtcaagccctcaataaatgtttactgagtgcattaaaa

SEQ ID NO: 5685 - protein, 61 aa, Homo sapien [sequence omitted]

SEQ ID NO: 5686 - DNA, 1086 bp, Homo sapien
gctttggggattttttttttttcattgtcggatacaggcatttcaaagggaaaccgttgaaatgcataacctgcaaagtaagttgccttgaatttgtgcacttctctgttccttatctgagcggtgcctttctgtagtttgtcttggagtacgtgtgtgtgcgtgcgcccctgtaagcgctgcctggggaggacagatgggagattaggggagacactccccctgtcctcgagggggacagtggctgggaaagatagggtttaggttggaatttcagtaagaaggtactaattacaacgtgcttggttggaagttggtgccaggccagggcttggagagaccatgggaaaatcacctgtctccctgccttctccctgagttagtttgccacagaagatccaacagccagactggtttgcaccgacggttcccaaatgcatggactggcactctgggctgttacacccgccacagctgctcggagaacttgtctccttgcttcgggggagggtcgacattttaattaaactaaaaaagaatgtttttctgaatcttagggcatacagccacttttaccatttttatttgaatttgagttcaggtaaacttaggcaaatagaaaagtgggagagggtgggaaaagacaaggtgagcctgcttttcccaatactgggaaaatgaattaaactagacgggggacgtcagagaacagaatgccttgcctttggtctgctttttaatatattttatgatcccaaattttacagaaagtctcaagggtttctgtgttttttaaatggtcaaatatgtgacatacatgtgtacatagatcacagagccccactgtagttttttaaatgagccacatttaccttggggaagagcccctccccccccgccatcataatattgtgaatgtaaagagagattggttcacaatgagaatgtacagtaggctcctataagggtgacaggattatatgcagaatgactttgaagagccaaaattgatttatttatgttaagtagtgctaagaaggaatatttgtcccggagtgaggcatttgagatagagggggaaaagcc

SEQ ID NO: 5687 - protein, 80 aa, Homo sapien [sequence omitted]

SEQ ID NO: 5688 - DNA, 512 bp, Homo sapien
gtttttggactcctggtatagacaactgccaaatccaccaacaaacagtatgagctgtattacactacaaagccaggactggctatttttggtggtctttgttttctagatgagatgtttttctctgagttcatttaaaatgattctgcataaagcacatactctactgtacaaaatacttttgccttcatggtgatgaaaactatggattgagggtcggggtgataccatctttaaagggatgcagctaaaaagtagggactacctgcatttcttatctaaagataaccacagttggcatttagtgatatactggctttgtatcatggccaaaagtatctgtaaagaagcttgtgggcatacttttgaaaccttctgaaaataaatgtaaagcatttacttcgtgtgtaaaattagaagtgtctatggttggtttgaataatatgagtcaaattataagagcattaaagtttgatactgctatctattaaagtcttaatctcttgcaaaaa

SEQ ID NO: 5689 - protein, 35 aa, Homo sapien [sequence omitted]

SEQ ID NO: 5690 - DNA, 325 bp, Homo sapien
agcaaaaaaaacctagaggcaatatttttttttaaagtttgtcttttcttttctacccaaattactaatctatgccattaaggaaaggaataagaacctccatatgtattattatctccacagtcctgcagaagtacaatctgatctttaactttcatgctacaaataataatttgagtagattaatttgaattttatcaacaaaattattgccatatgatgtatcatttctgtgtttgaacaaagcatcgtaatgcaggataacttctactttattccctgtagttaaaaaaaaaaaaaactatatagttcaagccaatattta

SEQ ID NO: 5691 - protein, 26 aa, Homo sapien
SKKNLEAIFFFKVCLFFSTQITNLCH

SEQ ID NO: 5692 - DNA, 910 bp, Homo sapien
gggagagcagcggagaaaaaggaggatgttacggaagaatggggatctgtctggatctgaagactgaaacaccagcttccagaaaaatagaaatctggtaattaaaaaatgtaaaagaaaggttgcaaattctggttaaatcctaaagaaactgggcttctgacttcttcagtattattactcctatagataattgtttcttatcttcatgactttagttccgttgttccaacttatgagaacgatgttgcaatttaatcttaccttgtaaacgtatggtatcacttggaatgcagtcagtgtttctgaattccatcctctgaattgttaatgaaatattgacctggactggacctacagtcagatcccttagggctctcagagtgccatgctggtggacagtgaattattcataattactctgcatttggtatttgagccattgtgaatgtgtatcttttgaaattccgcagaatctctgcttctcttgttttgcttccaacaattatggataatcatgtcttagctaaaagggccccaagttataacatactgtttttctctaatatgcttcttacaaatagccaatccctattagctgtgtggcattgaaattcaatgctattactaattttcctttgacatcaatagtaacgttacctcataatttgatagtcattatagctatgaagggaactaatgcccaagattctcaaaaatgcaagattgatgtgtttctttcttttcccctctgtcataatttacctatataacagagtatttacagtcatcattcattcctttctttaggaatccaaagtggtaattgcccaggaatatacagtgttcttgattggattaataattatcttcagtaattcagaataacacatgagggaatgaatgaatg

SEQ ID NO: 5693 - protein, 32 aa, Homo sapien
ESSGEKGGCYGRMGICLDLKTETPASRKIEIW

SEQ ID NO: 5694 - DNA, 1523 bp, Homo sapien
  Unsure 660-681: Unknown base
  Unsure 708: Unknown base
  Unsure 724: Unknown base
  Unsure 730: Unknown base
  Unsure 765: Unknown base
ggaattacaggcgtgagcaccatgcctggccatcagaacttgtaatcaagacagtatgttgagaaattctaacattataaattacaaagctttgactattaaagtttttgtgatctaatgatacagttttgattctatagtaatttgtggcttattttatagtttataatgaatacttatttctagactcatacactggaaggggacccggaaaggtaatgtaactcagtgattttaaaacttgatttttttaactgagaactttttttgccccctgcctgtaggttaagtcttacgtgaaatgccaagataattgctgagcagctttggttacccagggcggggtctgggtctgtctgtactttgcctttactctagatggctcctgagacacaggcaggactcccaagcaccgggttgggatctgccctggtcccggcattccagtataagattgcctcagacctgtgtttttcagactgggtttttgctcttcacatgaaatcaagttagatgacaatgactggtgttgaaaaaaatgaaaaggaaagaatttgtaaagaacagaaaatatatttgagtaagtattgtttggtaaaacttagttacatatgcatatatatttgttaggtatatatgtttatgtgtattctgatgtannnnnnnnnnnnnnnnnnnnnntattactatagtaccatgggtaatggntaaagaagttaaagcnactgcntagaatgaagaaggccccaggcttacctgtcccgntctttaaactgtccgaaggaaattcaatagcctgttaagtgaataccttcattcttacttgtatttgggggaatattatgaaatactcaccacttttggtattttatgaaaatgttttcttttcagaagttatggtaatttcaatgtgtttgttgttgggaggggagctgccaaatcagttactaatattactgtgtgacatctatccaacttttttcattattcttcattgccaaatactgaaagacttgtaaatggctttggcaatatgtttgaattctaagaggaaatattttcccataattgtatatcagagaaatatagtgatatacaatttccttgaaaaccaatttctaaataattttcttctctgtaatctaagtgtaaaaaggtttagttttttaataggtttaggtgtttataagcaatagttctctattttctagttgatataagtagaagaattgacaagtgagatggaaatgttaatttataaagggaaagaaaagctaggtgaggttgagttataattaaactgttcaggaaacatcgtaaaggctttaggctccctttttcatttctataccaattaatctcatgggttctagagtggttagttctacgggaattgtttttgtttttgtttttaaagatgctgaaaactactctcaatcaaattagtaccatcatttaagctttgaatacttggcagtaattgcctgggctcgtcaataaatgttagcaaattcttgatgttc

SEQ ID NO: 5695 - protein, 19 aa, Homo sapien
NYRREHHAWPSELVIKTVC

SEQ ID NO: 5696 - DNA, 318 bp, Homo sapien
tagcagcagctttttgcagggaaagagggagttgtatttattgcttctccatgacatggttcttttctcattagttcatgggcaagtcaagggaaagagacctaggtagcagctgagtgctgtagccttacagatggcctgggctggcttggctgccagtgcactgtgcccttgtagtcactgtcctacacatgtccagaaattgtgtttttcttacaggtgacagaggaagttatatatggaaggtagggttaggggcaccaaccccctgtgcaattgacaatccatgcataactttgaccctcccgaacatagcta

SEQ ID NO: 5697 - protein, 42 aa, Homo sapien [sequence omitted]

SEQ ID NO: 5698 - DNA, 506 bp, Homo sapien
ggtacaagccaccacacccagtagacttattcctttaaaattacaggcgtgagcactgcgcccggctcaaattagttattttagagaatattacttttaatctcaaaactgtttctttgaattctgcctgcctatccgattggttttactgaagttttccttgaggggctgtctgtcatcttttagggccctctgcaagtttttttcaaaaataacaactgcttagttgtgtgcagtgtaggactctttataggtttttgactactcttcttttcttgtagaatttcactgtcttttaatgtttacagactgcaagcaggataaaattaaaaattcaaccattattaatattgctgctttgtaggagctggtaaaggagtagaaggtaaagatctattaattatagtgtctaatacacccttgaggaaaatctgttaactccaaattattaagtacctaaagaaatctggagatcttaatttatttgccctatttcaggccttacc

SEQ ID NO: 5699 - protein, 21 aa, Homo sapien
MFTDCKQDKIKNSTIINIAAL

SEQ ID NO: 5700 - DNA, 511 bp, Homo sapien
gatgaattgaggctgcgtgacccactgtgcctggccagttttgaattttttaacttaaaaaaattgcaacttttataatattttatgttttataatgaaaaaatgtaatcctattgaatgttcctctgagcatagctttagctatattacttaaattttgatgagtaatatttttatgtttatatatttaaaaacccctgcagttgcagtttttattttttcaacaagtatttaagcacctgctccatctagacattctgccaagtgctgaggacacaactatgtacaagacaaggtctcttgccttcatccagttacagtctgtcaatatagacaaaccaacgaataaagaattttcagatttcgacaagtgtctaggaagtaaataaataatagaaggtgctaattggatgatctgagactgtctctctgaggatgtcatgtttaagttgattggtggtaccaaggtgtgtatgggagtttctttagctttcccaatctatcgaaacat

SEQ ID NO: 5701 - protein, 25 aa, Homo sapien
DELRLRDPLCLASFEFFNLKKLQLL

SEQ ID NO: 5702 - DNA, 2786 bp, Homo sapien
cttattcatgcaggctctgcattagctgctaatgtatgtaaaaagattactggacgtcttacaagtgcaatagcaaaacaggaagatgtctctgttcagctagaagccttggatattatggctgatatgttgagcaggcaaggaggacttcttgttaatttccatccttcaattctgacctgtctacttccccagttgaccagccctagacttgcagtgaggaaaagaaccattatcgctcttggccatctggttatgagctgtggaaatatagtttttgtagatcttattgaacatctgttgtcagagttgtccaaaaatgattctatgtcaacaacaagaacctacatacaatgtattgctgctattagtaggcaagcgggtcatagaataggtgaataccttgagaagataattcctttggtggtaaaattttgcaatgtagatgatgatgaattaaaagagtactgtattcaagcctttgaatcatttgtaagaagatgtcctaaggaagtatatcctcatgtttctaccattataaatatttgtcttaaatatcttacctatgatccaaattataattacgatgatgaagatgaagatgaaaatgcaatggatgctgatggtggtgatgatgatgatcaagggagtgatgatgaatacagtgatgatgatgacatgagttggaaagtgagacgtgcagctgcgaagtgcttggatgctgtagttagcacaaggcatgaaatgcttccagaattctacaagaccgtctctcctgcactaatatccagatttaaagagcgtgaagagaatgtaaaggcagatgtttttcacgcatacctttctcttttgaagcaaactcgtcctgtacaaagttggctatgtgaccctgatgcaatggagcagggagaaacacctttaacaatgcttcagagtcaggttcccaacattgttaaagctcttcacaaacagatgaaagaaaaaagtgtgaagacccgacagtgttgttttaacatgttaactgagctggtaaatgtattacctggggccctaactcaacacattcctgtacttgtaccaggaatcattttctcactgaatgataaatcaagctcatcgaatttgaagatcgatgctttgtcatgtctatacgtaatcctctgtaaccattctcctcaagtcttccatcctcacgttcaggctttggttcctccagtggtggcttgtgttggagacccattttacaaaattacatctgaagcacttcttgttactcaacagcttgtcaaagctcatcatatgcccgaagctcagtggttacggctgtgaaatttacaatttctgaccatccacaacctattgatccactgttaaagaactgcataggtgatttcctaaaaactttggaagacccagatttgaatgtgagaagagtagccttggtcacatttaattcagcagcacataacaagccatcattaataagggatctattggatactgttcttccacatctttacaatgaaacaaaagttagaaaggagcttataagagaggtagaaatgggtccatttaaacatacggttgatgatggtctggatattagaaaggcagcatttgagtgtatgtacacacttctagacagttgtcttgatagacttgatatctttgaatttctaaatcatgttgaagatggtttgaaggaccattatgatattaaggtaagatgtttgtgcctatttatacaatgttttagaagaagactttgctagagcaactttcacccttgtaatttactcatgtgtctgagaaaaatcaggttgtctgtgaagattttgataagcatattgtaaactataaagtgcaaaagtaataggcagtgtaacaccagttgacgtgtaagaaagatccagagccctttttattggaggaggaagtggcagtggatgcaaaatgctgtgtgcccacttgcttagtgaatagtccctagatcctttccctcaaaaaagtcccgacagattttgctgtttaaagtataaatctgtaactttttggcctgtcttaacattggaccatagttgctacccatggagggttttcttagcattgtcttgattaagtctcctgagctacctttggggctagtctgaattgtaactgtatcatttacctgaatgaggaatttttgtttttcaatataatatactgtgtttaatatcaagaattttgttataggacatggaacttttcagatatacaaaacaatctgtagaagctacttgagagaaatcatactgcgtcttatgtttggataatgaattttgcatataagtgttctttgttttcctgtgtgttcgtctccatttaaaatgtgaacagtaaaagggtgatttgaaaaatgaaaaatatatgcattgtgtctttttcatctactcttccatttagcgcttttggccaagcaggacaaaagtggtaactcagcagtaattgagccatactacccgaactcctactcttaggtttccatgtgtggtagtgacctgagcctctcaaagttcaatgaagagggcctccccaccaagaagtaaaaggatgtgcttgtttaattctatgagtttatagtccaagagaaaaaggtttatgggttatcaggttttacatggattaatctgaataactggtcaactctgttatgatagtggaaacttattatgaaattgtgttccagttcagtaattttctagttctatgattctcaattctggtgcacatgagctttaaaaaat

SEQ ID NO: 5703 - protein, 403 aa, Homo sapien [sequence omitted]

SEQ ID NO: 5704 - DNA, 495 bp, Homo sapien
  Unsure 109-110: Unknown base
  Unsure 194-339: Unknown base
aagctgtatcttgactcttcaagctcctggtggctaccagcatctctgggcttgtggatgcatcactttaatatctaccttcacagtcactttgcttctttctcctttnnctgtctatccctcctctgtgtctctcttataagggcgcttgtcatgagatttaggacccacctagataatccgcgattatgtannnnnnnnnnnnnnnnnnnnnnnnnnnnnnnnnnnnnnnnnnnnnnnnnnnnnnnnnnnnnnnnnnnnnnnnnnnnnnnnnnnnnnnnnnnnnnnnnnnnnnnnnnnnnnnnnnnnnnnnnnnnnnnnnnnnnnnnnnnnnnnnnnaatccttttggtcaccatttaatctactataacatcttaacttattacagtctacctttaagtaatattacttccattttactcttctgtgtcctattgttgtcatgtgtctcatttctatagaataaatttcacaatatattatttttgcttaaa

SEQ ID NO: 5705 - protein, 153 aa, Homo sapien
  unsure 37: unknown amino acid
  unsure 65: unknown amino acid
  unsure 66: unknown amino acid
  unsure 67: unknown amino acid
  unsure 68: unknown amino acid
  unsure 69: unknown amino acid
  unsure 70: unknown amino acid
  unsure 71: unknown amino acid
  unsure 72: unknown amino acid
  unsure 73: unknown amino acid
  unsure 74: unknown amino acid
  unsure 75: unknown amino acid
  unsure 76: unknown amino acid
  unsure 77: unknown amino acid
  unsure 78: unknown amino acid
  unsure 79: unknown amino acid
  unsure 80: unknown amino acid
  unsure 81: unknown amino acid
  unsure 82: unknown amino acid
  unsure 83: unknown amino acid
  unsure 84: unknown amino acid
  unsure 85: unknown amino acid
  unsure 86: unknown amino acid
  unsure 87: unknown amino acid
  unsure 88: unknown amino acid
  unsure 89: unknown amino acid
  unsure 90: unknown amino acid
  unsure 91: unknown amino acid
  unsure 92: unknown amino acid
  unsure 93: unknown amino acid
  unsure 94: unknown amino acid
  unsure 95: unknown amino acid
  unsure 96: unknown amino acid
  unsure 97: unknown amino acid
  unsure 98: unknown amino acid
  unsure 99: unknown amino acid
  unsure 100: unknown amino acid
  unsure 101: unknown amino acid
  unsure 102: unknown amino acid
  unsure 103: unknown amino acid
  unsure 104: unknown amino acid
  unsure 105: unknown amino acid
  unsure 106: unknown amino acid
  unsure 107: unknown amino acid
  unsure 108: unknown amino acid
  unsure 109: unknown amino acid
  unsure 110: unknown amino acid
  unsure 111: unknown amino acid
  unsure 112: unknown amino acid
  unsure 113: unknown amino acid
KLYLDSSSSWWLPASLGLWMHHFNIYLHSHFASFSFXCLSLLCVSLIRALVMRFRTHLDNPRLCXXXXXXXXXXXXXXXXXXXXXXXXXXXXXXXXXXXXXXXXXXXXXXXXXNPFGHHLIYYNILTYYSLPLSNITSILLFCVLLLSCVSFL

SEQ ID NO: 5706 - DNA, 1212 bp, Homo sapien
ggcacgagggagacttcaggagtcgctgtctctgaacttccagcctcagagaccgccgcccttgtccccgagggccatgggccgggtctcagggcttgtgccctctcgcttcctgacgctcctggcgcatctggtggtcgtcatcaccttattctggtcccggtgcccttccagctgtcactgaaatggctttattcgtcaccgtctttgggctgaaaaagaaacccttctgattaccttcatgacgggaacctaaggacgaagcctacaggggcaagggccgcttcgtattcctggaagaaggaaggcataggcttcggttttcccctcggaaactgcttctgctggaggatatgtgttggaataattacgtcttgagtctgggattatccgcattgtatttagtgctttgtaataaaatatgttttgtagtaacattaagacttatatacagttttaggggacaattgagatggctgaactactgaataaaaaaaaaacaacgctgttttctagtcctgcagaccgtaagatacttggtatcgcttctattttggttactacggtaggtgcctggcggaagggagtgggcggagatatgtaaatagaaagtgcgtacagttagaacgtccggcacgtaactgatcggagcattctgggaagaagtaatttattccttttcggcagccgaatgaaaaaaaaatttaaaaaaatgtgcgagctaatatggcaaaacaactggaaggacgctaaataataggattgctcataccagcgcgttatgaactcaccctagcttgtaacggaatctttttcactgagtgcagaatgtcggctgtttgtctgtatcgtcaggtgggataatccttacctgttcctcctccggagggcagattagaacatgatgattggagatgcatgaaacgtgattaacgtctctgcgtaatcaggacttgcaacaccctgattgctcctgtctgattctttctgacgatcacttacatttgtgttatgctgattagcagatatccacaaacatagctatgaagttctgactgggataaccttgctgtttgtctattttgcagtcttgctattgctgtttgtctattttgcagtcttgctaaatttgtttgttcttgaaaattgtgatttggtttttgttgctttctggaatttaggcagtgaaataataaaaaaaaaaaaaaaaaa

SEQ ID NO: 5707 - protein, 35 aa, Homo sapien
MGRVSGLVPSRFLTLLAHLVVVITLFWSRCPSSCH

SEQ ID NO: 5708 - DNA, 7261 bp, Homo sapien
gccccagatcggaagtgacggagacgtgctagcgcgtcgaaggtagctctatggttttcctcgcgttcttgagtcgggaaatggccgctgtgtggttgcaacggagataaattcccggaaccgcgattcggcgtgtcaggaattcgaatttagagtttaatttctcagagcattctctccaggaagaatttttacagtatctcaaagacttcacttgacttcttgatcctgcataaaaccaaggagaaaagaaatgggtcgctccaattctagatcacattcttcaaggtcaaagtctagatcacagtctagttctcgatcaagatcaagatctcattctagaaagaagcgatacagttctaggtctcgttccagaacatattcaaggtctcgtagtagagatcgtatgtattctagagattatcgtcgcgattacagaaataatagaggaatgagacgaccttatgggtacagaggaaggggtagagggtattatcaaggaggaggaggtagatatcatcgaggtggttatagacctgtctggaatagaaggcactctaggagtcctagacgaggtcgttcacgttccaggagtccaaaaagaagatccgtttcttctcaaagatccagaagcagatctcgccggtcatatagatcttctaggtctccaagatcatcctcttctcgttcttcatccccatatagcaaatctcctgtttctaaaagacgagggtctcaggaaaaacaaaccaaaaaagctgaaggggaaccccaagaagagagtccgttgaaaagtaaatcacaggaggaaccgaaagatacatttgaacatgacccatctgagtctatcgatgaatttaataagtcatcagccacatccggtgatatttggcctggcctttcagcttatgataatagtcctagatcaccccatagtccttcacctattgctacaccacctagtcagagttcatcttgctctgatgctcccatgctcagtacagttcactctgcaaaaaatactccttctcagcattcacattccattcagcatagtcctgaaaggtctgggtctggttctgttggaaatggatctagtcgatacagtccttctcagaatagtccaattcatcacatcccttcacgaagaagtcctgcaaagacaatcgcaccacagaatgctccaagagatgagtctaggggccgttcctcgttttatcctgatggtggagatcaggaaactgcaaagactgggaagttcttaaaaaggttcacagatgaagagtctagagtattcctgcttgataggggtaataccagggataaagaggcttcaaaagagaaaggatcagagaaagggagggcagagggagaatgggaagatcaggaagctctagattacttcagtgataaagagtctggaaaacaaaagtttaatgattcagaaggggatgacacagaggagacagaggattatagacagttcaggaagtcagtcctcgcagatcagggtaaaagttttgctactgcatctcaccggaatactgaggaggaaggactcaagtacaagtccaaagtttcactgaaaggcaatagagaaagtgatggatttagagaagaaaaaaattataaacttaaagagactggatatgtagtggaaaggcctagcactacaaaagataagcacaaagaagaagacaaaaattctgaaagaataacagtaaagaaagaaactcagtcacctgagcaggtaaagtctgaaaagctcaaagacctctttgattacagtccccctctacacaagaatctggatgcacgagaaaagtctaccttcagagaggaaagcccacttaggatcaaaatgatagcgagtgattctcaccgtcctgaagtcaaactcaaaatggcacctgttcctcttgatgattctaacagacctgcttccttgactaaagacaggctgcttgctagtacacttgtccattctgtcaagaaggagcaagaattccgatccatctttgaccacattaagttgccacaggccagcaaaagcacttcagagtcatttattcaacacattgtgtccttggttcatcatgttaaagagcaatacttcaagtcagctgcaatgaccctaaacgagcggttcacttcgtatcagaaagccactgaagaacatagtactcggcaaaagagccctgaaatacacaggagaattgacatctcaccaagtaccctgaggaagcatacccgtttagcaggggaagagagagtttttaaagaagaaaatcaaaagggagataaaaaattaaggtgtgactctgctgaccttcggcatgacattgatcgccgtagaaaagaaagaagtaaagaacggggagattccaagggctccagggaatccagtggatcaagaaagcaggaaaaaactccaaaagattacaaggaatacaaatcttacaaagatgacagtaaacataaaagagagcaagatcattctcgatcttcatcctcttcagcatcaccttcttctcccagttctcgagaagaaaaggagagtaagaaggaaagagaagaagaatttaaaactcaccatgaaatgaaagaatactcaggctttgcaggagttagccgaccacgaggaaccttttttcgaattagaggcagaggaagagccagaggagtttttgctgggacaaatactggtccaaacaactcaaatactacttttcaaaagagaccgaaggaagaggaatgggatccagaatataccccaaagagcaagaagtacttcttgcatgacgacagagatgatggtgtggattattgggccaaaagaggaagaggtcgtggtacttttcaacgtggcagagggcgctttaacttcaaaaaatcaggtagcagtcctaaatggactcatgacaaataccaaggggatgggattgttgaagatgaagaagagaccatggaaaataatgaagaaaagaaggacagacgcaaggaagaaaaggaataataaatatgaagtaagattacaacagagcagaacttgcacccaccattttttttacctgatttttgttttcaaataagaatgtaagcattttacttaaattttactgtttgcaagtagtctatagaaattttgttttaagtcttcaaatatcttgagaaatagtagactgtatgttgaaaattgtactgaaataaagtagaaaattgttacgtaccatatttgtaactatcaacttttaaaacttttaacgtttttgttacatgcattgtaattctgctttgtctataagatatggtcaagtacagctctgtgaaagttctgattctcttccttccctgtttgtcaatgttttattctgaagtaaacgttagctctacatataaatcctggaacagaaattgtttatagagactacactaattattttaactgtatacatctgtttaatttgaacacactacatcgtagggtgactgatttttgaagtataccacagacaaaaagttgttactatggtaaactaagctagtttaacacttgagcaaatgcttaagaaggaattaaaaaaaaaaagctttgccaatagctaaaaagtacaagctattaaaaatcagattgaaaagttttgagaaaatgttatttttactgaaagcaagcagtggcctataaagaacattcttaggagccttttctatttgcgttcaaaactgtgtgttctctttctattcctatttgatagtttgagtcatggtcttagatattagctatttgtgagaggaaactggtttgtaacaatactgcaaatagaaaccccatttctactgaacatcctagttttaaacagaagaaaaactgtaatcctggggttggtatgtaggaggtctatcctgcagaataagttgatacattagtacctgatttcatatcttacatatttatttgagctgaacattagtttgtagtgtaactattagtaaaaatagagaaacacagcatactgttcattaatagtattttaaaaaaattgtttttcaaatgtcaccaataaaagttttggcaggaagcttgttgcggcattgatctaacctttttcccccccatttcagttgcagtttttgtagaatggctttttctttttcctcttaagagttctattcttcaggtagataatttttcaaatgtgaattatcttttgtgtctatattgatagctcttaaaggagtgaaaatctaaaatagtaaatttcaatgttaagtgtctgctttatgggcatatataaaagtagacacatttcatttgttaatttagttgtgtgtgtgtgttaaaaggagctaatgcttattctgttaatgtaaacttttgaagatcttaagtgtattgctctttcatcttaaacactttcgaggatttgcagtgcgtctagcacctagattacagccaggaacattggttaagaactgttggaaacaaaactaaaagcaaactcaacatatgtgatgtttatggccctcagatccttagtattgtgtgattttcccccgttaacatgtctttctaaaattgtctattaaagcagaggaaatacctgccaaaggaagtatgtattgcattaatcagggcataactaatattctcctgttcagaataatacttatttacgtgtgaaagcaacatggatgtgattcccaacacagaattttcatgacccttttattgtatacaaataaataccataacagttacttggttagacatcaaatctgtgtgcatgactatgtgcttatccacttaagacaataggtaaaaggggatctgagaaattatgtaatagggagtgggaataaaactacttaattcctgtgggcaggttatattttaagttcaaatgcattgctttaacctttggttacttttattctgttaaacagaattgaagaaagagtattataccagagtgtagtaggctagggtgattgtaagaactctgtaatagaatgtcattgtggatgttacctttttcagatccaagcatataaaaagcctgtatattttttaaaaacacatcttaactccacgctttacgatattataaaagttgaatggttcctcttggtaaggatatttgcttacaagtgctaggaaataactcactgatacctgcgttaacatactttgttttgcctagagaggggcaataaaaatgaaccaaaggatatttccagaaaggattaagaaagctgtttaagaaggccatgactctttaggtgtgtatgtgtacctttcagcatcctaggaatttttatactaaaagcaaaatgttttttccagttagtcttcttcaaggaattactattgttccttttgtcacaggtaaaatcagtgttgggaattataatttgagaaaaatattacccagtaacattgaatgtagatggctaaacgattcttactcagtgtgatgtataatgatgcaacagggacccttgtaaattgtcatacgccaataaaatgtcacaagtaataactgctgttgtttgtttacctgtgtctatttcacacatcttatttctgtggcctattttagaatatcagcgcatctgttaggaagattactggtgtggtaaggcttgataaatgctttataaactccctcaaacctttctttactgtttttttgttttgtcttgtttttgtttttgtttttgtttttgtttttgtttttcccttgtctcccctgggaaaatgggaaattttacagttggtaaatctaagccaaaattattttgaaataaaggaattctggatgtccagtttagtcctcgttttcttacgttaatctgggaccttatcacccataatatggtgattacttctctttctaaaaacatagtagctagtaaataagtaaaaagaattgtcttttcattcactttaagtaagatgtggtataattcttaccatgtgccatcctgtcagttttaacaaagcattttcacagaaatttgtgtactaagacaaactgacacattttgactcatacaaatggcaaattagtccttaaaaattctgtgagagaaataactctgtgtgtacatacatatgcatgtaaagtgttgtgtaagatcattggtagcttaattatactggataattgtaatgttatatacaaatttcttatataaaagtatgctgcattattaacatttgtttaacttttcttatttttctttttctgggtttcaactggaatcccattggtggggatgtaccttaagtttccttgtggaataatagactttcacatccagaaagagaagttcagaggcctttctcaatttacagagttgaagaggaaaggcaaatggaggaataaacttcattgtcattgggattaatttggctagactcaatctcttgagccttaaaatgagaaagtaatatccattacatgtttagagttctcaaatagttgatactattattaaatgtttcaaattttattggggtagatactaaaaattagtacactgtcctaatgaagtttaaatgaacaagttttacatttcttaggattcaggaatatatggaatctagttgtatttaattgacttgagagccacagagattgtgttgatttatgagctggactcctattgttttagaaacatgcagtaatgattaacttgtgtcaatgatggtaatgagaccaaacttgtacatttaattaagggtaccagttctttttatgttactagactataccttggcctttaaaaatgaatctcactgattaaagagaacaggcattattaggatagcattccaccacaactagaaacattcaaataatgtgtcttaattgtaatctgtatataggaaaatttttcctatggatatttttggtgttttaccacagtgaactgatttgtagcacttatgaagtgcagaaggtaatattcttgaaaatagaaaaaggttgggtgagcaggctttaatgcctttcccccaagaatatacatcgaatttttcttaatcttttggggttggccagcttccagatttcattaataatgagctctgcctttaataaaagtacatgatcatagctacactgtatgtttaggtggtgtgaaatgatttataatcacagcttgaactgtgtttgcttggtactgtcatagtgattacaaatttcatggaatgcgaagagcaacaataaataaaaaataccactcaccctcaaaa

SEQ ID NO: 5709 - protein, 920 aa, Homo sapien
MGRSNSRSHSSRSKSRSQSSSRSRSRSHSRKKRYSSRSRSRTYSRSRSRDRMYSRDYRRDYRNNRGMRRPYGYRGRGRGYYQGGGGRYHRGGYRPVWNRRHSRSPRRGRSRSRSPKRRSVSSQRSRSRSRRSYRSSRSPRSSSSRSSSPYSKSPVSKRRGSQEKQTKKAEGEPQEESPLKSKSQEEPKDTFEHDPSESIDEFNKSSATSGDIWPGLSAYDNSPRSPHSPSPIATPPSQSSSCSDAPMLSTVHSAKNTPSQHSHSIQHSPERSGSGSVGNGSSRYSPSQNSPIHHIPSRRSPAKTIAPQNAPRDESRGRSSFYPDGGDQETAKTGKFLKRFTDEESRVFLLDRGNTRDKEASKEKGSEKGRAEGEWEDQEALDYFSDKESGKQKFNDSEGDDTEETEDYRQFRKSVLADQGKSFATASHRNTEEEGLKYKSKVSLKGNRESDGFREEKNYKLKETGYVVERPSTTKDKHKEEDKNSERITVKKETQSPEQVKSEKLKDLFDYSPPLHKNLDAREKSTFREESPLRIKMIASDSHRPEVKLKMAPVPLDDSNRPASLTKDRLLASTLVHSVKKEQEFRSIFDHIKLPQASKSTSESFIQHIVSLVHHVKEQYFKSAAMTLNERFTSYQKATEEHSTRQKSPEIHRRIDISPSTLRKHTRLAGEERVFKEENQKGDKKLRCDSADLRHDIDRRRKERSKERGDSKGSRESSGSRKQEKTPKDYKEYKSYKDDSKHKREQDHSRSSSSSASPSSPSSREEKESKKEREEEFKTHHEMKEYSGFAGVSRPRGTFFRIRGRGRARGVFAGTNTGPNNSNTTFQKRPKEEEWDPEYTPKSKKYFLHDDRDDGVDYWAKRGRGRGTFQRGRGRFNFKKSGSSPKWTHDKYQGDGIVEDEEETMENNEEKKDRRKEEKE

SEQ ID NO: 5710 - DNA, 600 bp, Homo sapien
  Unsure 28: Unknown base
ctggggttggcagtctgcttaacaagangctgggaccacctctgaattagtgaatcagggagctgctgtgtgatcccctcctccaggctttcttggagtttgtctctgccacttcctcaagccctttaaaaaggctcctgtgctttagagagtwaggatgttaatgaccgttcttttttcttgtactttattaagtactagtcttactagactagtgcttaagtggcagtgtctgcctttgccttctcccatctctttatgctcctttcttccaacttctcacgtttctgtttctcgcacggccaggtgtccagcatcccatgctgacttgcggttggccaatcccctcctcgtagatttcctccacattttcctcttcctccttttcctgtgggaagttctttttctgggctgtggctggtcttacgtagttcggtggaaaaagtattgaggtagtgttagatactgtgctgcacctccaggagtgtccaatcttttggcttccctgggccacactggaacaagaagaactgtcttgggccacacgtaaaatacacggacactaacgatagctgatgagctaaaaaaaaaaaaaaaaaa

SEQ ID NO: 5711 - DNA, 508 bp, Homo sapien
gagaagaggatgacatttattcactcaactgaacacacacacacatacacacacacacacacacgcagcactgatggagagtacagctgcttatatattcatctataattgcaaagacaaaagtgtatcttccagaagatgcctctggttgctaaccagtctctgtgaagaagctgcagttacccaggcttctgtaactcaggacattgaagtagtcatgcagctcggcacagtcctctccccgctgctctccacagagcccagcaggtgcagcttctgcctggacacagcttcctgggggtgagggagcactggggctccattcctcctgtccagctgattttctcctgaggtcaccttccacagaatggattctgagggctttctttctagtcaacgcgaccaccacgatgactgctgtgcagatgaccaccagcgtcgcggccatggctccaagcaatggaatctggaacctggcaccgtgctcagccactgagctttctaggaa

SEQ ID NO: 5712 - DNA, 1887 bp, Homo sapien
aacaatggatattctgtaaaatatcctgtacaaaacaagactattgccagtaatgtatacaaattgtctttttgtgtacttccagcataggtttggatatatgaacatttttcttttattgttttatcttcacagaaaataaaaggtgttaatttgctttttaaaacaaatttaattatcacattttaaattactttgtggactgtgttttcaaaactttgcaaattcatctgttacacagaaaattttgacttaaaacatctgctgaattccaaatttctgtaatagctactgtatctgtgataaactttcctatatctttccttgccatttctatggattttataatgaaagaaaaaggcattggagactgaaggcagaaatggttgtgacagtgctgtttggctttttcattcttcaaatgccaagtcatccactttgttttcctgtttaggctttgcacaaatacaattgctttcaggaatcctaaagcagcattttattgagtttgaattattaaaggtacagaggaaatgtggtgatgtagaacttttcctaacacaggtatctaggaagtaagtgctgagttgattttctaggttcttacgtatttgaaaaataaaattgcaattcgagataagtgcttgagcactctacttaagtattctctgtgttttatgaagagaaaatgatctgattttcccttatacttcattttacaatacatattcccttttaacttaaaaaaattgtaaatgtgggagaaaaaaccctgcaggatggaaacaattattaagaatgtagatcaataagtactttttagtgatgtggcagaaatccctgttgattctaagttttagagtgtcttttcccctatttctgacctacaactataaactactctctattaggagaactagaccactttcttcattcttttctaaactgctgcagattgccgtgaactctatcaatagtctcttttccgcaggcaaagtggcattttctaaacatgtttgcttactgccaggtggtttgaaatctatgatttactgcagtagtatgtgcttaaaacaactgttgaggtcttttaagcaggaaagttcaaaaggaagtgtcctgataatggtactggtttttctacaaatataagtagtcattagaagtttgcaaccaccaccaagtctgagagaactctgggatattctgtgggtttggcatattagatagagaaaatgacagatctagatgaagggagcttttggatgtgtgcctttaaaaactgattatgtataaatactgatatttcacatacggagatatttgaagacccaagtctgcctttcacagagccctccattccaagtttagtttttgtcaaaatatgaatcattttatttgactgtactatcagtacacaaatgcatgagtatgtttatacagtgttagactgatgtgaatttgcatttgttacattacattgccagcgcatatcatttagcaagttggcattaacatttatgctttaattaaatgccagtatacctatgtgtgcagcagtaaaaaattagtgagaaaaagcaactttttgtcactcttaggaaatattttgtcttattagtgttcttggcacatgtatattactaaagtagataattccaatgagaaatactaccagattattgttataaaattaatttacaatgtccctgatattgagctaactcttaaaaaaaccaaacaaaactcgtatctgagtgtaactttgccaatattttaaaagccaaaatattctctggacaacaaatttgtattgctcagggacagtttaccttgcctggtaaaccttcccaaacagaaatatagctatactatctttggttttgt

SEQ ID NO: 5713 - protein, 108 aa, Homo sapien
MWQKSLLILSFRVSFPLFLTYNYKLLSIRRTRPLSSFFSKLLQIAVNSINSLFSAGKVAFSKHVCLLPGGLKSMIYCSSMCLKQLLRSFKQESSKGSVLIMVLVFLQI

SEQ ID NO: 5714 - DNA, 482 bp, Homo sapien
ccatgaaaaaaaaaaaagctgcaagttataatgttgaccaggcactgttacttccacttgatcacactgtttggggctctctttgatgtacaaaacactcctaagttaatgaaatgcgttgcagctggctaatggctgggaaagtgcaaaccctgcattgaacccttcccatcagactattcaatggctaggtaatgtcaggcccgagctggagaaggggcaaacaggctcgttgccaggcaggcccgggactcctgggcaaacggctgtggaggggctggtatttttctcctttcaatagaagtggtctgtgcctgcagcaaatgagaaataaatccatcaaggccaagctcaggcttattttgctggctgctagaatttgcataagagccttgtatatacaggtaaacaaagacttcctggaattactaatgtggaggtgatctgagaactgggaacaaagtagggcctcatcttatgca

SEQ ID NO: 5715 - protein, 82 aa, Homo sapien
MSGPSWRRGKQARCQAGPGLLGKRLWRGWYFSPFNRSGLCLQQMRNKSIKAKLRLILLAARICIRALYIQVNKDFLELLMWR

SEQ ID NO: 5716 - DNA, 848 bp, Homo sapien
tcaattttcatttcaccaatcttgttcgtgatttaggtgttgtgtgtcatccattatatctttaatggtgaagaatatcctaaaaactctgatgttcttaggaatattgttctttttttaaaaattatttcaggtacttgtcttgggccttagacacaaatcaggaagaacgagacaagggtaaaacagtagaagtgggtcgtgcctattttgaaaccgaaaagaagcatttcacaattctagatgcccctggccacaagagttttgtcccaaatatgattggtggtgcctctcaagctgatttggctgtgctggtaagaaagacatttccagtccatctgtatatttgttagtagccccgcttatatctttaaatttgaatttatcttctaaaagctcaaattcaggttgcagtgaaatataatgatgtacacggtcacagttttcatcatactaatctctcttcaagaaatcttcaaaatttgatttacttctgaaaatacgtttcaccttttctctcctgttgctattatctattaccatgtcagaacttagtctccattaaatgccaagcccaccgttaggcaccatgggtaaaaaatgaataggaaaccatctgtttcatacggtcttcagtcattttgcgcttttcacaatgtactggtagtagatcacaattttttttcctttgtagttacaatagctagaaagtaaatgttggaattttaaaatatgcaggtatactagattttgggaatgtgggggattggaagcatctagacattgtttgatttgtgacattcaaaagcaggtacgtcataactcgtttgcttctattttcttgcaaa

SEQ ID NO: 5717 - protein, 81 aa, Homo sapien
MNRKPSVSYGLQSFCAFHNVLVVDHNFFSFVVTIARKKCWNFKICRYTRFWECGGLEASRHCLICDIQKQVRHNSFASIFL

SEQ ID NO: 5718 - DNA, 915 bp, Homo sapien
gctccaaagtcgtactctcatttcattttcatgagtcacagctggggccttgtgggaagaatcgaaggtcagcttactcaggagtgaggggcatcaggtccagtcacaggccagccagggtgaggaccagggtggaccactcagctctgggaccctgtgtgtgtgtagggagggagaagaggtgggaggaccatgggctgcttatccccaggaggtgggacgaagggggaggcctgatgctgggaggcttgtgtggtccgccaccaacagatggctcctaccagggcgacagggacggaggcgccggtggcaactggtgctgggtcagaaccaagccactgcgtgctgtcgtgggtgcagaagcttagctttggggtagaagggacagtgggccaggggccttccctcaagaagctccagctcactgaaagcccaagcagacccctgaaggactatatctctgtgtgccgagatgctcccctccatgagctccaccttcattgtgcataggacgctgattcttagtacacagcagcaacagagcttcagcagatgccttcttgggaccgcgcttgactctagttccttctccccgggagggagaaagggaaggagcctttgaaatttcccctttcgctatgtttcactggtttttaaacaaatagggctaaatagagaccaagaagttaaccatgtaccttaacgtgcggctttaggcaaaatgttattccaaaaaaaaaaaaaaagcttctaaaaattcatgtaccatcaaggaaatcttcacatgaatgggtttagaagcctttcttgatagcaatgtgaacttgaagaaatgtgtgacatcccgtttactcccatcaacaggatctatttccaaaactcatgctcctgccatttccccacaagcatgctgcg

SEQ ID NO: 5719 - protein, 121 aa, Homo sapien
SKVVLSFHFHESQLGPCGKNRRSAYSGVRGIRSSHRPARVRTRVDHSALGPCVCVGREKRWEDHGLLIPRRWDEGGGLMLGGLCGPPPTDGSYQGDRDGGAGGNWCWVRTKPLRAVVGAEA

SEQ ID NO: 5720 - DNA, 454 bp, Homo sapien
gctcgaggcgtggcgggtgcgcagtccgctgggcagaggcttgggccgccgagctggacccggaccggttttgggtactgtactgggggcagggcagagaggtgggcggcagttggggtgcggtgattgtagtaggctagggcgctttcgggtccccattgcagcccccggatgagcccgcagtattttccttatatgatcaggtcccattgcgggcggcgccgcttgcccggagcctgagaggattatgaaaacgtggcgagcgaaatggggccaggggacctggagcaggggcgtgaggagagtaggcagcgggtgaggctggatgggagggaggtctagggaggcctctgccgcgggcactgtgagtcctggccgatgatgacgagaccactgcgcaatctgagttctgggaaccaggtgatggagtatgttctgagaacagactgatgcc

SEQ ID NO: 5721 - protein, 57 aa, Homo sapien [sequence omitted]

SEQ ID NO: 5722 - DNA, 1261 bp, Homo sapien
tttcagtgctgtaagaaaggacggaggctgttatctatggcagatctatccaatagaggagagaaaggaccgcatacgcctggatctcatcatatgcaataaagagtttgaccatctgcctccaagaaatggggctgactttgccatcatggagatgaagaagctgcttgaggatctgggttacagtgtggatgtagaagagaatctgacagccaggcaaaccatggggaacagtgggtcagagactgtccagcatctttgggagtcatgtcttcacagtcacctaagaacctggaggatgcagtttgcaagacataccagagaaggacttcattgttttctgctcttcaacctcatgtatacgtcttttggtggtattaagtgatttgtgggcctgaggctacctttgaatgattctaccaaatcaagaatccctaagaaacaatgatccgagggaatgttgtgtgctctcccatattttacatgatcttagatgtgatgtgaaaacagattccttccccctcccacacccacgtttttaaaaattgtacttttcttataagtgttacaatttaaagccaaaggcataccaaatattaaagcaacacaacataaggaatcccattcaccacacaccatttaaacacaaatgatggattctgttatttatcaaacccatttaatgttttgtgtagtgttttcatggattccaggaatggcttccctttctcaaatgatcaatttcaagtcttattctccatatttcccatctgattccactatgagcagtgccattgcatgccctactagaactgtggatacgctttaaaacaagtggaagatgatagggtgggactcattacgtctaatcttggggaacactgataacgtgtccaggagagacagcacaaggggctccatcttcatcacacaactcatcgcatgcttccagagatattcctggcgctgccacctagaggaagtattttggaaggttcagcaagcatttgaaagtccggaggcaacagtccaaatgcccaccatagaacgagtgtccatgacaagatatttctacctctttcctggcaactgaaaatggttaagcattgagagttgttggtggtgtatgaaataaatgaaagtgtgatattggaggaaaccacaagcagcccagccctcctttatcaacttcaagaaacacctttactagtacagattgaatgcttaacattttgtatttcaataaaggtgaagacaaatg

SEQ ID NO: 5723 - protein, 127 aa, Homo sapien
FSAVRKDGGCYLWQIYPIEERKDRIRLDLIICNKEFDHLPPRNGADFAIMEMKKLLEDLGYSVDVEENLTARQTMGNSGSETVQHLWESCLHSHLRTWRMQFARHTREGLHCFLLFNLMYTSFGGIK

SEQ ID NO: 5724 - DNA, 2524 bp, Homo sapien; identical to SEQ ID NO: 747

SEQ ID NO: 5725 - protein, 726 aa, Homo sapien
MADSSGQQGKGRRVQPQWSPPAGTQPCRLHLYNSLTRNKEVFIPQDGKKVTWYCCGPTVYDASHMGHARSYISFDILRRVLKDYFKFDVFYCMNITDIDDKIIKRARQNHLFEQYREKRPEAAQLLEDVQAALKPFSVKLNETTDPDKKQMLERIQHAVQLATEPLEKAVQSRLTGEEVNSCVEVLLEEAKDLLSDWLDSTLGCDVTDNSIFSKLPKFWEGDFHRDMEALNVLPPDVLTRVSEYVPEIVNFVQKIVDNGYGYVSNGSVYFDTAKFASSEKHSYGKLVPEAVGDQKALQEGEGDLSISADRLSEKRSPNDFALWKASKPGEPSWPCPWGKGRPGWHIECSAMAGTLLGASMDIHGGGFDLRFPHHDNELAQSEAYFENDCWVRYFLHTGHLTIAGCKMSKSLKNFITIKDALKKHSARQLRLAFLMHSWKDTLDYSSNTMESALQYEKFLNEFFLNVKDILRAPVDITGQFEKWGEEEAELNKNFYDKKTAIHKALCDNVDTRTVMEEMRALVSQCNLYMAARKAVRKRPNQALLENIALYLTHMLKIFGAVEEDSSLGFPVGGPGTSLSLEATVMPYLQVLSEFREGVRKIAREQKVPEILQLSDALRDNILPELGVRFEDHEGLPTVVKLVDRNTLLKEREEKRRVEEEKRKKKEEAARRKQEQEAAKLAKMKIPPSEMFLSETDKYSKFDENVSMVCPHMTWRAKSSAKGKPRS

SEQ ID NO: 5726 - DNA, 2310 bp, Homo sapien
  Unsure 1077-1114: Unknown base
caaatccagtctctagcagttatgttgttagaatggattcatctgtgcttatttcacaatacttcatttatagcaatgcttttccttaagctaatgtataaatatttctaaaggccattaatagtaacaaaataagtaggggaaaaaatggaccttctgtataaaaaccccttagcttttttttttcacaagttataagtggaataagttaataactgagctcgtaagtgtatctcataactataagagctacatgaagaaaataggaataacacacctggtatttaaacacaatcttcaaaattcttgcaacattaaacatagtaaaatgccagaatataaaatgaggtgtgctaatggtcacaggattgaggccagcattacagtttggggtgatttttcttttatttgctccctcactttgtttcctagatgctagtaggggtatctgggttgcttgagataccattttgcaattgccccttctctttctgcctaccatcttctcaggccctgatgagcttattggtaggcaactgggctgctttaatgttgaacttgtacttctttagaaactgaagtggaatcattgaaaactttcaataaagctttaaagttccatttacttttgaagcacagctaagctcctctgaaggcagctggtttgttgcaaacttaaaattgtactgaaaagttgccactttttatttagtaagaaaacaaacattctggctcactagagttcagaaaagtaataatttgagccaaaggaatttgaattaagaaaatagaaactaggtttcatgtatttaaaaaataggaaataaaatagaaactcaaatgccatgaagttatcttcctcttccttatatcccctaagtttggggatataaggaagaggaagataactttccaattcctaataacctaaattattttgaaatagtgttttcagtgaaatgatgaatgtttgaatgtttgtttggtaatcaacataacaatgctaacaaaattcccacttagattttttaacttttaaaagtcagcgtggttttgataatttgatattttaaatgnnnnnnnnnnnnnnnnnnnnnnnnnnnnnnnnnnnnnntgttaataaactgataggatggagtgagcaaaattgttttcagggaagatggcacattttagaaaagacttgcccagatgatcttccatattgctcccccaatgtcatttatcgctcatgccaatcctcctcttgttacctgtggctatggtaaaattcctttaacaagcttcattgtgtccaagtatttcagagacttttaaaagctgggcatgacatagcgttttgtgctgttaagaccttagcagagtcaggtagtttacgggtaatattcaaccttgtgcatctgaatctgtcatggattcccttcactcagcactttgccactaatttgtattacactctgtggccatataatacttgcacattatgcaaaaaaaaatgttgatagtatctccttgccacacaatatgcagagttgacaacctttgaaaaccaaggtaactaatatgtatgtcctagttgtgtggcgcttggtaacaaagtctgtacatattatgtataaaatgtgtattggttagcatttagtactaagaaattctgagtttaaaataagtgatttttttcaaagtagcgatatctatatctgtgtttatctaaaaatactggcttgaatagaaaacattctcagatgattcaagattgagtaaaaatgagaatcccatacattccattattaaattctgccctattcccaattgttagcatctggctgatattaaggtctttgattgtcacaatattctcaataaatgagacattctgaactgcctggtgatattttcaaaaagagcaattaaaatgtgtattccctctaatacagctgatagaactgttgtgttaaagcaagttggaaatttgcatgatagtgtggaaaccaatggaggtccaaaatattaatcatatctaaaatatcagaaaatatcaatactagtcttctttatgcatatttttgactttttaagagggcttatgaattcaatgtttcttctgaggcaatccttttaatgtaaatactaaatacttgcatgtcttttgacaaaggctaaactacaatctattaatatgcacatttttgataaaatataaagtaccctaattaaagaaattgtggtagaaggtgtatgtcctgaatactatacctgtttaacaataccaaatgttaaataaaaatagtttgaaattaatgtttaaaa

SEQ ID NO: 5727 - protein, 36 aa, Homo sapien
QIQSLAVMLLEWIHLCLFHNTSFIAMLFLKLMYKYF

SEQ ID NO: 5728 - DNA, 854 bp, Homo sapien
tgaagtgttgggattacaggcgtgcagctgcgcccggccaattttaacttttcataatagatttgtatatatttatggtagtaaatgataaaatagactagtgtctacatatattatatgaattcatgacacacctttttcttagtttttcagtatttctaagctacatggtgcatctgcaagttttttaaattgttgcaaatttccaaaaaaattttcaatatatttatcaaaatatgcatataagcggtcctatgcagttcaaacccgtgtttgagaatcaactttatgacttccagtgtcattctccaccatttctgcagtttatcacattttgcttcaggcagatttggtaaatcttcaatgatagttctctaggccattgttttgtaacatgatcaaatgcttaatgggaaatagaatatgtatatgtattctttgtctaccaactaccaaagaaacaaatactcctcagtttgacttgacttagtaaataaacttgtgttgggttaatggagctaatggttattttactttctgctgaatctgttctctaaccttttgccctgaggattaatattaagtatattgatgtacaatttttagaatgtgcctgccccctctcttcttaacgtgacattgcttacctaactctgggcttaatacttttactattctcatgttttataaacagaacagttttgtggttatacttcaaattctttagatatcataaatcaattattttaaacgttttggccttaagatcttaacatttaagaacttaacactcaagaacttaatgctctggaaaaatattgatgtccccaaagggtgttttctttttcttgctt

SEQ ID NO: 5729 - protein, 28 aa, Homo sapien
EVLGLQACSCARPILTFHNRFVYIYGSK

SEQ ID NO: 5730 - DNA, 1576 bp, Homo sapien
  Unsure 69: Unknown base
aacacaaaacacaatgaaaaaattgttgaatcttaagctgcatgttgtggaaaagaactgtaccaaggnggcatacagagattaatgtcatcttagatgaacaattttttcaccctgctagtttccatttgggacatagggtgtttgctgtggtaccatgcatagacactcagagcttagcagagttatgtcagattatctctctaaaacaatgtgttgttccttaccaaaaaacgtaagcccctctggccggaccttattttggtcattatgggaggcagagcattccaaggtcaaatgacgggttttccatctgggaagtattcttttggttgctggtgtttccttgggagtggatgtaaaccttaagtagccagtagtgaccttgagtacctctggattactagggaaggggaggtagggatgggaagttgggcggtacacctgattatagcaagcatgaagataatagttttaagtttgctgttttgaatctgggcactaacttcaatgcttgccgggaaaatcttatcttgtaaagcaaatcctagtgaggtcacgaagtgtgtctcctcctccaattggggttcagcactatggcttggtgccctccatgtaccaatagttttgggtcaggcctaaggggtccttggtcttagctttgcccggtttgaatattttctctgctgttaactgggcagggtggcataggtggtcatcttattaccttctgttgcctgatgtgagaatcaggatacccaagtctggctttaccttaagccaccagatatggacacatgtctgcattatctttgtattcttctccaagaaggatgctcctagtgagtgagctgcctttctttgagagagagtgggaaagttaatgagttcacatttagaaagtactctggagtctttggtgattcaaggagtgttattaaattagtgggagatatgatacggagtggggatgctaaatacatatgagctccccaagggtgagtcatgtgtatgtgtacaggaaatgcatccttatttcatataagatcaagagttcaatcttacacctcccttgcctcccaatggaaaccaaacattcttcaaaactgctggatgcttgcttttctttacataactgcagttcagttggaggagtgagagaagtgaagctaatatttacagagagtacctactatgtgtcagatactttgcaatgtgctttacagaaatacataatcacattctttaaacaaccctttgaggttgatgccttaattcccattttgtagataagaaattgagtccagaattaagttcagataatttgcccaaagccatagagttttcaagtcataaatttgatcttagacctttctagttgccaaggccttcctacttagacagaatccatttggagagaaaactttctaacattcttctaagaggtcttgattcttggcacattcttctgtgtgatgtgttctctgtcaggcttgtcattataggggcaggaagaacgcactcatttcacttatacatatctaccattgggatgtgttagtagtgggaaagtaaa

SEQ ID NO: 5731 - protein, 27 aa, Homo sapien
  unsure 23: unknown amino acid
TQNTMKKLLNLKLHVVEKNCTKXAYRD

SEQ ID NO: 5732 - DNA, 3413 bp, Homo sapien
  Unsure 1116-1139: Unknown base
gtgtgaggaatgaaaccgagggaaggccatttttaagtaacatgctgtcttttatcttgtcagcgctgccagtttttgtttagtatagcattccagtttctgtaataattttaaatggaagtaaagtaaggaaaatgtatgataactgactttttactctgatgttaccataggggtaatgaagttcatcgcagattgttttctaaccttcggtgcatgtattgaaatagatttttgttttaaaaatatgagattacatttttctggatctggtgtgcattggggtagagaggatgactgtcttaaaaatagatcgtgtattctgcctagagcaaagactcttaagtcttttggctgaaaatgaactgagtatggacaaaaatattgaagtattctacttgtaaacttaccgtataatcagtgtcttgataaaatagtagtttttgttggttgaatctaagaatgtgttggacttgggtaaatttcagacatgaccaacaacaaaaaacaaaagcccaattccttaacctttcctgactgaaacttctcaggaagaaaccagttttgaattgtatgacataaataagattgtcttttattataagtttttaaactatgtaataaaacatttggggataacatcagttgaatgtgctacttttaaagcattaaaccactgacataagccttctgtattatagaaacttctgagttaccaaaatttagtctggtacagagcccttgaatatgttgtggttccctcattatggcccttcattcccttctgtgttaatagtaaagcatgttgcctaataactacaaccctgaccaaatttgggcctggatctcatgggtcacgtggagttttaaatacgatttttaatttacttgggtaattgagctgaatctttagttttcagattacttttttaaacagataggctcttagaacaaattattaaaaacataataccccattggaggggaatctggattaactacccactgttcccaccccccccaacttttgaaaaattttggccatatagaatgcatgaaaaatcagtatgatcttatgaggactttatagtactgtaaatcttaggagcactttannnnnnnnnnnnnnnnnnnnnnnntaccagtcaaatagcagtgggagattgtataccaactttagtgacactgatattagtaagttctgataacccactaccatcggaccagcctggagcacattactttggccagtggaaagtctcttggagagactttgaggtttgtgatgacaaatcatgctatcgttaaagttaaatacatatatatacacacctagaatataagcagaatggaaaagttggcagggatgaattcaagaacattagagtgaatttttttcattacagaattgttagttcctttaggaacttagtctcgtagatgtatatatttaattagcataacttggacagcacaagattaatgctttaacttgtttgcaggagtttaaaaagctggtttctgttgccaatagttggttggaagggaaaatggagatgccacaaataaaattttttggatgtgcaaaacagttttgattttatttcttacaaactataggactccaagccccctgatccttgatcagaactacattaacaccaaaaatcaagttatcaaagcagagaggagggtgctaaaggagttgggattttgtgttcatgtcaagcatcctcataaggtgagttgtagagtacagaaattgggttcgtaagtattaggacttttctaaaaattttattttatatgaatttatgtttctatctgagtgttaaccttggttttaaaaagcattcttttaaaggttcaggcttcatcgaaaaacattcttttggatgttgagatttatcagtaaaatgacagtcaaaaatgtaggttcaaatcttaaatcttaattgtgtgctcatagagaagttatttttgtttctgtggttaaagtcccagtttttccacctagaaaacagagatgtaaagttcctcattccaaggaataaatgtgtagctacaaaagtatctggcacacttatcatcatagtagaatgttctaagtgtgttggctgctcactgttaccattattggaaatttgtttctcccaacatctcttagctttcattatcaatataagccatagagtgagttacccgggtcaggactacctgggttagaaatgtaccttgggaaattaggtgaaataatctagcacggtgcccatcacatagtaaagtgccaatgaaaaatattcttttaattgccttttttcctgtacaattttgaaatatgcttctaaacataatttatataaaatctagtcatgtagcagttcacattagaatcttatgtacatttaaattggtctgtattatcgatgcacaattagaacttgagtctaacattttcaattacttttttcattgaactctactccgaaagaactaccagtatactaaattgagtttttttcccttgtccttcagatcattgttatgtatttacaagtcttagaatgtgaacgtaatcaaaccctggttcaaactgcctggaattacatgaatgacagtcttcgaaccaatgtgtttgttcgatttcaaccagagactatagcatgtgcttgcatctaccttgcagctagagcacttcagattccgttgccaactcgtccccattggtttcttctttttggtactacagaagaggaaatccaggaaatctgcatagaaacacttaggctttataccagaaaaaagccaaactatgaattactggaaaaagaagtagaaaaaagaaaagtagccttacaagaagccaaattaaaagcaaagggattgaatccggatggaactccagccctttcaaccctgggtggattttctccagcctccaagccatcatcaccaagagaagtaaaagctgaagagacgacaaacttgcagcttaaaatgggcaccagttcccacactggcttaatttatataactgcttggctgtattgcgggtaataatattagaagcaagaagcacttcatttttaaaagagatgttactataatattgcttaaatgctttagcacttggacttcttgagatgcagatgtgtgatttggagtgctggcttatttaaaggtcaagccaaggagtttgtggttcagccacaactactgtttcctaagactattgatgtgaaggacttagtgaagtaatttttatattctgggcttcccagcaagatgtcctttttatgactgccatgcttcttttggactcagtaaatatttgtaatgttagaaaagtctcattatttttataaaatgcatgacattttaagtatgtgttgcataaaatggattatagcagt

SEQ ID NO: 5733 - protein, 149 aa, Homo sapien
MNDSLRTNVFVRFQPETIACACIYLAARALQIPLPTRPHWFLLFGTTEEEIQEICIETLRLYTRKKPNYELLEKEVEKRKVALQEAKLKAKGLNPDGTPALSTLGGFSPASKPSSPREVKAEETTNLQLKMGTSSHTGLIYITAWLYCG

SEQ ID NO: 5734 - DNA, 1087 bp, Homo sapien
attgaggagcgactaatatagctccctggcgttgtaggtgggagaagtcaggagtgagttgcaggtgcgggccgttcttttggttttgtccacggatagctgagttacagagtaactgtgtagtctgtgtggtgcagggggtggcagaggggaaggggcaggtgaggcttggcatgaggggcttctcattgcaggcgtccgagggagttcagtggaggagtaagacccagggagagcccagctgggctgaggcttgttttctgcacatgggttgctccaccgtgaatagttaatgaactaagtgtcattttcactaaatctttcctttgcaccaaactcactaccattcttcatggagtctttctggggcttctgtttgcaatgactcatctggggagaggacggaaggacagtcagtgtccagcttggttggtagatgggtaggtcagatggagatgagaaagaccttttcccctcatcactctcacgcagttaatccagagccccttagagaggtttacaactggagctgctatttaaaggcctagatgagaatgtaatagtaataatgatcctcatttttattctcagctgacagagcaagggaatgtgtgtgaatgctaatccatgcacatacatgtctataaatattctgcatggaaccatctgtgtctatgtcaagctaaactggggttcataccagggtctccaaccatagcccatccccactggggtccttccagctcactcggcttctggatgtacgactcccacaggtggaggaaggcccccagagaagtctgctgaaaattgttattcatgaatggaggttggacttcttcagatacacttcccgagtctgttaacatggtgatgtgacgtttgcccttcatgttactcatagggactattctgttagctaccaattctgctgctttaaataaaaacaccattaaaaaacaaaaagaaaccaaattgtaataaaatatttgcatacatattaaatctgaaagacctatatcaaaatataaaggtccttcctttacaaatcaataaatatacctttttaaaaaaacagacaagacag

SEQ ID NO: 5735 - protein, 6 aa, Homo sapien
IEERLI

SEQ ID NO: 5736 - DNA, 1132 bp, Homo sapien
  Unsure 795-822: Unknown base
tgatccactcgcctcagccgaagtgctgcgattacagacctgagccactgcgcccagccttgatcttgaggtaagagggtactgtacagcagttactctatcataacacctaaataatacctaaagttaaagagttttgatgaagttcttggcagcagtgcttttccccttctgctttccaaaaggaggtaaaaagaagccagtcaatttcaaaaacccctatcctgcttttattttcagctaccttgaaagtgagctgaatcaccatggaaatgtgcaaatgtgaggtttgcatacttggttttaagccctgagcaccatatgctaatcaggcaatcaggattctgtgcctccctgcagtcagttgcatttctatttaaaagtgcattttggtttggaagcccctttctggagcctaactaccaaaaggcagcaactttttgtatcattacaaagaaagctgtgtaagtgcactcccaagcaaaggtgtggtaggagagtagcagccacagaggacccaagcccaagtcttggcctgagttaagttagtgctattgctcccattgacgtgctatgatgtgaagccgtttctggtacagtgttcctttgctcagcaccttaaaagcttggatttaatagtaactgggtaaccttaatcagtagtcagaattatcaacactttgctttatttgacacaaccagactttctcagttcctgttctgtatctagagcaacgtcttcatactgttttttcacaaaatttttatttaaaacagttgtgacagccgaaggannnnnnnnnnnnnnnnnnnnnnnnnnnnatgaaataacttgtacaactggtgcgtaccatggctccagccagatgcccaaagcactggctattaattcctggagttcagatggtcagttgagtctatcctagttttttgcttcacttgttcaatcatggaactttctagaacgctgccactcttcaaaggcttctcaatttcaaatttgaaaacttaattctctccctcttagtttcaaagttgttacagtgttatctatgtgaagtatgtggaaagttgggggctggggattttcctccaggcagattaagaaacagctctccgggtcgggcgctgt

SEQ ID NO: 5737 - protein, 48 aa, Homo sapien [sequence omitted]

SEQ ID NO: 5738 - DNA, 2446 bp, Homo sapien
ctaaaagctgctgtacaagcctttaaagaagcaagacaaaatgttgctgaagttgagtcatcaaagaatgcttcagaggacaatcattctgagaatactttgtattcaaatgataatggaagtaatttacagcgtgaagcaactgtcatcagtgagcaaaaagtcaaagaaaccaaaatattggcgaagaaaccaatacataattcaaaggaaaaaatagcaaagatggaacatggacctaaagcagtgactattgcaaattctccatcaaagccttcagaaaaggattctgtagtttcccttgagtcccagaagacacctgctgacccaaaactgaaaactctaagtcaaaccaaaaaaaacaaaggatctgatagctcactctctggtaacagtgatggcggagaagaattttgtgaagaggagaaggaatattttgatgatagcacagaagaaaggttttacaagcagtcttccatgtctgaagatagtgatagcggtgacgacttcttcattgggaaagtcagacggacacgaaagaaggaaagtagttgtcattcttcagttaaggaacaaaaaccactagaaaaagtgtttcttaaagaagatacaggtgaaactcatggggatacaagaaatgacaaaatcaagccaagtacagaaaccagaaagttagaatcagtgtttttccactctttatctggatctaaaagctctagaagaaatttcaaagaacaggctccaaaaacaagatccctagattttccacagaatgagcctcagatcaagaatcagtttaataagaagctatcaggaagacttgaaaatacaaaacagcaattgcagctgcctcttcatccttcatgggaagcaagcagaaggcgaaaagaacagcaatctaatattgctgtgtttcaggggaaaaaaattacgtttgatgattgattagtgcctctttctgcaaacttttccatctaaaaaaaaaaatgttttttttgggacaggatctcattctgttgcccagactagagtacaatattgcaatcacagctcactgcagcctcaaactcctgggctcaagtgatcctcccacctctgcctcccaaagggctgggactgcaggtgcatgcactaccatgcccagctttctcaccccaggctctgcagctattacttaaactcgtatttgaataagtctcttggggagaattatagaatgtttgtttttgtatttttttttaaagtaaattcaacttacgcttatataagcctttcacaaatccaatatgtacttaaattgatttttaataatatccctcagactgtttcccttatgaagtaatttggggattttagtgatctcatattttctctttagtgcttatcatgaaatgtgcttcactggttcagctctgttgtttccttaaacataaatgtcaatatatatttaaaataataatggaaacataggaaatcagctatttaaaccagatcacccttgttaaaaatcattcttgttagcaaactaaaatagtaacttttattatggatgtacagataaatattaattttattatagttttaagtacttgtgatcatgtactttttgattctaaaatagttgtctaggacaattttgggattcttaattatattttagttaagaaaattgtttaaatatagcaatacaaccaataatttgttttatgtttcactgcatataaatatttccattaaatcaagaatgtatattatctagtttttactatacttattttaaaatttttgaggaatcatagattctaatttttaagaacaaattctgaaggtggtaggattaaaagaatatttccactgatggctaagcaaagaagttgtaagatgactcactgaggaagggactgctttatacatcacagtactgctatttaaaaggaaaacagaaatttttaaatcccttcaaatgtttcacttttgctatgctgggaaaaattttgaagttcttggtaaactgaataatgctaatccatgtttcctgcacattagttcctttaatggcagggaaggccatctggttaacctgtattcacaaactctcaagagtttctacttatttcaggagcttaagaatttagataactcagccgggcgtggtgactcatgcctataatcccagcactttgggaggctgaggcgggtagatcgctagaggcaaggagttcaaaaccagcctgggcaacatggtgaaaccctgtctctactaaaaatacagaaaattatccaggcgtggtggccggcatctgtaattccagctactcagaaggctgaggcataagaattgcttgaacctgggaggtggaggttgcagtgagccaagattgcaccactgcactccagcctgggtgacagagtatgactgtctcaaaaaaaaaaaaaaaaaaaaaaa

SEQ ID NO: 5739 - DNA, 672 bp, Homo sapien
ttacagttttcataagccgtttctcccaagttacatgttgtgtggcatttcatgtaggtttgtgctctgtgtgtgttattagattgtcttccagtcagaattcctggctgttaaactatttcatcagcaggagttacatccctatgttgtaagggtaatgtccaaaagatacagtaatttttaaaaataatgattaaaggactttgttagaaacaaagagctattttgtatttagtatttgctgtgaagtaggtgataagtcgaattttttagcttctctctgagaaaaatgaagtgtaagtgaggcgttacttttcgacattttctacatgtagtttccttttgtctattttttaactttttttcctctattacactgaaatacatatttaatctgataaattctagtcaagtgcaaatacaaaataacaaaaagaattaaaatcatccatggctctaaccacttaggatacctcctattatagtctatgtacttccagtcagctctcattttctctcactttttcttgctccatatctctgtcattttatttttaagcaacatattataaaatgctattttctaaaactttttaaaaatttaaacataaataaaattttatttaacttgtatattatttattggtttagttttttattatgaataatggt

SEQ ID NO: 5740 - protein, 49 aa, Homo sapien [sequence omitted]

SEQ ID NO: 5741 - DNA, 2963 bp, Homo sapien
  Unsure 1518-1630: Unknown base
  Unsure 2760-2798: Unknown base
tagtctattcatgtttatctcctttttataaaatagattacttttaaacacccctgctaatatttcaggatattatcacttacgtagaggtagtggtcccatttgcttctgttccatttcctggtgttattcatgtgtgaagagaatctttttggctgggttggcctgcctcaaagctgctccaaacttataattcaccaaaagtgacatcatcccagccaccaccaaagaattatgattggagtcgaggcattgcccatggaacacataactctgcagtggtttcccctacaaaatgtcagccactcttacgatggaatgtgcccttgcctgctgtgggcaccgctcaaatctaacccatcatttttcttttcattttgattcacttttcctttcagagattcaaacaaaaagaaaaatgggaactgaaaaaatttggggttttgaggggtgagggagagaccttatggtagaaaataaagtgttttttttgatatctgaaattttatatgctcaatttaaatgttttattgcgtttgttttttccaacctgtggaaaccccttaaattcttactgaatgcatagatcttttatttgcatgaatgtcctgtatgccggaagactaagtgggagcactgaatgctttgaagttctgtgcctgtgagacttgggtattttaatacattgttaccctattgcatcaaatcacgcctagggatgcattcaataaagactgccccctccccgcttagctgcgctgggactcccttctggagggccagagtttctactttgtttctactttgactcctaaaatgaggactgaagggaaagcagatggcattttgtacctctgacaatgaagcctaaattgtttacgttggagagggagtgggagataagctaaagaatgtgatttgtcttccatttgaagataccagggaaaagtcttgtcaagtagcaggccaccggtgtctagtgtagaggagacgatttctgtcgatagagagcaaagccagccaggcaaacgaacccgtaagccgcctgagggacagacaggcataaaacctaatgaatgggtaggtagactttgggcaaggctaattgcagcaagctgtgttcagttccccggcctctgttaagtagtcatttttatacaatctgtcggagggaagaggaaatagacccacacggtaaatgaacttgtggtgtttagctaggaagtggagtttgctctaagtagctctggtagcagactccagggagcacatggcaggcggactcatctgagtatctgtgctgaggagttgtgttaaactgttgaaacacttagaaattgctatagaaaaagagtactcccaaagttgccagctaatatggtaccgaatttcctgaaagacctttcttttgccatgtggtttttctataaagctgagtcaattaggcttctttatctccctgtccttggcaataaaacgacaaaagccgagggttgaacaggtagacactgttatctnnnnnnnnnnnnnnnnnnnnnnnnnnnnnnnnnnnnnnnnnnnnnnnnnnnnnnnnnnnnnnnnnnnnnnnnnnnnnnnnnnnnnnnnnnnnnnnnnnnnnnnnnnnnnnnnngcaggtgataacagctgaggtgaaagagcattttttctgggaagatacagggtgtttaaaggtacctgtttagtgcacagcacagttgcagtacttttaaattggagactggaatatgtaagtagatgtttgaatctctctctgtctttcagtgttacaggtgaatcaacaaaattagaatatctttctatttagtgactgaagaaggcggtccatgcatatatcagatctagtttggagtcacagactagattctggaccagagatgaaagatatgctttgggtacctctttttgattaaatgtagtttttaaaatagtgacttgactatacctcaaggagtcttcataatcttctgcatgggtatttataggcaataatgctaaagaagacagtgccagtacaagtgaaatgataacatgattgcagtgttacggcttttgttgatgaattatttgaactgggaggaaaaacactttgagaactaaatttaaagtaattcttccgatattatcagtaagacctaaagatggttgcttttagaggacctaaatgtattaaattcctgatttagcatgcttatagcaaggcttcaaatatgtttaattctaccagcttcttgagcttcttaaggagagtcatagaatcatagggaattaaaatgaatgttagaaatctgtatctcctctgacttgactggatcacacctagagcaacccaaatgaaaaatgtaccttgttttaaagctctccagggaaaaatattctaaaacttcccctgataacttactccaatgcatagtaaccctgagacttaatatttacaaattggtttcttatatatggatgaaaggaactctaaatgtatcgtattataaaaggtatgcattacataaaggaccttttatacaggaaaaaaagtatttagatgaaaaaacttcttaattatggaggtacatctacaatacctaaaattaaaaataaaatgaagtgcattttcctcctaagattttctcatcaaccccgagaaccactgctggaaattacctgaagaagaaatcttaccttgctctgtatctttaggaaatgttttacctaattttagaaggaggggaaaagaacgataacatnnnnnnnnnnnnnnnnnnnnnnnnnnnnnnnnnnnnnnngacacaaacacaggcacacactgtagtttcctaagcagtttgttctaattcttcacatccccctatcaaaatgtttgcttatagctttctttgtattgtcatttaagcccatttctaattggtgattgttggaaattgaataaatgtgttcagtttttcataatg

SEQ ID NO: 5742 - protein, 14 aa, Homo sapien
VYSCLSPFYKIDYF

SEQ ID NO: 5743 - DNA, 826 bp, Homo sapien
caggtatgagccactgtgcctggcctcattatcccttttagaaattattgtcaatctctctcattctacctcctggtaaggagctactaccaaatactaaagctactttttcttactcgttcgtagtactgtcgagaatcagcttatcttcaccctcttagactatatgtgaaaaggcacaataggaagtttgggcacattagagacaaatgtgctatactttacggcttagcctgcgcccggttcttatttatcgtcaactgtggacaaaatgattttgtttcatgagacaaagggggaccaccaacttctacggtaatgtctgccttttgctagatagactggctattacataaccatatgtagtttatttttaaggagaattacatatttttcttcacatgtcactgttagaagtaaatcccaatagtaagatttccctaaacaaagtatttcttgtaacatataactcataatatttagaaattacagactttaacctttagaataatcatggtttgttttgtttttgaacttactacctcagagtcacatggtatatatcccctatgatacctgtaaaagacatctaaattggtcaattcttaaatattttattgtgctaacacaaaagttttattttatttggagtgcataagatacagaaacaattctttatgatcttacatctctgtttttttaatattgcaaataacataccactttgacataggcagtttctcacttacaaaagtaaaatttgaaatgatcagtggtcaccccatctgtatatttttgccaccactaccagaagagccatgtcatt

SEQ ID NO: 5744 - protein, 19 aa, Homo sapien
MISGHPICIFLPPLPEEPC

SEQ ID NO: 5745 - DNA, 524 bp, Homo sapien
aaaaccaagttgtcttggaacaaagatggcattctccatggagtcagatatcaggatgggaatctggtgatccaattccctgattactgtggcatgatcctccaccattcacactctaccctggactctgggaagggacactgctgccttgaaactctacaaccctgaaccttgatgctggttgctgcagacaagaactgcttctaccctgggtcactgtcactgctaagtggaaagtcatgaacttgatggtaccagtcactctgggcctaaaccgacatagccaggaaacggttcaccccccacaaacagaatcatctagacctgtccatgatttggaatcgtggcccaatacttcctggccccagagagagaaaaaagtctgaccaccccctactcaaagtgccaactcatttccttcccagaattaatcacttcccaaaatgtatgactgtgtgaacatcaattcccttcaggggaaaaccccactcccacctctcaggctgtcatcttaccctatgacc

SEQ ID NO: 5746 - DNA, 346 bp, Homo sapien
cacacacacacaaaattccccagagtgaacttttgccaactgtaccagactgggacattcctcacatcaaagaacttttaccagaaatgactgtgattcccaagctagcctcaatcatacctctctagtgccctctacgggaaatttttaggaaaactatcttgggaatgtatttttccagtcccagagagtgttaaattggtgagtttggaattcttaggatgctttttctttttaatgagggacaaataaatgccacatatttaaccgtggttaactaggaactgcttgactttgagtttcttttttgttttcttctaaataaaacctggttaaaaaaggagtg

SEQ ID NO: 5747 - protein, 41 aa, Homo sapien
HTHKIPQSELLPTVPDWDIPHIKELLPEMTVIPKLASIIPL

SEQ ID NO: 5748 - DNA, 591 bp, Homo sapien
actaaattctgctggaacccagcaagtttctttactggcattgtttggtaaagagggcccccttcattaaactggaatattgcaagcaacactctgtggcagatgatcaaaactgtctgacacaatttgagcttgctatagcaagaaagtctaacctattccggtgttctctctcccatgagacaagccgttatatagacttaaacagtgttccacctgttggctaaagctgggttgagttaatgactttgttcatgagggatgacagggatccttagggccacctctccctagtggaggcatcatcacttcatcttactctttcttagcagttacaatacccctaatattttgtgtcactccattcttagactaacattcttacgtatgaaatacatgatgaatttgatctgtgaagcctcttaggtagcattgtgtgtgctgtgtggtttttctgaggggatccataggaaaataagggcagggttttaaacgttaatgatgggcaatgaggtaatgtaagttatggggttaaatttttatttccctttttttctgtagagaatagtgacagtggtacaggaaagaaag

SEQ ID NO: 5749 - protein, 22 aa, Homo sapien
LNSAGTQQVSLLALFGKEGPLH

SEQ ID NO: 5750 - DNA, 903 bp, Homo sapien
gtgtattatgcctccatgacattgttacattctatgaggagcatctgtctcctttctagacttgaactgtggtagaaaaagcccccttctctcttctatctacttagatttggtgatgctaggaatgtagtgttttagatattaattctatttttatttattcatttttacatcaccaataggatctgaggtggagatggcgggtattatcactggcattttacaggtgagaaagcccaaagccactgaggtaattaatggaataattgattttgaacttgggtctgtctgatttcatgtgcaagattatatacttagtgattttgattttaagtttattcttaacattttaaaccagactattaactcttacctttataaccacagatacaaagaactgtatcatttattttctgaatataaaatattaatggtcaatataaaaatacaaaaatagagaactatatacaacagaaaagcaaaattacccactaataacactttgatttatatccctttagacactgtttagagtttatacatatatgtaaatatgcttgtattttaacaaaattgagatattatataaactgtttgtagcagggtgtttaaaattttaacaatatgttatggatatctttctgtgtcaataaatgtgtatttacattagagttccaagcatttgaactgaatctagtccaaaaatgatgtgttttatttggccaggggacattttttaaaaaaatctttaagcaatagacagcttttgaaattcagaaaatgttacgtacaattcaatgtcctgcatgttttaaaatactggataatctaacaacacagaacacctcccactccccacctcacaaccaccacacatatactttcttgcttggcatcagttaa

SEQ ID NO: 5751 - protein, 40 aa, Homo sapien
MLRTIQCPACFKILDNLTTQNTSHSPPHNHHTYTFLLGIS

SEQ ID NO: 5752 - DNA, 338 bp, Homo sapien
gcctaaaggcagggccctcatgactctatcacctaccaaaaggctccacttctttatactattggaggggtagaaggaacttcctttctagaccttgaaggtttaagaatttgaatctataaaacaagctgacaatagacagattaacaggagaaaaagcatatacattttttaatgtgggccagatggcagaagcttaaataacaccccaagctacaggaagtgaggcctctgatggggaggtagtgacacaggctgtgggagggggtagggggaggaagtctgtggtgagcaaagtttgccttattacactgataaagtgtaattacactaataaa

SEQ ID NO: 5753 - protein, 23 aa, Homo sapien
PKGRALMTLSPTKRLHFFILLEG

SEQ ID NO: 5754 - DNA, 1227 bp, Homo sapien
  Unsure 751: Unknown base
  Unsure 756-887: Unknown base
  Unsure 948: Unknown base
  Unsure 950: Unknown base
ctagcagggtgaggcgtagctctgtctcaaaatagagaaataaaaataataatggatagttagtgccctgtgtttttcctgtgattaaaaaaaaaaatacctgttttgtatttaactttggggtgggataaggtatagcccacttagtcagttgtgtctaagccacttgatgaaccagtcaatccagtcttcacctttaacaaatgctgatttcttcaagtgagcaaaatatctcttaaactttttcctattttctctataaagttgcttttttctgaattttttctttatgaggcttgatgggcagccctatcagcagacaatcattcattcacccaacaaatatttgagtatctgcttcaagccaggggcagtgctaagccctggaagtggtatcttctccttatccgggagtggggctacagtgttcattccagaagactcaagaaaatagcagatcatcacaaaagtaggttttacataaatgaggaggaatccacagggttgtgtatatgtgtgtgtattttaaattctgacataagttggagctttagggtagactgtgacataagagtagtttgttttccaactcatgtaattgccggctgatttttgtcttgaattatgataatggtaacttctgttgaaacaattctgtattcatcttagcttggttgggatgcaataaaagttttgtactggtaaaaatgataattttcttccatgatgattttgaagcttttctgtaacncctgnnnnnnnnnnnnnnnnnnnnnnnnnnnnnnnnnnnnnnnnnnnnnnnnnnnnnnnnnnnnnnnnnnnnnnnnnnnnnnnnnnnnnnnnnnnnnnnnnnnnnnnnnnnnnnnnnnnnnnnnnnnnnnnnnnnntactctagcctgggcagcctcgttctttagagtaagacactgtctctttaaaaataaacangnagaaacaagaaaacaaagaaaaggcttttagtgaatatatttttagggtagcaagtgtaatttttataaattgcattatttgaatctaataaataccctcaaagctgaagtcgaattctgattttgattgaaaatattttttacttaaaggaagagggatagaataaatgacacgattaaggaaaagacttcttgtataaggccggggttttttaaatgatttttgcaagttagttgataccgcaatacaagccagagtacgatcactgccgtcgta

SEQ ID NO: 5755 - protein, 84 aa, Homo sapien
  unsure 9: unknown amino acid
  unsure 10: unknown amino acid
  unsure 11: unknown amino acid
  unsure 12: unknown amino acid
  unsure 13: unknown amino acid
  unsure 14: unknown amino acid
  unsure 15: unknown amino acid
  unsure 16: unknown amino acid
  unsure 17: unknown amino acid
  unsure 18: unknown amino acid
  unsure 19: unknown amino acid
  unsure 20: unknown amino acid
  unsure 21: unknown amino acid
  unsure 22: unknown amino acid
  unsure 23: unknown amino acid
  unsure 24: unknown amino acid
  unsure 25: unknown amino acid
  unsure 26: unknown amino acid
  unsure 27: unknown amino acid
  unsure 28: unknown amino acid
  unsure 29: unknown amino acid
  unsure 30: unknown amino acid
  unsure 31: unknown amino acid
  unsure 32: unknown amino acid
  unsure 33: unknown amino acid
  unsure 34: unknown amino acid
  unsure 35: unknown amino acid
  unsure 36: unknown amino acid
  unsure 37: unknown amino acid
  unsure 38: unknown amino acid
  unsure 39: unknown amino acid
  unsure 40: unknown amino acid
  unsure 41: unknown amino acid
  unsure 42: unknown amino acid
  unsure 43: unknown amino acid
  unsure 44: unknown amino acid
  unsure 45: unknown amino acid
  unsure 46: unknown amino acid
  unsure 47: unknown amino acid
  unsure 48: unknown amino acid
  unsure 49: unknown amino acid
  unsure 50: unknown amino acid
  unsure 51: unknown amino acid
  unsure 52: unknown amino acid
  unsure 53: unknown amino acid
  unsure 54: unknown amino acid
  unsure 74: unknown amino acid
  unsure 75: unknown amino acid
MILKLFCNXXXXXXXXXXXXXXXXXXXXXXXXXXXXXXXXXXXXXXXXXXXXXXTLAWAASFFRVRHCLFKNKXXETRKQRKGF

SEQ ID NO: 5756 - DNA, 1517 bp, Homo sapien
ctgcgcctggcgtcaccgaccggtgcggacaggaagaggctctgggctggcacatgtgtatggcggtgaggcgggcgggtacatggcgggctctgtgggactggcgttgtgcgggcagacgttggtggtgcggggcggcagccgattcctggccacctccatagcaagcagtgatgatgacagcctcttcatctatgactgcagtgctgcagaaaagaagtcacaagaaaataaaggggaggacgcgcccttggaccaggggagcggtgcgattctggcgtccaccttctccaagtctggcagctattttgctttaaccgatgacagtaagcgtctgattcttttccgtacaaaaccatggcaatgtctgagtgtcaggaccgtggcaaggaggtgtacagccctgactttcatagcctcggaggagaaggtcttggtggccgacaagtctggagacgtctactccttttcggtgctggagccacacgggtgtggccgtctagagctggggcacctgtctatgctgttagatgtggctgtgagtcctgatgaccgcttcatcctcactgccgaccgggacgagaagatccgagtcagctgggccgcggcgccccatagcatcgagtccttctgcttggggcacacagagtttgtgagccgtatctccgtggtgccaactcagcccgggctgcttctgtcctcctctggggacggcaccctgaggctctgggagtacaggagcggccgccagctgcactgctgtcacctggccagtctgcaggagctggtggacccccaggccccccagaagtttgccgcgtccaggattgcattctggtgccaggagaactgcgtggcgctcctgtgcgacggcactcctgtggtctacatcttccagctggacgcccgcagacagcagttggtgtacaggcagcagctggcgttccagcaccaagtgtgggacgtggctttcgaggagacccaggggctgtgggtgctccaggactgccaggaagcccccctggtgctctacaggcctgtgggcgaccagtggcagtctgttcctgagagcaccgtgttaaagaaagtctctggtgttcttcgtgggaactgggccatgctggaaggctctgccggcgcagacgccagcttcagcagtctctacaaggccacgttcgacaacgtgacctcctacctgaagaagaaagaggagagactgcagcagcagctagagaagaagcagcggcgccggagtcccccgcctgggcccgacgggcatgccaagaagatgagaccgggggaggcgacgctaagttgctgatcgtggcggtctgtttctgtcgactgtggaccacttatgtgcgatccgtggaccacttgcgtgcgatctgtcggccgacgatgagcttgttcggatgtagctccatcgtaagtcgaggagcatctgtgatttgtcctctgcttatgggatatgtttttccgctactgagtctgtgtagtaaatttttgactaggaa

SEQ ID NO: 5757 - protein, 412 aa, Homo sapien
MAGSVGLALCGQTLVVRGGSRFLATSIASSDDDSLFIYDCSAAEKKSQENKGEDAPLDQGSGAILASTFSKSGSYFALTDDSKRLILFRTKPWQCLSVRTVARRCTALTFIASEEKVLVADKSGDVYSFSVLEPHGCGRLELGHLSMLLDVAVSPDDRFILTADRDEKIRVSWAAAPHSIESFCLGHTEFVSRISVVPTQPGLLLSSSGDGTLRLWEYRSGRQLHCCHLASLQELVDPQAPQKFAASRIAFWCQENCVALLCDGTPVVYIFQLDARRQQLVYRQQLAFQHQVWDVAFEETQGLWVLQDCQEAPLVLYRPVGDQWQSVPESTVLKKVSGVLRGNWAMLEGSAGADASFSSLYKATFDNVTSYLKKKEERLQQQLEKKQRRRSPPPGPDGHAKKMRPGEATLSC

SEQ ID NO: 5758 - DNA, 1479 bp, Homo sapien
aatgttacatattacttgtatattacattttaacctgaaggaccattctataaaacatttcttgatgtaatctgagtaggatttcacatggtaaacaactaaatgaaaaaagcacagtctccataataaacaaaaattaatttttaaaaacaaaatgtgtaaccccatcactctgaatttgggtggagcaactgcaatatggaaatcctttgggaatcacacccataatactactaagaccacctcccagttcccaatctggtcacttctctcatgtaggaaatgataggaataccaacagtacccaccatggattgggtcttgggattttctaaaaagaaggataattaggatcccttgtgttctgatcaccttctgcacacatttcatgatccattttgaagatggtgtttcagcgtcctgtgctttcacagttgcgaacggtagaggttatacagtttcattctaattaagtgcagtcctaactgtaatactgttctgtttcattttccaaagtgagctcacccatggatgaggtgctagcctccttgaagcgtggtagttttcatctgaaaaaggttgaacagcgaactctgcctccttttcctgatgaagatgatagtaataatatcttggcacaaataaggaaaggggtaaaattgaagaaggtacagaaggatgttttgagagaatccttcacacttctacccgatacagaccctctaacacggagcatccatgaagctcttagaagaattaaagaagcatccccagagtcagaggacgaagaggaggctttaccttgcacagactgggagaactaacaagtgacataacagaagaaaaatatcattcaagattggttctgattcttttggaaaatgacagtttaagcacttggttcctcagttggataacattagatccaaagtgcattggttcagtggtgtgaagaaaggaagcacaattggcaggttatcactttccagtcgttccaatagatgatggttaacatgaattttacatgtgcaatgttcctgactgcaatgaagaaaaggccttctggagatttctgttttttaagcacattctccttccatccacatatttacatccttgtaatggccagttaagctagggcttgctgtaagttggaagaacactgggttgacagagatctactgtgagctgtattgggactgctttgagaaccatctttcaatgcactgaaaagtcatctgaaaaaatagcttcttccatatcagcttatattaaatactgtgacactctgagaaagtttatcatcatgatagctgtaagtcaggcattaaaatcaaatggaaatacacctaaaatgtccgcattactcatttccaaaggatttttcataaagatgttcagcaacatctgaaaagctgcatttatggagatacatctattaatatgttcacaacatgatacatttaacatggcatattt

SEQ ID NO: 5759 - protein, 22 aa, Homo sapien
MLHITCILHFNLKDHSIKHFLM

SEQ ID NO: 5760 - DNA, 594 bp, Homo sapien
taactcacacagagccagctgtgcaggagaccagagttttatttatatttatagatataaattcataagagtttaattagctctcaggctcacttcaggtacatttcatgactccaactcctgttgtacaaaatatccctgcttttaaacagtagatttaaaacaaacaaccttggttttctgggacttttcttttatgagtatttttttattaatgtaaagtttcaaagaaggctaatcaaacacaaaaatatctgcaaagagccacaataagccttgaacaacatacagtcagtaaaacatcaaggtttaaattgttgctttaacttccttttggctggaagctccatattctggtaattcaccaaaatggccaacacaaggaaaacaggagaggcacccagtgtatgttttctaggccttttagaaaacatggagttggccacatgcatgggagtctataaaaaaggtgatactgtagacatcaagggaatgggtatggttcaaaaaggaatgcctcacaagtgttaccatggcaaaaactggaagagtctataatgttactcagcatgctgttagcattgctgtagggaa

SEQ ID NO: 5761 - protein, 62 aa, Homo sapien [sequence omitted]

SEQ ID NO: 5762 - DNA, 928 bp, Homo sapien
  Unsure 338-377: Unknown base
ttatattgatttgtatctttcattttttatatatttaaactacctacttatgttaattctgtgccatggtaacttccttaattcatgattcatatgggcatacatacagtcatggatacaacaggctttcgtatataaaattatgaaaaagtttattcttttaacattttgtggggatacaacaggttttcatatataaatcatgaaaaaatgcatctattcttctaacactttgtgaggatacaacaggttttcatatataaaattatgaaaaaaaattcttctaacacctttgtggggatacaaaaggttttcatatataaaatcatgaaaaaggnnnnnnnnnnnnnnnnnnnnnnnnnnnnnnnnnnnnnnnntgggaaatgaatttttaaaaaaaaaactttatgtatttctacttcttcattggaaagtcattcgtatttacttaagttttcaaatatcacagtgcagattagaacaaagtagttgtttataattcttccgcatcctccaagtgtatggagaagctcgcattcttcttgttttgtgctgtcattattttagtttgttatcttcgtctactttagttttctcagataatgtttaaattatttggcaaatcatttctcaattttcaatgcattaatttcctccacctgcttttctggagtttcatgtgatacccactctccccacacaggatgacttctcgagttgaatgttcattccatttattttcattctttcttgcttaatgttgtaaacaggcgaggttctaacttttcatctgtgtactacaagctctcaagttctttcatggggagtttgtatcatggtcattttctagtatttagcattttcagcttttgtttcctgtcaactcaacattaaaagttttttaaaacgtcaaaaaaaaaaaaaaggg

SEQ ID NO: 5763 - protein, 28 aa, Homo sapien
YIDLYLSFFIYLNYLLMLILCHGNFLNS

SEQ ID NO: 5764 - DNA, 1199 bp, Homo sapien
aaagcattttccagtaatttgatttttctggcaccctaactaagggaagttggctttttaaattttactttgttgcagaagattaaatttaaggttgagttccactttgtttgcaatagtttgaaaaagaatagttaatgcagattttttttttaaatttttttccttttaagctttgtgtcttgtacaatgtgagtttgccaaattttcttcatctgctacagattaggtatgccattgttgctgccatgtggcggcgcaccccgtgcttcttaaacgcactgactggaggtttatcgcatcacttgttcacatgcacggagcctggtaacagcctcatctgtatcttgttagcttcattttcttatttttaaaatttcattatttataaactcaacatagcatttaaaaataaaggctagttttaattaattaatgttactacaaaaagtcattgctaaaattttcatagtgaaacagattttaacttttgttaaaatgtgctatgctttaattaaattgtatttactctacaagcagggatgttttacctgccattttaactgtatttgccaaattctaaatataattttgaaaattgaaattgaagcttatgtttatgtggcaaaagtaagcttcaggactgggctgtgtatttttattggcatgtaacagttaatatgagctctacaagaatttgtttttaaggagctaaagctatcaacagctgcagatttaaaaaattatatattaaaactgttaggttagctcagttgtacaacttagtgaatcttgtatcctgagtttctgaaggctggtggataggtatctctgaaatcattgtgttttagtctttttactgatagttttgtatagggaattcatcttctcttttaaaataacttttttcctttaatttatttctattacttattgtacataaattttaaaataaaaaataaaagaaaaaaagtcacttgtctatcacctgttaatagtttaaacattttggtttatttccattcatccttcccccccatgcattatttacatatttttttttctctgtaggcatattttaatttggatcacagtttactacttagtatctccttttcatgacatttgtaatttccctggtcattatttttgaaaatgagatttcttcatggttttatttcattttattttcatgcctg

SEQ ID NO: 5765 - protein, 78 aa, Homo sapien
MQIFFLNFFPFKLCVLYNVSLPNFLHLLQIRYAIVAAMWRRTPCFLNALTGGLSHHLFTCTEPGNSLICILLASFSYF

SEQ ID NO: 5766 - DNA, 1105 bp, Homo sapien
  Unsure 811-845: Unknown base
catctaacattaaagttccatggcacatggctgctctctttcctttcccctgttttggattacatatataaatggaggagtttctgcctatacaaactgtttaatattgaaaatgtttctctccctccagactatgaagaaatcgggagtgcactttttgactgtagattgttcgaagacacatttgtaaattttcaagctaggtatatgagttatataacatctgagcagcatagttttgagaaatatttatcacgatattgaaacaatatactgtacaggtgataaaaatattttagaagaatgttcattgttttcttaaatgagaaaagcccaattacaaaaacagtatggacccctgccctacctgcccactactactacaggataaaaaatatcgtaggtactatgtgcactagactattaagctgcacctggtggagacagtagttggttgtaggtagttggaatatagtgatttttgtctgttcttttactgctatattttccagattttctatatacacacaaatacttttataatgagaaaaactcattaaaaaagtagagacaacaaaaaattgattcaaaaattggagcatattttggcctgtgtgtggcccaggcaggagctggtaaagcttcctgcggcttctctgctcttgggtggcgaggctatgataaaccatccctccgcttgcctccctctcgcttggtgagataggtcaaaattttaattctcccactattaatcctcaaatctaatttaatttcttatcagggagggttacgactgatttaaagttcatcnnnnnnnnnnnnnnnnnnnnnnnnnnnnnnnnnnntgagcaagtaagaatagccaagaaatgtttgcagtagaaaatctcgtttggtttggaggagggagatttagccttcctattaaatatcaaccatttattgagtgagtcctcctttcagcattaagatgccctcaagacaggctacacctccacttgtttatgagtctggtctgacttctctatcaaggctgccacacacagctgggcaggtcgggcacagagtcaaacagcattggtggatggctccccctgaagttgca

SEQ ID NO: 5767 - protein, 87 aa, Homo sapien
HLTLKFHGTWLLSFLSPVLDYIYKWRSFCLYKLFNIENVSLPPDYEEIGSALFDCRLFEDTFVNFQARYMSYITSEQHSFEKYLSRY

SEQ ID NO: 5768 - DNA, 468 bp, Homo sapien
ctcccttcttatctaaatccaccatcaattagtgtcttaaaagattttgctgctttagccactgtaatggggtttggagactggcagaagaataaaaccaaataagtatgttttagataaatgttaatatgtatatattgagtcacaaggtattaatctgatattagcaaatcatgacttcataccatgccattatattaatatagtaaatcttaggtttagcattgacttctgatttctagaacctcactctatctgtaaattgttcattccagttataaaagtaatgaagtatatgaaaatgtttctgttgtcatttgtctatatcagaatgcataagttatgagaaaagcgtgctttttgttttttagtgtgtatcatttaacctcttgacagtcattaggttgacagtgttcacatctgagagaacctgatttaggttcttgaaagaattttgtgaaggccaaa

SEQ ID NO: 5769 - protein, 34 aa, Homo sapien
LPSYLNPPSISVLKDFAALATVMGFGDWQKNKTK

SEQ ID NO: 5770 - DNA, 882 bp, Homo sapien
tagggcttattaccaaagaacagaaggctttttaaaagtcatctattgtttagtgattattaaaaataagtcttctgatgaggattacatatatctaactactgtaaaatagatttcatgtcagtgctacataatcagtatctaggttcagtacctgaaagttcatttgaccatgcctttttatgattttaatcctaccatagtcatttttgtcctatttgccattcacggaaaactttatcagaatataagtaaatgatcttgaaaacattaatatttatcttttttgtacatactatacattttcttaccatacatattatatgttctctgacctctggaacattaactcacaaattgtttccgttttcctttacctagattgcatgtagatgtcaaaactgtgcaagcaccaaggaatgctaaatgttgaggaatggtcatagacttagcaacccacatatactgagattgtttatgagagccatttggtctgagtaacatgtatagggtatgactaaagtaggtggtaaggccaaaaagagtaagtgaggtaaggtgggggtgggttagtggatttaaaaaagtaatttgtagctctaccttcaggaaatgtcagtgattcaacattcaaatctacctaatcaactgtatctttactacctatataagttttgtatgtgagagaatgattctcattttgtatatgtgcatattcagtcttctgattcataggtcctaaatgcttttgtatttatttaggcttattttgaagcccagaatatggtcttttgtggtaaatgttccatttgagctcttgaaaagaatgtatattctggtggtttggacagattgtgctgtaactatcaataaagtcaacgt

SEQ ID NO: 5771 - protein, 46 aa, Homo sapien [sequence omitted]

SEQ ID NO: 5772 - DNA, 492 bp, Homo sapien
aggaaacatctttacacttagggtttgagtttctgtatctataaaaaagggtttggattaagtgatccctggcacttataaaatgttagggcttaatattattcatagatcgaggatagtttcattcttagtcgcctccttagtcactcttcctataccaatctgagaccattttacaatttagaaaagacaaataactggttgggttacttgatagtataataaccaagaaaaataattttagaaggaattaagtttgaaaccacatgttaacaaattctaccaaagtgggatttgcctgtgattaaagatgctgtaaacatttgggccagtagttataatttgaaaaatgtttatagccaatatataattttttatttaaatatacagtttcatcagtctattagtatttcattaagtctaagatgccatcagtggttagcaaacaccactgttttatgcactgctaagaaagaataaagggctgtgtgc

SEQ ID NO: 5773 - protein, 13 aa, Homo sapien
ETSLHLGFEFLYL

SEQ ID NO: 5774 - DNA, 1169 bp, Homo sapien
gggccagttctgggttggctctgtctagccatcacattgtggttttgctgttatctgctgttagattcggccggaatctaagggatagagatgtatcatgaggtggaagctcaggctacctctatcttagttacaacagtcagagctcatgatgtcatggtggcctctggcagcttgggttagaccaggtggttatttgccacctgtaggctggcactttctacaacactgtcacgcatcagggacgagggtaccgagtgagagcaaaggataggctccgcaaactcatctcctctccttggaggcttaactgagtgactgtgggtcgctgggtgtattttaatctggtgacattccacactttgtgtactcaccagcacatacacggtattattggtttcctcagaagagtgtgtatttaaatacctgccaggaaactgtgcaggtatttcacattaagtagcatatggggctcagtgtagtcaagaagtcacagggattaggaaagagaaaatgaattgctgtcattctatatatgttatatgcttagtaaatgtcagaacagtagtcacagaacctcaggatgtttctagcatattttggcttataaatgttttgtctacataatggatatctatcagtagctttcagaattcaagtaattttaatgaaataacactaaatgttcaagtattaaaagtagtggtaacagttaacagctattgagtgtttactatgtcctcagaactatgccaagaactttatatatacttgatctcacataaaaaacaaataaggtagtaatttgtcttccttacctgtttgccttttcaactagaagcctattgttctacattcaagaaagtgaaagtggctacacctcttagagaacatttctttaatgatacatcagtgagtatcttttatgggtaataatctacctattttaactagatacaagtatgataagaaagagacctttcagttaactgaagctaagctcatcctgtcttccttacattgctaatatctgacttacaatttactaatatttgtaaggtgtcatttaagtaggtgtggaagcattagcctagattttgactagttctttggtgtcttctgcagctcatagaggcactataatcacaacccccacccgcgcccctcgc

SEQ ID NO: 5775 - protein, 32 aa, Homo sapien
ASSGLALSSHHIVVLLLSAVRFGRNLRDRDVS

SEQ ID NO: 5776 - DNA, 901 bp, Homo sapien
gggcgagaagcaactagggccctcatcacttcgccgccgaatccccggcgccgcccagcggggcagagccaggccagggccgcccgcccaacctggtccgctgcctcttcggccatggaagctgccggcagccctgcggctacggagacagcttctccactcttcctcctcctccacctccgcccatgaaatggtgcactctccctttaagactaagatggtggcttgctacgatcgggactccacttccggtggggaggggggcgggaccccagcccgctcacgccggaagtggtttgcgttttcaagatggcgactccctatgttactgacgagaccggcggggtgggaaccgccaaacctctcccttctttttgacttcacccttggataccatcaaggccagaggatggaaccaagataacataaaataggtgctcctttgtgataatgggctatttgtatctctgagggcttccacacaggatggccattcaagaagcttctgctctgcctttcattacagtctatctttagtcctcctaaaccttcagctataatctctatgcaatcaacttaaatatatgtttgtagtattgtccctttctcccaaattccatgtaaaacacttgcctgaattgaattgtttccacaaagttgttttcccctgtggactttgtttatatcagtagtttttattttcccaattttccaaattcaagagtgataattataaatagttgtgttcttgtttgttatctttctcactagaatgtatactctaagaaggcaagaaccttgcttgctttattcattgttgtattcctagcttctgttacagtgtctggcacaagagtaagtgctcaataaaaatttaaaatccaaaaaaaaaaaaaaaaaa

SEQ ID NO: 5777 - DNA, 909 bp, Homo sapien
ttcctgtctttaagtctcattttacatttaatccagaagataaaaggtgtaatagtattggtgagcccagtgagctcctcattcattcctgtacttcctgtataccaaagggtgtgggctctctttagtcctacatactctcttggggttttatgattctcttaaaaccttaagtttccaccttaagatttttgtagactttcctttgggatttagttgtgacagggtgctgaaaatgcaaaaatatttgtgtcttccatattgacatacttagataaattagattggtttggggaacactgaagttacagaatggaaaaggaggaaggaggagtgcataaaagtaaagaacatttttgagataactaacatttgttttttatagctatttattttcctggggtaaaagaaaaattgtgacaagtatcctagaagaaattacaagttaaaagaacaataaccatatcctctattcttagtttctgatgctttgttttaaaactttgcctttaccacttatatggtattaggaaataaaaaacatggtactttgttctcctgcttcctagacgaaatctaagcaatattttatccacttctttttagtaaaagaaatacatattgcctgttggggtcatgagctatgtagggaatgaaaaaattttttaaaggagaattataaagagaaggaggatacaagagaaaggaaaacgaaagctggtgggaagttgagccatgtttatctctagtggaatccttaccttgtgttttaaaattgttaaatgtttgtatatatgagaaatccctgaaaagttatatgtaatttaaaaaaacaaaaaaaaaacaaaaaaaactagagaggcttcctttttaaaagactcttcagttaaaccttttttgtaaaagcca

SEQ ID NO: 5778 - protein, 51 aa, Homo sapien
FLSLSLILHLIQKIKGVIVLVSPVSSSFIPVLPVYQRVWALFSPTYSLGVL

SEQ ID NO: 5779 - DNA, 418 bp, Homo sapien
aatatatattcactattctagactaatagcaagaccggggatcttgtttaggaagaagcagtccctgttctccagaatttgcaaaaccattaaaaaagcacctactttaagccattttttttcagcaaggagtcattctgccagaaaaatgtagtacacaaatacaggataatataacaaatgtaaaatttctcatttctagtgaattaaactttccagtaattttacatctcacctcattcttatgatgctcagtttgcttaattattggcaaacataatggtaaaatgtttgtactgtattagagctttactgttcgattattaagatatttatccagtatcttagagatgctggacttcaattttccttattttatctttttaaaataaaatatcatgcatgcttctgatttgtt

SEQ ID NO: 5780 - protein, 50 aa, Homo sapien
IYIHYSRLIARPGILFRKKQSLFSRICKTIKKAPTLSHFFSARSHSARKM

SEQ ID NO: 5781 - DNA, 851 bp, Homo sapien
gcactggaacaagttagttaatgggtcttgacattagatgagtgcttgtgcagctcaactcctccctgctctccaaagaagtgtccttctctgatatgggcagcatcacaatccagcctcaaaagaagccaccttgagcttccaagacacaaagcaggggatatggagaggtgtctgcactagagtctggatggtgctactgacaacagtgagtgttcagggtgactgctagtgctgtgcagtgctgagcgccacattccatgggaccacgtgtcctttaataaacatattcagcgtgcgcttatggaactcatggcttctaaagcacaaggcgtatgtttcaagcatagtgctatccctgagcagcatttgtaagcctccagtctgcaacagtgggattacctaccaggctcagctgatggaccgggatgatattggaagagaggctgccagcctgaagacttacctggaaacattttctcgttggtctggttttaataaaatcaccagattccactagaaggaaaccaaagattacaaaggtccaaattaatatatgacaaagtagaaacggaaactgggaggaaatgaggtgaaacacaggggatgatgtattggaaatagggaatgaaaaccgtacagagtagaaacacctgaaagcagttctggaaactccacatgctcctgctgtaccaagacctggtcctatgtgtgctgaccttgttcttctgctcacatctgccacatctgcaaatgtggcaacattttagctgttttctattaacactgaagtactctgagagcttggaaattttcaagtgcaaaatcaggtccagagaacagtaaaaaaa

SEQ ID NO: 5782 - protein, 9 aa, Homo sapien
HWNKLVNGS

SEQ ID NO: 5783 - DNA, 1282 bp, Homo sapien
ctctagaggaccccggtcaattgctacaccttatgcgactgacacatgcggcctggtagctggagcccgggaagtggttcaacgcaataaagaggcttctggctcccagcaaatggctcggtaagcatagtatcctctgcctgcaagtctctcctgatgatgtcagtatgcatactggggtggttgagatcatctaggtggggatgatgcaccccaaactaaagcccctctctctcgcggctcgctttgcagggtgagtgcagacatctgtagcaatggaaggtaagtgccttgttttgcatattgaagaattactaaatgcttctatttctgtttcaggtttcttgctttctaagatatactactgactgaaatcatagtgaatgggagcatccagtcaattacttagaacagatttgtagtttgtacttaaagtgtgtgtgtgtatgtgcataggtgtgtgtgggcaggcacatgtggggtaggcttataaagaaaactgaatgcacagtgtaacgcctgctactctccctggtaaacagcaatagctttttatttcaaactattcgaaatatgtaacttccttaaaatattttgacaagtgtcacagggcaagtagggctaatttttaaaaagtgtgtaagtatattgtattggcatttgatatgttttacccagtttaaatgatattaacatttgaaatatctaagatggtatgggaagatactagaaagaagaaccatgctgagaatttgcatgttatagaaattaaaatatgtaggacaaagatttagttggtgaaggggagatgtatgaagttcaaagtacagtgataatcatcattccatagttatgccacacttttatagcttttcaatatctcacacaatttgattgtaaaaataatgcttctattattgtgatgaatgcaattagtgcttcatgaaagttttccttgaatatgtatccatccttcttaaggataatccagctatgttcagctttacagaaagaatatagtagaaccacttataacattcagacagaacagtgatacgtgaatattttccttgagaagttagtgctgtttcagtttttctctgacggtatgccttatcaataaacaataaataatgagacacatgaccggttcctctctatcagcctccttctgaatctcttcattctgagagttctgcccataaagttagtcttgcatttatttcttcttcttgattcccaaggaatgattcagtagtacattctgtgaagaatgtaatac

SEQ ID NO: 5784 - protein, 40 aa, Homo sapien
SRGPRSIATPYATDTCGLVAGAREVVQRNKEASGSQQMAR

SEQ ID NO: 5785 - DNA, 1098 bp, Homo sapien
cccaaacaaaacatactctaatcagggcagtcgaacttgaaaagagtcagtgagaaatctgaaaggaggaaaagcctggccacgaggctccaagtgaaatgaaagccataaacaccagcttcgtcaaccttgaaagcttctaaaagtgcccctaagcctccttttgaatcactaaaagttttcacttacctccctgtctttctcagataaaatttcctctttctcagccatgagtcttaaaaaacaaagcaaaacaaaacacttcacacctgcttcttattcagttttacactagtggaaagagaacgggatttagagttggaaggccaacgtgagcgtcctgctgccacttagtagctgtgtgactctgtataagcttctaggctttctgtgctcaatttcttcaaccgttgacaatatgaccgtgtatcatcacataatacactatgatgtgaagtttatgtagatgaagaactctttcaagctcacaaagcaccagatacatgtcagatatttctaatgttacaccagtttttaatatcatgtttcatttcacatacggtacttgatatctcaattacattagaggctaagacagttttctaccagcatgagaactgaaacacgatagcatgccttttatggcgaaatgtgtttgaacttcaaacaacaaatatataaaacttattatgcaatacaccctatcagcaaattaattgaaggctgcctctagattgttaggtgtggacgacaggaactttatttcctacttcttttgtacatgccattgctgtttaacagtgttgggttcataacaggtgattagacagtcttgttgatagtttggagaaccatcttaatcatgacctagaatcattcttatttcacagcaacctgtgtcttgactaatgttaaactgactaatttgttttgaagctgagaatgagaaattggaggtccttctcatagatctgagattcctttttattcccgagttggataaattagggtaaacaaatcaaatacttgtaaaaatactgtacaaaggaatgacatatgcatgctggttccctagcagggtaattccatcagcgcttt

SEQ ID NO: 5786 - protein, 16 aa, Homo sapien
MTYACWFPSRVIPSAL

SEQ ID NO: 5787 - DNA, 460 bp, Homo sapien
  Unsure 382: Unknown base
ttttttttttttttaaacgtctgacactttctggaatgatccaaaaagtcctgtgttgacacatgtttaatttcaggaaacacagaagtcataatttcaatatcaatagcaaacttcacaacgaaactgcaccgaacgtcacaagagaccaaaatatttccacagttgatcttggacagtaaaaaaaatactaataacagaagaatagccgctgttccagcagtccccgctcccgagggagccgctcggattcccaccgggtccgctcaaagaggggcgttgtcctcccccaggacgcacagcccgcgcgcggccagcccactgctccctggcttttgcgccctggcgggggccgggtgggaccccaagcggtgcaactccncgtgtggggctgcggggtccaagggtccgggccggcgggggcggcgacggccgggtatgggcccgacgctccagcgcc

SEQ ID NO: 5788 - DNA, 427 bp, Homo sapien
  Unsure 223-350: Unknown base
ccttgaactcttaaggattaatgctcttgagttatgagatatccctacattccaataactctaccttctatttttattgattaaactagtttgagtagtttctgttcctttcttccaaaacaacccactgagaacttggaaataaggcaaactagatttccctctaatagttaaattggcattctctgagaatatttataaatgtgttaattgaaaaattttnnnnnnnnnnnnnnnnnnnnnnnnnnnnnnnnnnnnnnnnnnnnnnnnnnnnnnnnnnnnnnnnnnnnnnnnnnnnnnnnnnnnnnnnnnnnnnnnnnnnnnnnnnnnnnnnnnnnnnnnnnnnnnnngttgttttgttttttttgtgtttttgttttgagatagagtctcggtctgtcgccaggctggagtgcagtggtgagat

SEQ ID NO: 5789 - protein, 19 aa, Homo sapien
MLLSYEISLHSNNSTFYFY

SEQ ID NO: 5790 - DNA, 253 bp, Homo sapien
cagccatattttgttcttaaagtggggtctttattaacttgtggacatcatggattgtctaacaccatcacagtccctggctcaggattctaatgtagcattatttattggtttggataaacccagctgtgctacactgcagagtaaaatctctgagtcatgattctggactttgggagctagttttgaaactctgatttattgtagaacttaggcttgtaccaattttacaaataaattctgttctaagttc

SEQ ID NO: 5791 - protein, 30 aa, Homo sapien
QPYFVLKVGSLLTCGHHGLSNTITVPGSGF

SEQ ID NO: 5792 - DNA, 1821 bp, Homo sapien
  Unsure 1183-1266: Unknown base
  Unsure 1470: Unknown base
cggaaaggcttttcctcactcatcatgtcacattgaggcaggataaagggaagagggatcctctgtcttaccagataaagtgaaagtctttccagggtccccaacagtcttccatgtatgctttcattgtcaagaatgtgtcacatggtcatttctgcttattagggaatctcaggaattacttggtaatgactggtgctgggcaccacgttcttctgcaggaaaaggagtttctattagcaagtaatagatgttataatagagatgataatactgatggaatggactctgtgacaatatggcaccaaattataaacaagtcccctaaggccataccttgagataagcaatattaaaacatttgcagctcactgactgccagatgttgactgataactctcccacccctattccacaagccataagtacagctttgatttgacaagagactgatttcagtaactttctgctgatgagagactactgatcatggacttgttctggccagtttacagaggctgcacactgagtgtcttagcctctgctgcttcaccttttgacatattgagcttcaccttttgacatattgggcctaaatacgtttaaatgttaagtctctatgccaaagatgcatgcatgcacgtttgcttaatacacatgcaggtgtccccctttgtcaatattcatatctcctcttataacctgttgaatatatatacctagctaacctgcgtagcataaattcctgtcttacctttcctccaaagtgacttgtttttcgcctctgctggagggtatctatacttccctgcaggctgaaacactttataagaaataaagttctctcgaaatttatgaaccttgagacgaatgagatgcagacaggcagcactggagaatgaacactagttatggatgcctgggcatagcccagagccagggacttccctgggtgaggttgtcctcatactcaactagccatctgttggtgctacaacagctcaagcctaaatcctgaaatgtgcacttttcttttagcttgaaaaaaatttaaagctacagaagaattgcaagaattgtacaataatatgtctatatgtatgtatcattgttatataatatgtattatcatcattgttgaactaattttaaatgttgcagacatcatgaccatgaccttatnnnnnnnnnnnnnnnnnnnnnnnnnnnnnnnnnnnnnnnnnnnnnnnnnnnnnnnnnnnnnnnnnnnnnnnnnnnnnnnnnnnnattgatttaatactgttatctaatatacagtcatatttcaattttgtttatccttccaatactgttccctccccaccctcccaccccaattcaggagccaatctaggattatgacatggatttagttgccatgtatcttcagtttcaatttttctttgtcttttcataacattgactttttttaagagaacagctggtggtttnatagaattccatcaatttgggtttgtcagattattggcttatgattagattcagttatgaattttggcaaggatattgcagaagttatgataggttcttcttagtgcaacttatcacgatacacatgatgtctgtttgtcccattattggtgatgttaacttccgtaacttgctccattgaaaagtacccccttcctttctgtaattaagtaatctgtggagaagatgctttgaaattgtatacatattttatttcctaagaaactttcatctattgataattgtttcctgaatcaattattattaaagtttgttgtaaaataatgaatttctaactctattaaaatttct

SEQ ID NO: 5793 - protein, 26 aa, Homo sapien
ERLFLTHHVTLRQDKGKRDPLSYQIK

SEQ ID NO: 5794 - DNA, 812 bp, Homo sapien
  Unsure 67-138: Unknown base
  Unsure 460-566: Unknown base
gagagttaaactttacctgaaaagatgaagtcagcttaagttaaagtaagggaggcttggcttaagnnnnnnnnnnnnnnnnnnnnnnnnnnnnnnnnnnnnnnnnnnnnnnnnnnnnnnnnnnnnnnnnnnnnnnnnaaggtgtcagactctccagaaaagacctaataagagaaggagattctctacagaatgcagtttcccccacaagagacagctttgtagggccatttcaaaatacgtcaaataaatacattggggggtaaatttcctttggggcctgctgtcatgtgatgctataccagagtcaggttgggatttggtattttattgccacaaagggtctgtttggttagtcttaagatctctgttttaatgttaatgctggtcagttgtatttaaattccaaagggaagagggtaatatgaggcaccctgtaatctgaccataatatgaggcnnnnnnnnnnnnnnnnnnnnnnnnnnnnnnnnnnnnnnnnnnnnnnnnnnnnnnnnnnnnnnnnnnnnnnnnnnnnnnnnnnnnnnnnnnnnnnnnnnnnnnnnnnngctgtatatatatgtatacacacactccccgcataaatgtaaaaattttaaactaccaattcctaggcaaagatgattctaacattctgttccttttgacaagtgtccaattagagaatgctgagaatgtcccctgcatatcggctctgttggagagcccctgatttttagcagacctgtttcattcaacatgggttacccaggaggtggtcttcataaaaatgtttcttggaggccaggcgccgt

SEQ ID NO: 5795 - protein, 17 aa, Homo sapien
MGYPGGGLHKNVSWRPG

SEQ ID NO: 5796 - DNA, 2916 bp, Homo sapien
  Unsure 1717-1738: Unknown base
ctggcatacagggactgctctgctccaggcatctgccacaatgtgggtgcttacacctgctgcttttgctgggaagctcttgagtgtgttcaggcaacctctgagctctctgtggaggagcctggtcccgctgttctgctggctgagggcaaccttctggctgctagctaccaagaggagaaagcagcagctggtcctgagagggccagatgagaccaaagaggaggaagaggaccctcctctgcccaccaccccaaccagcgtcaactatcacttcactcgccagtgcaactacaaatgcggcttctgtttccacacagccaaaacatcctttgtgctgccccttgaggaagcaaagagaggattgcttttgcttaaggaagctggtatggagaagatcaacttttcaggtggagagccatttcttcaagaccggggagaatacctgggcaagttggtgaggttctgcaaagtagagttgcggctgcccagcgtgagcatcgtgagcaatggaagcctgatccgggagaggtggttccagaattatggtgagtatttggacattctcgctatctcctgtgacagctttgacgaggaagtcaatgtccttattggccgtggccaaggaaagaagaaccatgtggaaaaccttcaaaagctgaggaggtggtgtagggattatagagtcgctttcaagataaattctgtcattaatcgtttcaacgtggaagaggacatgacggaacagatcaaagcactaaaccctgtccgctggaaagtgttccagtgcctcttaattgagggtgagaattgtggagaagatgctctaagagaagcagaaagatttgttattggtgatgaagaatttgaaagattcttggagcgccacaaagaagtgtcctgcttggtgcctgaatctaaccagaagatgaaagactcctaccttattctggatgaatatatgcgctttctgaactgtagaaagggacggaaggacccttccaagtccatcctggatgttggtgtagaagaagctataaaattcagtggatttgatgaaaagatgtttctgaagcgaggaggaaaatacatatggagtaaggctgatctgaagctggattggtagagcggaaagtggaacgagacttcaacacaccagtgggaaaactcctagagtaactgccattgtctgcaatactatcccgttggtatttcccagtggctgaaaacctgattttctgctgcacgtggcatctgattacctgtggtcactgaacacacgaataacttggatagcaaatcctgagacaatggaaaaccattaactttacttcattggcttataaccttgttgttattgaaacagcacttctgtttttgagtttgttttagctaaaaagaaggaatacacacaggaataatgaccccaaaaatgcttagataaggcccctatacacaggacctgacatttagctcaatgatgcgtttgtaagaaataagctctagtgatatctgtgggggcaaaatttaatttggatttgattttttaaaacaatgtttactgcgatttctatatttccattttgaaactatttcttgttccaggtttgttcatttgacagagtcagtattttttgccaaatatccagataaccagttttcacatctgagacattacaaagtatctgcctcaattatttctgctggttataatgcnnnnnnnnnnnnnnnnnnnnnngccattgcagtcttgtactttttactgtgatgtacagaaatagtcaacagatgtttccaagaacatatgatatgataatcctaccaattttcaagaagtctctagaaagagataacacatggaaagatggtgtggtgcagcccagcccacggtgcctgttccatgaatgctggctacctatgtgtgtggtacctgttgtgtccctttctcttcaaagatcctgagcaaaacaaagatacgctttccatttgatgatggagttgacatggaggcagtgcttgcattgctttgttcgcctatcatctggccacatgaggctgtcaagcaaaagaataggagtgtagttgagtagctggttggccctacatctctgagaagtgacgttacactgggttggcataagatatcctaaaatcacgctggaaccttgggcaaggaagaatgtgagcaagagtagagagagtgcctggatttcatgtcagtgaagccatgtcaccatatcatatttttgaatgaactctgagtcagttgaaatagggtaccatctaggtcagtttaagaagagtcagctcagagaaagcaagcataagggaaaatgtcacgtaaactagatcagggaacaaaatcctctccttgtggaaatatcccatgcagtttgttgatacaacttagtatcttattgcctaaaaaaaaatttcttatcattgtttcaaaaaagcaaaatcatggaaaatttttgttgtccaggcaaataaaaggtcattttaatttagctgcaatttcagtgttcctcactaggtggcatttaaatgtcgcctgatgtcattaagcaccatccaaaaagtctgcttcataatctattttcaagacttggtgattctgaaagttttggtttttgtgactttgtttctcaggaaaaaaaatattcctacttaaattttaagtctataattcaatttaaatatgtgtgtgtctcatccaggataggataggttgtcttctattttccattttacctatttactttttttgtaagaaaagagaaaaatgaattctaaagatgttccccatgggttttgattgtgtctaagctatgatgaccttcatataatcagcataaacataaaacaaattttttacttaacatgagtgcactttactaatcctcatggcacagt

SEQ ID NO: 5797 - protein, 374 aa, Homo sapien
WHTGTALLQASATMWVLTPAAFAGKLLSVFRQPLSSLWRSLVPLFCWLRATFWLLATKRRKQQLVLRGPDETKEEEEDPPLPTTPTSVNYHFTRQCNYKCGFCFHTAKTSFVLPLEEAKRGLLLLKEAGMEKINFSGGEPFLQDRGEYLGKLVRFCKVELRLPSVSIVSNGSLIRERWFQNYGEYLDILAISCDSFDEEVNVLIGRGQGKKNHVENLQKLRRWCRDYRVAFKINSVINRFNVEEDMTEQIKALNPVRWKVFQCLLIEGENCGEDALREAERFVIGDEEFERFLERHKEVSCLVPESNQKMKDSYLILDEYMRFLNCRKGRKDPSKSILDVGVEEAIKFSGFDEKMFLKRGGKYIWSKADLKLDW

SEQ ID NO: 5798 - DNA, 1051 bp, Homo sapien
gcagaatcaatatgtgcacagttctctttatcaggcaaaaacacgtttattgagacatgaaatgagaatcaggctgaaggaatcatgcagctgaaagatgattatattcatagaaatgaagagatgaaatattcaaagaagatggctactttattgtgagacttaccactttaacctcatatgttaacagcacctaccaaaaaatgatatgagatagagctaaaatactgaaattgcaaatggacaaaataaatcatgaaaatttgtttattatttcttcaataaatatttctaggtgctttgtgattctttcatttagtcattaaagccattgctttactatattgcgttgccactttaaaaacaagttacttgacattgtttttgacagatttcactatattcttatgtaattaattgattatttctaaaatgtttgaataaactttgtactccctctaaggagtattttattcattcttttaattcccaaatgaactttgaacttacagtgctgttgaatgccttggtaaggacttcttgaaattgcataaactattcttgtaaatggtaaacttgagaattttctttgtttcttttttctctatgtcttaaagaatgcctttagaatctaattcatgttgtatcagataagaatgtttctgtggtttctcgtatcagatgtgtaaagaaattattactgggatgccattggctatgtctctttccccttcatgtaaaaattccaagtgtcagtaaaacttctctataatattttcttaaaaccatttataaatttgtgttataatactccagaaaatcaatgtaataagtggtcatatatatcaccaactatggatatcaaaaagttggggtcacatcagtgctatttatttaattaaaatacattgcatatttctattagcacaaacttctctctaaaaggtctgtgtaactgcttctcatcattatttgattgctgttatgggatcctgtcaaaactgtgtaattgtttattctccattcctcaaatacaaaattgagtaggttg

SEQ ID NO: 5799 - protein, 30 aa, Homo sapien
QNQYVHSSLYQAKTRLLRHEMRIRLKESCS

SEQ ID NO: 5800 - DNA, 934 bp, Homo sapien
gtgagaggggctttcacaagataacattgtagaatcattcagtgagaacaaaagttgactcaagaaagcaagagtctggatttaaatccctggtaaaattgccttagtaagcaataataaaatttcccagcacatgactggggtaagtaatgaattgttgaaacctgcaaagagccctaaattataagaattatgggggatcggaggaggaaaataaatgaaaacagaagaccataaaagaatactttgcattcagtagaaaacctgtcagtactgtaggacaaaaaggaatagattctacattttacatcaccagtgatgcctcctcatggtttaaccatttcttccacattctgcctaaagggaaaactgtgtcagcaattgcttttggtttttaaagttataggttgctactacatggatgtgactaagaaaatacatagattatcttaaaatgggcatgatgtaaaagactcaatcagtagggtaactaaaaactttgtagtactctagctttggaaatctgagaggcctatatagttcatttgagtgtttgatcaaattcttattgagattacagcctgtgcaaaatatttgtgatgcatttttaagtttacttaagtacactttgaaattctttaaaaattttaaaatctttaaaaggacacaagagtgtaccacattgagattaaaatgtgtttattattaatttgtacataatactataacaaataattgttctcaggtatgtttaaggccttattttaaaagttgattcttcaatttctaatttaaaataagcttttagtttttctcaactatgtatatgtaatgattataaatgcctagagtagtgtttcccagacaactagaaccacacacaaattagtaccaccaaaaaaagtcgacgcggccgctaatttagtagtagtag

SEQ ID NO: 5801 - protein, 9 aa, Homo sapien
ERGFHKITL

SEQ ID NO: 5802 - DNA, 10697 bp, Homo sapien
cacagtggtcctccgccggctacggcgctgcgtcactggtttgcaggcgctttcctcttggaagtggcgactgctgcgggcctgagcgctggtctcacgcgcctcgggagccaggttggcggcgcgatgaggcgcagcaaggctgacgtggagcggtacatcgcctcggtgcagggctccaccccgtcgcctcgacagaagtcaatgaaaggattctattttgcaaagctgtattatgaagctaaagaatatgatcttgctaaaaaatacatatgtacttacattaatgtgcaagagagggatcccaaagctcacagatttctgggtcttctttatgaattggaagaaaacacagacaaagccgttgaatgttacaggcgttcagtggaattaaacccaacacaaaaagatcttgtgttgaagattgcagaattgctttgtaaaaatgatgttactgatggaagagcaaaatactggcttgaaagagcagccaaacttttcccaggaagtcctgcaatttataaactaaaggaacagcttctagattgtgaaggtgaagatggatggaataaactttttgacttgattcagtcagaactttatgtaagacctgatgacgtccatgtgaacatccggctagtggaggtgtatcgctcaactaaaagattgaaggatgctgtggcccactgccatgaggcagagaggaacatagctttgcgttcaagtttagaatggaattcgtgtgttgtacagacccttaaggaatatctggagtctttacagtgtttggagtctgataaaagtgactggcgagcaaccaatacagacttactgctggcctatgctaatcttatgcttcttacgctttccactagagatgtgcaggaaagtagagaattactgcaaagttttgatagtgctcttcagtctgtgaaatctttgggtggaaatgatgaactgtcagctactttcttagaaatgaaaggacatttctacatgcatgctggttctctgcttttgaagatgggtcagcatagtagtaatgttcaatggcgagctctttctgagctggctgcattgtgctatctcatagcatttcaggttccaagaccaaagattaaattaataaaaggtgaagctggacaaaatctgctggaaatgatggcctgtgaccgactgagccaatcagggcacatgttgctaaacttaagtcgtggcaagcaagattttttaaaagagattgttgaaacttttgccaacaaaagcgggcagtctgcattatatgatgctctgttttctagtcagtcacctaaggatacatcttttcttggtagcgatgatattggaaacattgatgtacgagaaccagagcttgaagatttgactagatacgatgttggtgctattcgagcacataatggtagtcttcagcaccttacttggcttggcttacagtggaattcattgcctgctttacctggaatccgaaaatggctaaaacagcttttccatcatttgccccatgaaacctcaaggcttgaaacaaatgcacctgaatcaatatgtattttagatcttgaagtatttctccttggagtagtatataccagccacttacaattaaaggagaaatgtaattctcaccacagctcctatcagccgttatgcctgccccttcctgtgtgtaaacagctttgtacagaaagacaaaaatcttggtgggatgcggtttgtactctgattcacagaaaagcagtacctggaaacgtagcaaaattgagacttctagttcagcatgaaataaacactctaagagcccaggaaaaacatggccttcaacctgctctgcttgtacattgggcagaatgccttcagaaaacgggcagcggtcttaattctttttatgatcaacgagaatacatagggagaagtgttcattattggaagaaagttttgccattgttgaagataataaaaaagaagaacagtattcctgaacctattgatcctctgtttaaacattttcatagtgtagacattcaggcatcagaaattgttgaatatgaagaagacgcacacataacttttgctatattggatgcagtaaatggaaatatagaagatgctgtgactgcttttgaatctataaaaagtgttgtttcttattggaatcttgcactgatttttcacaggaaggcagaagacattgaaaatgatgccctttctcctgaagaacaagaagaatgcaaaaattatctgagaaagaccagggactacctaataaagattatagatgacagtgattcaaatctttcagtggtcaagaaattgcctgtgcccctggagtctgtaaaagagatgcttaattcagtcatgcaggaactcgaagactatagtgaaggaggtcctctctataaaaatggttctttgcgaaatgcagattcagaaataaaacattctacaccgtctcctaccaaatattcactatcaccaagtaaaagttacaagtattctcccaaaacaccacctcgatgggcagaagatcagaattctttactgaaaatgatttgccaacaagtagaggccattaagaaagaaatgcaggagttgaaactaaatagcagtaactcagcatcccctcatcgttggcccacagagaattatggaccagactcggtgcctgatggatatcaggggtcacagacatttcatggggctccactaacagttgcaactactggcccttcagtatattatagtcagtcaccagcatataattcccagtatcttctcagaccagcagctaatgttactcccacaaagggcccagtctatggcatgaataggcttccaccccaacagcatatttatgcctatccgcaacagatgcacacaccgccagtgcaaagctcatctgcttgtatgttctctcaggagatgtatggtcctcctgcattgcgttttgagtctcctgcaacgggaattctatcgcccaggggtgatgattactttaattacaatgttcaacagacaagcacaaatccacctttgccagaaccaggatatttcacaaaacctccgattgcagctcatgcttcaagatctgcagaatctaagactatagaatttgggaaaactaattttgttcagcccatgccgggtgaaggattaaggccatctttgccaacacaagcacacacaacacagccaactccttttaaatttaactcaaatttcaaatcaaatgatggtgacttcacgttttcctcaccacaggttgtgacacagccccctcctgcagcttacagtaacagtgaaagccttttaggtctcctgacttcagataaacccttgcaaggagatggctatagtggagccaaaccaattcctggtggtcaaaccattgggcctcgaaatacattcaattttggaagcaaaaatgtgtctggaatttcatttacagaaaacatggggtcgagtcagcaaaagaattctggttttcggcgaagtgatgatatgtttactttccatggtccagggaaatcagtatttggaacacccactttagagacagcaaacaagaatcatgagacagatggaggaagtgcccatggggatgatgatgatgacggtcctcactttgagcctgtagtacctcttcctgataagattgaagtaaaaactggtgaggaagatgaagaagaattcttttgcaaccgcgcgaaattgtttcgtttcgatgtagaatccaaagaatggaaagaacgtgggattggcaatgtaaaaatactgaggcataaaacatctggtaaaattcgccttctaatgagacgagagcaagtattgaaaatctgtgcaaatcattacatcagtccagatatgaaattgacaccaaatgctggatcagacagatcttttgtatggcatgcccttgattatgcagatgagttgccaaaaccagaacaacttgctattaggttcaaaactcctgaggaagcagcactttttaaatgcaagtttgaagaagcccagagcattttaaaagccccaggaacaaatgtagccatggcgtcaaatcaggctgtcagaattgtaaaagaacccacaagtcatgataacaaggatatttgcaaatctgatgctggaaacctgaattttgaatttcaggttgcaaagaaagaagggtcttggtggcattgtaacagctgctcattaaagaatgcttcaactgctaagaaatgtgtatcatgccaaaatctaaacccaagcaataaagagctcgttggcccaccattagctgaaactgtttttactcctaaaaccagcccagagaatgttcaagatcgatttgcattggtgactccaaagaaagaaggtcactgggattgtagtatttgtttagtaagaaatgaacctactgtatctaggtgcattgcgtgtcagaatacaaaatctgctaacaaaagtggatcttcatttgttcatcaagcttcatttaaatttggccagggagatcttcctaaacctattaacagtgatttcagatctgttttttctacaaaggaaggacagtgggattgcagtgcatgtttggtacaaaatgaggggagctctacaaaatgtgctgcttgtcagaatccgagaaaacagagtctacctgctacttctattccaacacctgcctcttttaagtttggtacttcagagacaagtaaaactctaaaaagtggatttgaagacatgtttgctaagaaggaaggacagtgggattgcagttcatgcttagtgcgaaatgaagcaaatgctacaagatgtgttgcttgtcagaatccggataaaccaagtccatctacttctgttccagctcctgcctcttttaagtttggtacttcagagacaagcaaggctccaaagagcggatttgagggaatgttcactaagaaggagggacagtgggattgcagtgtgtgcttagtaagaaatgaagccagtgctaccaaatgtattgcttgtcagaatccaggtaaacaaaatcaaactacttctgcagtttcaacacctgcctcttcagagacaagcaaggctccaaagagcggatttgagggaatgttcactaagaaggagggacagtgggattgcagtgtgtgcttagtaagaaatgaagccagtgctaccaaatgtattgcttgtcagaatccaggtaaacaaaatcaaactacttctgcagtttcaacacctgcctcttcagagacaagcaaggctccaaagagcggatttgagggaatgttcactaagaaggaaggacagtgggattgcagtgtgtgcttagtaagaaatgaagccagtgctaccaaatgtattgcttgtcagtgtccaagtaaacaaaatcaaacaactgcaatttcaacacctgcctcttcggagataagcaaggctccaaagagtggatttgaaggaatgttcatcaggaaaggacagtgggattgtagtgtttgctgtgtacaaaatgagagttcttccttaaaatgtgtggcttgtgatgcctctaaaccaactcataaacctattgcagaagctccttcagctttcacactgggctcagaaatgaagttgcatgactcttctggaagtcaggtgggaacaggatttaaaagtaatttctcagaaaaagcttctaagtttggcaatacagagcaaggattcaaatttgggcatgtggatcaagaaaattcaccttcatttatgtttcagggttcttctaatacagaatttaagtcaaccaaagaaggattttccatccctgtgtctgctgatggatttaaatttggcatttcggaaccaggaaatcaagaaaagaaaagtgaaaagcctcttgaaaatggtactggcttccaggctcaggatattagtggccagaagaatggccgtggtgtgatttttggccaaacaagtagcacttttacatttgcagatcttgcaaaatcaacttcaggagaaggatttcagtttggcaaaaaagaccccaatttcaagggattttcaggtgctggagaaaaattattctcatcacaatacggtaaaatggccaataaagcaaacacttccggtgactttgagaaagatgatgatgcctataagactgaggacagcgatgacatccattttgaaccagtagttcaaatgcccgaaaaagtagaacttgtaacaggagaagaagatgaaaaagttctgtattcacagcgggtaaaactatttagatttgatgctgaggtaagtcagtggaaagaaaggggcttggggaacttaaaaattctcaaaaacgaggtcaatggcaaactaagaatgctgatgcgaagagaacaagtactaaaagtgtgtgctaatcattggataacgactacgatgaacctgaagcctctctctggatcagatagagcatggatgtggttagccagtgatttctctgatggtgatgccaaactagagcagttggcagcaaaatttaaaacaccagagctggctgaagaattcaagcagaaatttgaggaatgccagcggcttctgttagacataccacttcaaactccccataaacttgtagatactggcagagctgccaagttaatacagagagctgaagaaatgaagagtggactgaaagatttcaaaacatttttgacaaatgatcaaacaaaagtcactgaggaagaaaataagggttcaggtacaggtgcggccggtgcctcagacacaacaataaaacccaatcctgaaaacactgggcccacattagaatgggataactatgatttaagggaagatgctttggatgatagtgtcagtagtagctcagtacatgcttctccattggcaagtagccctgtgagaaaaaatcttttccgttttggtgagtcaacaacaggatttaacttcagttttaaatctgctttgagtccatctaagtctcctgccaagttgaatcagagtgggacttcagttggcactgatgaagaatctgatgttactcaagaagaagagagagatggacagtactttgaacctgttgttcctttacctgatctagttgaagtatccagtggtgaggaaaatgaacaagttgtttttagtcacagggcaaaactctacagatatgataaagatgttggtcaatggaaagaaaggggcattggtgatataaagattttacagaattatgataataagcaagttcgtatagtgatgagaagggaccaagtattaaaactttgtgccaatcacagaataactccagacatgactttgcaaaatatgaaagggacagaaagagtatggttgtggactgcatgtgattttgcagatggagaaagaaaagtagagcatttagctgttcgttttaaactacaggatgttgcagactcgtttaagaaaatttttgatgaagcaaaaacagcccaggaaaaagattctttgataacacctcatgtttctcggtcaagcactcccagagagtcaccatgtggcaaaattgctgtagctgtattagaagaaaccacaagagagaggacagatgttattcagggtgatgatgtagcagatgcaacttcagaagttgaagtgtctagcacatctgaaacaacaccaaaagcagtggtttctcctccaaagtttgtatttggttcagagtctgttaaaagcatttttagtagtgaaaaatcaaaaccatttgcattcggcaacagttcagccactgggtctttgtttggatttagttttaatgcacctttgaaaagtaacaatagtgaaactagttcagtagcccagagtggatctgaaagcaaagtggaacctaaaaaatgtgaactgtcaaagaactctgatatcgaacagtcttcagatagcaaagtcaaaaatctctttgcttcctttccaacggaagaatcttcaatcaactacacatttaaaacaccagaaaaggcaaaagagaagaaaaaacctgaagattctccctcagatgatgatgttctcattgtatatgaactaactccaaccgctgagcagaaagcccttgcaaccaaacttaaacttcctccaactttcttctgctacaagaatagaccagattatgttagtgaagaagaggaggatgatgaagatttcgaaacagctgtcaagaaacttaatggaaaactatatttggatggctcagaaaaatgtagacccttggaagaaaatacagcagataatgagaaagaatgtattattgtttgggaaaagaaaccaacagttgaagagaaggcaaaagcagatacgttaaaacttccacctacatttttttgtggagtctgtagtgatactgatgaagacaatggaaatggggaagactttcaatcagagcttcaaaaagttcaggaagctcaaaaatctcagacagaagaaataactagcacaactgacagtgtatatacaggtgggactgaagtgatggtaccttctttctgtaaatctgaagaacctgattctattaccaaatccattagttcaccatctgtttcctctgaaactatggacaaacctgtagatttgtcaactagaaaggaaattgatacagattctacaagccaaggggaaagcaagatagtttcatttggatttggaagtagcacagggctctcatttgcagacttggcttccagtaattctggagattttgcttttggttctaaagataaaaatttccaatgggcaaatactggagcagctgtgtttggaacacagtcagtcggaacccagtcagccggtaaagttggtgaagatgaagatggtagtgatgaagaagtagttcataatgaagatatccattttgaaccaatagtgtcactaccagaggtagaagtaaaatctggagaagaagatgaagaaattttgtttaaagagagagccaaactttatagatgggatcgggatgtcagtcagtggaaggagcgcggtgttggagatataaagattctttggcatacaatgaagaattattaccggatcctaatgagaagagaccaggtttttaaagtgtgtgcaaaccacgttattactaaaacaatggaattaaagcccttaaatgtttcaaataatgctttagtttggactgcctcagattatgctgatggagaagcaaaagtagaacagcttgcagtgagatttaaaactaaagaagtagctgattgtttcaagaaaacatttgaagaatgtcagcagaatttaatgaaactccagaaaggacatgtatcactggcagcagaattatcaaaggagaccaatcctgtggtgttttttgatgtttgtgcggacggtgaacctctagggcggataactatggaattattttcaaacattgttcctcggactgctgagaacttcagagcactatgcactggagagaaaggctttggtttcaagaattccatttttcacagagtaattccagattttgtttgccaaggaggagatatcaccaaacatgatggaacaggcggacagtccatttatggagacaaatttgaagatgaaaattttgatgtgaaacatactggtcctggtttactatccatggccaatcaaggccagaataccaataattctcaatttgttataacactgaagaaagcagaacatttggactttaagcatgtagtatttgggtttgttaaggatggcatggatactgtgaaaaagattgaatcatttggttctcccaaagggtctgtttgtcgaagaataactatcacagaatgtggacagatataaaatcattgttgttcatagaaaatttcatctgtataagcagttggattgaagcttagctattacaatttgatagttatgttcagcttttgaaaatggacgtttccgatttacaaatgtaaaattgcagcttatagctgttgtcactttttaatgtgttataattgaccttgcatggtgtgaaataaaagtttaaacactggtgatttcaggtgtacttgtgtttatgtactcctgacgtattaaaatggaataatactaatcttgttaaaagcaatagacctcaaactattgaaggaatatgatatatgcaatttaattttaattccttttaagatatttggacttcctgcatggatatacttaccatttgaataaagggaccacaacttggataatttaattttaggtttgaaatatatttggtaatcttaactattggtgtactcatttatgcatagagactcgtttatgaatgggtagagccacagaacgtatagagttaaccaaagtgctcttctctagaatctttacacctcctgtgtggttacaagttaactttgtaagtagcgtaccttccttccttaaaatatctagcttcctgtgccctttcatagatattcgattaatttttacattttaaacaagttgactatttcctttaggggttttgtttcaaacttttctgtcatctgtctctactacctcagaaactgcagcttggttctgatgatagaaattgaatttttccttgtagttattgtgataaagtatgaatatttttagaaagtctataccatgttctttcgttaaagatttgctttatacaagattgttgcagtacctttttctggtaaattttgtagcagaaataaaatgacaattcctaagagccaaaa

SEQ ID NO: 5803 - protein, 2000 aa, Homo sapien
MRRSKADVERYIASVQGSTPSPRQKSMKGFYFAKLYYEAKEYDLAKKYICTYINVQERDPKAHRFLGLLYELEENTDKAVECYRRSVELNPTQKDLVLKIAELLCKNDVTDGRAKYWLERAAKLFPGSPAIYKLKEQLLDCEGEDGWNKLFDLIQSELYVRPDDVHVNIRLVEVYRSTKRLKDAVAHCHEAERNIALRSSLEWNSCVVQTLKEYLESLQCLESDKSDWRATNTDLLLAYANLMLLTLSTRDVQESRELLQSFDSALQSVKSLGGNDELSATFLEMKGHFYMHAGSLLLKMGQHSSNVQWRALSELAALCYLIAFQVPRPKIKLIKGEAGQNLLEMMACDRLSQSGHMLLNLSRGKQDFLKEIVETFANKSGQSALYDALFSSQSPKDTSFLGSDDIGNIDVREPELEDLTRYDVGAIRAHNGSLQHLTWLGLQWNSLPALPGIRKWLKQLFHHLPHETSRLETNAPESICILDLEVFLLGVVYTSHLQLKEKCNSHHSSYQPLCLPLPVCKQLCTERQKSWWDAVCTLIHRKAVPGNVAKLRLLVQHEINTLRAQEKHGLQPALLVHWAECLQKTGSGLNSFYDQREYIGRSVHYWKKVLPLLKIIKKKNSIPEPIDPLFKHFHSVDIQASEIVEYEEDAHITFAILDAVNGNIEDAVTAFESIKSVVSYWNLALIFHRKAEDIENDALSPEEQEECKNYLRKTRDYLIKIIDDSDSNLSVVKKLPVPLESVKEMLNSVMQELEDYSEGGPLYKNGSLRNADSEIKHSTPSPTKYSLSPSKSYKYSPKTPPRWAEDQNSLLKMICQQVEAIKKEMQELKLNSSNSASPHRWPTENYGPDSVPDGYQGSQTFHGAPLTVATTGPSVYYSQSPAYNSQYLLRPAANVTPTKGPVYGMNRLPPQQHIYAYPQQMHTPPVQSSSACMFSQEMYGPPALRFESPATGILSPRGDDYFNYNVQQTSTNPPLPEPGYFTKPPIAAHASRSAESKTIEFGKTNFVQPMPGEGLRPSLPTQAHTTQPTPFKFNSNFKSNDGDFTFSSPQVVTQPPPAAYSNSESLLGLLTSDKPLQGDGYSGAKPIPGGQTIGPRNTFNFGSKNVSGISFTENMGSSQQKNSGFRRSDDMFTFHGPGKSVFGTPTLETANKNHETDGGSAHGDDDDDGPHFEPVVPLPDKIEVKTGEEDEEEFFCNRAKLFRFDVESKEWKERGIGNVKILRHKTSGKIRLLMRREQVLKICANHYISPDMKLTPNAGSDRSFVWHALDYADELPKPEQLAIRFKTPEEAALFKCKFEEAQSILKAPGTNVAMASNQAVRIVKEPTSHDNKDICKSDAGNLNFEFQVAKKEGSWWHCNSCSLKNASTAKKCVSCQNLNPSNKELVGPPLAETVFTPKTSPENVQDRFALVTPKKEGHWDCSICLVRNEPTVSRCIACQNTKSANKSGSSFVHQASFKFGQGDLPKPINSDFRSVFSTKEGQWDCSACLVQNEGSSTKCAACQNPRKQSLPATSIPTPASFKFGTSETSKTLKSGFEDMFAKKEGQWDCSSCLVRNEANATRCVACQNPDKPSPSTSVPAPASFKFGTSETSKAPKSGFEGMFTKKEGQWDCSVCLVRNEASATKCIACQNPGKQNQTTSAVSTPASSETSKAPKSGFEGMFTKKEGQWDCSVCLVRNEASATKCIACQNPGKQNQTTSAVSTPASSETSKAPKSGFEGMFTKKEGQWDCSVCLVRNEASATKCIACQCPSKQNQTTAISTPASSEISKAPKSGFEGMFIRKGQWDCSVCCVQNESSSLKCVACDASKPTHKPIAEAPSAFTLGSEMKLHDSSGSQVGTGFKSNFSEKASKFGNTEQGFKFGHVDQENSPSFMFQGSSNTEFKSTKEGFSIPVSADGFKFGISEPGNQEKKSEKPLENGTGFQAQDISGQKNGRGVIFGQTSSTFTFADLAKSTSGEGFQFGKKDPNFKGFSGAGEKLFSSQYGKMANKANTSGDFEKDD

SEQ ID NO: 5804 - DNA, 7240 bp, Homo sapien
ggaaagaagtggaataattaggaacctagggtggggtagggtagcaggacatttcaaacattaatgagcatatgagattccaggtcttgttaaaatgcaaattctgattcagctggtaggtgaggtctgagattgtgcatttctaacaagcactcagataatcttaaggctgttggccccagggtcacacttatagtgattttctagaacccagttggggaagtgaatcttgggcaggagaaatacacacctcttgcattgagtttggagatctcatctgatataactttttaagaaagaaaaataattttccaaatatccaattgataagctttcccactaagtggctttcccactaagtggctgcgttatgaaaattgcttcactttgaaacttctggtcttggtaatatagaatttctgtgttctcacagtgcttgattgagaatatgatattgagattatggcataaaatatagtggctgtacaaaaaaaatacattattaggatctctaacaattatgtaaaagtcattgcttcatgggtagagctcaaactttggtgtgagacctggttttattcttggcacttactctgagttgtcttaggcaaattaataccttaagcaaaaatattctcatgtacattttacatgagaattataaatgaagtacataaagtccagcagtcacaaatgttatctattattaccatcgtcctaagacygcaatcagctatagtgaaagtagtctcaaagattgtttcataaatcatcagattcacctaattttctaaagaatttaaataaggagatggaatgaatagattgcattttgtttccatgcacaggggaactgtgcatatttcttctgtgactcggaaatggtttaacttttaaaaatcccaaaatagctgaagttagcagacatgcaatttaccaaggatgattggaatttttatctttcctgtaataatactatacccaagcacactgctcatgaggaaaacatttttatgtgaatcttttactcttgggggcaaagaatgctgtttttctttttgataactatgtttatagaatctaaatcaccctgagcaattatttcaacatctaaagttattattaccattcatgtttcatttatagctatttgaattttgatgaatttcaatatggtgctacagtgatagggcaagtgcaaataagttcaatatatgggtacggtctaaagctattttaatttttttattacaactgctatgaagaaaattaggatatgccatattttcacgttttacagttggatgtcctatgatgttctcttccagagaacagagctcggagctctggaaatttggaggcaactgatatgtgctcatgtctgcatctgtgtgggttggctgtatctcagggacagagtctgcagcaaaaaagatataattttgaggactgaacaaaattcaggaaggactattctcattaaggcagtaacagagaagaattttgaaacaaaagattttcgagcctctctagaaaatggtgttctgctgtgtgatttgattaataagcttaaacctggcgtcattaagaagatcaatagactgtctacaccaatagcaggattggataatataaacgttttcttgaaagcttgtgaacagattggattgaaagaagcccagcttttccatcctggagatctacaggatttatcaaatcgagtcactgtcaagcaagaagagactgacaggagagtgaaaaatgttttgataacattgtactggctgggaagaaaagcacaaagcaacccgtactataatggtccccatcttaatttgaaagcgtttgagaatcttttaggacaagcactgacgaaggcactcgaagactccagcttcctgaaaagaagtggcagggacagtggctacggtgacatctggtgtcctgaacgtggagaatttcttgctcctccaaggcaccataagagagaagattcctttgaaagcttggactctttgggctcgaggtcattgacaagctgctcctctgatatcacgttgagaggggggcgtgaaggttttgaaagtgacacagattcggaatttacattcaagatgcaggattataataaagatgatatgtcgtatcgaaggatttcggctgttgagccaaagactgcgttacccttcaatcgttttttacccaacaaaagtagacagccatcctatgtaccagcacctctgagaaagaaaaagccagacaaacatgaggataacagaagaagttgggcaagcccggtttatacagaagcagatggaacattttcaagactctttcaaaagatttatggtgagaatgggagtaagtccatgagtgatgtcagcgcagaagatgttcaaaacttgcgtcagctgcgttacgaggagatgcagaaaataaaatcacaattaaaagaacaagatcagaaatggcaggatgaccttgcaaaatggaaagatcgtcgaaaaagttacacttcagatctgcagaagaaaaaagaagagagagaagaaattgaaaagcaggcacttgagaagtctaagagaagctctaagacgtttaaggaaatgctgcaggacagggaatcccaaaatcaaaagtctacagttccgtcaagaaggagaatgtattcttttgatgatgtgctggaggaaggaaagcgaccccctacaatgactgtgtcagaagcaagttaccagagtgagagagtagaagagaagggagcaacttatccttcagaaattcccaaagaagattctaccacttttgcaaaaagagaggaccgtgtaacaactgaaattcagcttccttctcaaagtcctgtggaagaacaaagcccagcctctttgtcttctctgcgttcacggagcacacaaatggaatcaactcgtgtttcagcttctctccccagaagttaccggaaaactgatacagtcaggttaacatctgtggtcacaccaagaccctttggctctcagacaaggggaatctcatcactccccagatcttacacgatggatgatgcttggaagtataatggagatattgaagacattaagagaactccaaacaatgtggtcagcacccctgcaccaagcccggacgcaagccaactggcttcaagcttatctagccagaaagaggtagcagcaacagaagaagatgtgacaaggctgccctctcctacatcccccttctcatctctttcccaagaccaggctgccacttctaaagccacattgtcttccacatctggtcttgatttaatgtctgaatctggagaaggggaaatctccccacaaagagaagtctcaagatcccaggatcagttcagtgatatgagaatcagcataaaccagacgcctgggaagagtcttgactttgggtttacaataaaatgggatattcctgggatcttcgtagcatcagttgaagcaggtagcccagcagaattttctcagctacaagtagatgatgaaattattgctattaacaacaccaagttttcatataacgattcaaaagagtgggaggaagccatggctaaggctcaagaaactggacacctagtgatggatgtgaggcgctatggaaaggctggttcacctgaaacaaagtggattgatgcaacttctggaatttacaactcagaaaaatcttcaaatctatctgtaacaactgatttctccgaaagccttcagagttctaatattgaatccaaagaaatcaatggaattcatgatgaaagcaatgcttttgaatcaaaagcatctgaatccatttctttgaaaaacttaaaaaggcgatcacaattttttgaacaaggaagctctgattcggtggttcctgatcttccagttccaaccatcagtgccccgagtcgctgggtgtgggatcaagaggaggagcggaagcggcaggagaggtggcagaaggagcaggaccgcctactgcaggaaaaatatcaacgtgagcaggagaaactgagggaagagtggcaaagggccaaacaggaggcagagagagagaattccaagtacttggatgaggaactgatggtcctaagctcaaacagcatgtctctgaccacacgggagccctctcttgccacctgggaagctacctggagtgaagggtccaagtcttcagacagagaaggaacccgagcaggagaagaggagaggagacagccacaagaggaagttgttcatgaggaccaaggaaagaagccgcaggatcagcttgttattgagagagagaggaaatgggagcaacagcttcaggaagagcaagagcaaaagcggcttcaggctgaggctgaggagcagaagcgtcctgcggaggagcagaagcgccaggcagagatagagcgggaaacatcagtcagaatataccagtacaggaggcctgttgattcctatgatataccaaagacagaagaagcatcttcaggttttcttcctggtgacaggaataaatccagatctactactgaactggatgattactccacaaataaaaatggaaacaataaatatttagaccaaattgggaacatgacctcttcacagaggagatccaagaaagaacaagtaccatcaggagcagaattggagaggcaacaaatccttcaggaaatgaggaagagaacaccccttcacaatgacaacagctggatccgacagcgcagtgccagtgtcaacaaagagcctgttagtcttcctgggatcatgagaagaggcgaatctttagataacctggactccccccgatccaattcttggagacagcctccttggctcaatcagcccacaggattctatgcttcttcctctgtgcaagactttagtcgcccaccacctcagctggtgtccacatcaaaccgtgcctacatgcggaacccctcctccagcgtgcccccaccttcagctggctccgtgaagacctccaccacaggtgtggccaccacacagtcccccaccccgagaagccattccccttcagcttcacagtcaggctctcagctgcgtaacaggtcagtcagtgggaagcgcatatgctcctactgcaataacattctgggcaaaggagccgccatgatcatcgagtccctgggtctttgttatcatttgcattgttttaagtgtgttgcctgtgagtgtgacctcggaggctcttcctcaggagctgaagtcaggatcagaaaccaccaactgtactgcaacgactgctatctcagattcaaatctggacggccaaccgccatgtgatgtaagcctccatacgaaagcactgttgcagatagaagaagaggtggttgctgctcatgtagatctataaatatgtgttgtatgtcttttttgctttttttttaaaaaaaagaataactttttttgcctctttagattacatagaagcattgtagtcttggtagaaccagtatttttgttgtttatttataaggtaattgtgtgtggggaaaagtgcagtatttacctgttgaattcagcatcttgagagcacaagggaaaaaataagaacctacgaatatttttgaggcagataatgatctagtttgactttctagttagtggtgttttgaagagggtattttattgttttttaaaaaaaggttcttaaacattatttgaaatagttaatataaatacataattgcatttgctctgtttattgtaatgtattctaaattaatgcagaaccatatggaaaatttcattaaaatctatccccaaatgtgctttctgtatccttccttctacctattattctgatttttaaaaatgcagttaatgtaccatttatttgcttgatgaagggagctctattttctttaccagaaatgttgctaagtaattcccaatagaaagctgcttattttcattaatgaaaaataaccatggtttgtatactagaagtcttcttcagaaactggtgagcctttctgttcaattgcatttgtaaataaacttgctgatgcatttaaaaaaaargtcgtctttttcttaggtgtatgtgtctgacctcaggccttttagccatatttcagtatgtggccttttttgatgttatgttttatccagtagctttactaaggtataattgatgtaataaactgcatatatttaaagtgtatactttgacaaattttgacatggtgtataccttcgaaactatgccacagtctggatgtgtttactgaaacattttaataaggaagtttatttttgataaagttatgtttttggatacaatatatttgtatggtgagagtgatgaattgttggatcatttgaataaaatcttttactaaccccatgataaaaggagaagacaacagtgagcttagaatatctataaagcaaaaaatgtagtctcttgtttaaaaaatctggagcgggaatgcaaggatacaaaactttagcatgctttgagcaaaaatttaaacttactggaatcttttataataatgtaagtggaatggaggattctaggaactgagaactgtattggaataggttcaaaatatgtaagaaatgctaatgtgggagataaaaattttatttagtacttattctgattattattaaagtaataatgtgttccttgaggataacttgtcaaatgccccaaagcataaagaatataattctgaatcccaaattccaaagacaagaactctgtgtttgaattcattctgcatataattatttataagtatagattgtgaatttttccatgttcttaaaattatttttatcttttttcatggttgcatagtgctccattgtttggccttggtaatatttagttgataattccattactgtgtatttttcacttgtttctaagatcaaacattttaatatgtgcatgttatatataaatatgtaaattctgtgatactctatgatcatctctttctttatattattttcatagacatgaaatagttgctcagagattatgcattttaagacactcatagtatatattgccaaagtggtttccagaaaggcactgctggcttcgactcctataagcagcacgtgggcttgttcatctcactgcatgtttatgaagatacagttcttttgccttgttctctgcctgatgtgtatgcagaggcagccctcaatatgcagtggttgaataaatgaatgaagaaaccactaaaaaaaaa

SEQ ID NO: 5805 - protein, 1349 aa, Homo sapien [sequence omitted]

SEQ ID NO: 5806 - DNA, 816 bp, Homo sapien
  Unsure 345-542: Unknown base
tgctttggaagtgagatgattttttttcagttaggtgacatttttgtatttgtaagaaaactatttctagtacatgcacatatgagaatactgtcgctggtaatagttcttaataagggatgtatcagcatcacgtggggagctttttcaaaatatctgtgcccagttcctacaccacagagattctgtaaccatagttgtatcatgggggatatagggacttggaaaaagtccaaaggatgtctgatacatatcctccttaagaaccattgacttacaggataatagcaccaaacctcatatatagttacccataattcaaaggggtttacaactaaaccttgnnnnnnnnnnnnnnnnnnnnnnnnnnnnnnnnnnnnnnnnnnnnnnnnnnnnnnnnnnnnnnnnnnnnnnnnnnnnnnnnnnnnnnnnnnnnnnnnnnnnnnnnnnnnnnnnnnnnnnnnnnnnnnnnnnnnnnnnnnnnnnnnnnnnnnnnnnnnnnnnnnnnnnnnnnnnnnnnnnnnnnnnnnnnnnnnnnnnnncagattctgacagataaagtatcatttcagtagtggttttagatgtgttctgtctgcccatctgataaccgaaaatttatcactttcatgaataagtgttttcagaccaatattcaatagttggataaattttacattaatatatttaaatttattctgtccttatcaggtggtttgatttaataattttaaataattaaaacagaaattaagtctagtttaaaaaaaattgtctccagtaagcctaccaagaaatttggtatttcattaggtc

SEQ ID NO: 5807 - protein, 90 aa, Homo sapien
CFGSEMIFFQLGDIFVFVRKLFLVHAHMRILSLVIVLNKGCISITWGAFSKYLCPVPTPQRFCNHSCIMGDIGTWKKSKGCLIHILLKNH

SEQ ID NO: 5808 - DNA, 2510 bp, Homo sapien
  Unsure 1499: Unknown base
  Unsure 1519: Unknown base
  Unsure 1678: Unknown base
tccccctcagataagggggtactactgaactcccattgcaatcctccctgtgccagtaaatggcagctctattccttcacaccagaaaatctcgttatcctttatttttcactttcacataccacatcgaatccatttcttttttaatcctgttttccctagtttcagaatatatccacaatccactctgggtccaagccacttcttgcctgatatgatggtgttaaaacatattccaggttatgctacttttctgctagtccctcaatgccttcccatctcacctggaatgtcaacatccttacagtggcctagaagggcattgtgataatctgtcctacttttggccccacctcagccgccactgccacttctctgacctcatctatttcttttgtcactttgctaaagtcacactggcctccttccttcacccagaacaccctcaaagcatgttctgtctcagagtctttgtccttgctgtctctcagtctcaaaacttcccccatatgcctacatagctgactccctcccttcaggtctctgtacaaatattcctgtactgtcagagacctgtgtcaaataacttctcatccccccactcattttctgcttcattgcctttcacagtacttatcaccatatactttgcttactggtccgtctccagtgctttgaagaatgcttggcaaatattagtcactcagtaaatatctgttggatgaaagaatgaatgaaaataataacagagctttggaattttttaaagggtaaaaaactatatgattaatttcagtttcaaaaaaaaaaaaacactgtctccaaagtttatatcataaaagcataggttttatgtcatatagaaaatagaaaaccctacagattttctttcctggaaggctattgtggatggaagacaccgggctatgaccctggctatactttcttgctccatgaatcatcctaacaggccaagttgcaggaacgtaagaagggctgtcatatagaaccatgagaaaagcagtatttcaaaactcttacatttttacagataatgatccattttaagctattggcattgcaataaatgcagttattggatgtgggtggggattctgaattttgttttctggtctaaatgtttaaaaaaacaattttttttttctgaaacaagaaataaacaacagtgaaagtatcctcctgccaaatgcagcttgaagacagcctaatgacatttgggtcttaacaatcttccaaggacaacaattctgcctccctgggaagcctctaacatctgtatatattcagctccactgaatgttgcatgaagtttcattgtagaaaattgacacatgccttctgattaatctgttgtttcactcagtcttgtaaagggcacaccctgtagtttccatttgttcaatcatgtattttcctgctcacttaataaatctttttaaaaaataaagaaggaagataacaaaatgatgtcatatgangcaatataacagtgaaaganttttttttttggtcctcattactttttgtgtcttttcacaaatctgttgagattaaggatagtgtgtaattcatgctaaatagctaggatcaaggtcttcacctttccaggaccaaaagcattttggagttccatggtgcttagttacagattcctgangtcctgttgaaaaatgcaggacattagtttcagggatagatggaaaatatgaaaaagatgctaagaaatgggacaaggtgtcacagtcattgtgaacaatctagattatcacaaactccagttaagatacaaaaacattttcaaagtgagttctctatatgtgaaaaaaaatattttagggtgttggttttctttaaaattgtaactcaacagcttaaatacatgtttttatattttcataagcaactaaatccatgttctatgacaataacaatttgatatagggttatctccctccaaaaattagtcatcttcatgtccaaagttcaatgttaatttacccatagtcatgagggcagggatcagcagcatcacggtctgatgaacattttcagcactgtacccagtgctccatggatctcaggttatcttttattattaaacccatttaataagagagatggcagttgaaaaattgaaggatttagagctagaaggcatcactggagcagaaagaaacagcatagccttcaggtcaacttgatactcttcccccatctcattccttctcactagaatagccacattcataattggaagcctagccagctcaggccaaagttatcattagtccaaggaaaaatgaccaaaaaggacagcatagtgagttttgtataaaagctcatttaaagatcgtcttatttggagatggtgtgccctcattttagtgttacaatgtatttgagagctgatgctgataataaatggctattttattaaatgctctagtttggcaaaattaaaagttgacagttttgttgttcttcacaag

SEQ ID NO: 5809 - protein, 48 aa, Homo sapien
SPSDKGVLLNSHCNPPCASKWQLYSFTPENLVILYFSLSHTTSNPFLF

SEQ ID NO: 5810 - DNA, 656 bp, Homo sapien
gcctctttttttttttaaatgtttttaagtttggaattggtgtttggttttggtaatgtaagtcatggtcagtttggggaccgggcccccagtttgtagagagtacatttcttggtgactacaaagttctacgtatactaggtaactgttgtgttttaaaaatacatattgccctttttattgtcctttactcaatctgtgggtttctggagaggtatgttaacatctctggtcatgattgtggtgaattttataactctgcttttgctttaatcatttgaagccacttagcatcacagaggttcatggctattatgctgtatcttctttatgtgtttttatttacttttattaaatacacagtatcttcacccttgcaaatgcttttttacttgaattctagtttgcatacagtaataatgccatatctacatttcttttgttagccaagacctattttattttcctgtttatttcaaccattggtgtttaattttagattgtcttctataacagcattaagtggattttttaactgactctgataatgtcctttattattaccacttttaaattattcctgccatattattgacattttaattacaaattgttattgaatataggctgggcgcagtgacacacgcctgtaatcc

SEQ ID NO: 5811 - protein, 17 aa, Homo sapien
LFFFLNVFKFGIGVWFW

SEQ ID NO: 5812 - DNA, 890 bp, Homo sapien
gcaaatttttgttgggaagtggacattttgtgtgttgtaatatgggaactctgaaagtcagattccactgcctccctagggattactgttgttacttacgaaagctgcatttgtttagtgacttttccaaactgtctttgcaaagagtgtatatctggttgcatgcggtcactgaagtctctgttcttttatctctgtggtctttcaatgacttgacagagagttccttaaatgcttagatccaataagaaaaagaaaacagaaagaaaaaaagagtgttctctccctttaagttcacttgtctagtgccactaggtaggcaacttcagttcgggggtgtgcatgtgtgaaacagtggccagcgctctggcagctcctcagcaatcaaaagtagtgaacgaaacacataacttcaatttttggaggacaaagcccctatttcctgccctagcaccagcaagctgcagcagaaactgccatcccaacagttggttaccacagggatgggagctagagaatgataagatgctattccaaatgccaaaattcactaaaatttaccaacttttttcttcatcaagcactcttctggacactgcaagtgtttcattagaccccagagtcctaaaatatcacctcaagcagttcttgccatctcaatagttactttggtgaagatactaactcctgaagttcctactctgtcatcttgacctatgtccttaattttcagcaccgatttagttgatccaaccctccttctcagtgtatgcgcgcacacacactcatccaatctgttctctacacagaaagaaccctttgtaagtgccagtgcctatgtttttttcacttaaaagataatttcattcttaacatggaaaaagcggagt

SEQ ID NO: 5813 - protein, 78 aa, Homo sapien [sequence omitted]

SEQ ID NO: 5814 - DNA, 284 bp, Homo sapien
tcatttttaaagagactcctgctatgttgcacagacttgtgaattcctggtttcaagttatctttccccctatgtcactcaagtaatgtggactacactcatgtgacaccatgcccatctttatgttgtgtatcttatttttgttttgttttactcttgaatcagctcagtctgaaaatctgtcttttaattcatggggattttttagaatgatttcttggagggttttgtcttttgaatgtgtggtcccttctctgcctagaacttttttttttgaatgagac

SEQ ID NO: 5815 - protein, 56 aa, Homo sapien
MPIFMLCILFLFCFTLESAQSENLSFNSWGFFRMISWRVLSFECVVPSLPRTFFFE

SEQ ID NO: 5816 - DNA, 1874 bp, Homo sapien
  Unsure 760-808: Unknown base
ttttaacaatattcatttgcattagttccattccttagagaagttcaaaattaaaaataaagcagtttctcacacatttaaagatatagaacaactaatttggaaagccatgtgatggccccttgacccaggaaagaaaaaatatataataagtacataaaactacacaaatgtttgcatttcaggattatgaattataagtcagtttgttacttcaccatagcaagatgttgtgaatccactaaaatgttctttatggggattgtaatttaaagactgaagagcaggaacgatcactggttacaactgtatgacgtggactggacaaagactcgagattaatatccaaaaaagtttatagatgggtttgaataatagataatgggtcatttttataacattttacaataattaattttatttcatcttttaatgtggggggtggggaggtagagatatatatgctagaacttgaactttagaactgttactctcaggtgtcaggaaccttaaagaagtttggacttttctttgcagttaggaaatgtaagtgttcattatagataatttataaaatatgaaaaaccagaagaaaacaaaataatctgtagttctaccatgcaaaaataccccattattcacagtttgatattttctttagtttttctacatagacatgatcatattgtatagtatatatgattttgtgtattgctttaagcacctatatatgttgactcacgcgtttgatgattatctnnnnnnnnnnnnnnnnnnnnnnnnnnnnnnnnnnnnnnnnnnnnnnnnnacatatatttttttccttaggatttttttagaatagatttcataggtttaaaattttatgatgcaagtatattttcgaggaatggaaatataggctgaagagccagaacaaacacctaaaattcaatactaataacttcaagccattatatgaaggtttcaaataggtgatttaaagcagtgcaatgcattttatgctaattttcgttatgctatttgaaaaataaaacccttcttaatgctcaaaatttgaaataatgcaaatgccgcagatttgtttttagcctgaattatacactgcactgatagtatggccacacggtggcattgccgtggctcctgagcagcagccctgcctgcttgcctcaatgccttgcagccagcacttgctcagcccgtgggacttctaacagcactaatgttggttttgtagttattttcctttttacttttgtaatgatttaacttttttcacaccctgtaataagcgtaatagaagcattcattagtaacttccatagttagaaaattctgggtaacaaaatgccctaaaggatgccggacattgtcacagtatgttagagtgctgttaatttggaagagagaactatgaaaaaaaaaaaatactgaagattgtgctgcaaaaataaaaggcagcattacagcaaagtacacaagggtgattctagatgtatgtgcttggaaacaaatctttcctattttatattatttatgtctggtttataactaaggggactttattcctgtgcagcatcgctgtgtgcatgtacactctgtgaagctttataagtatttggcagtcgtgaacataaatgtaacaggaaatcctgaggagtggggctaaatcatcttaagagcaataaacatggccagaatttctttcttttttttctggtggtccggtttggttttggaaatgggagtctcgctcaggtcaccaggctggacgtccagtggcgcacaatctcacgctcactggctacactccatttcccaggtccaacgcagatctctccatgcctcagcctcccacgtacgctgggact

SEQ ID NO: 5817 - protein, 59 aa, Homo sapien
MARISFFFFWWSGLVLEMGVSLRSPGWTSSGAQSHAHWLHSISQVQRRSLHASASHVRW

SEQ ID NO: 5818 - DNA, 461 bp, Homo sapien
aaaaaaataacaaaacgggtaactctcacgtggtaggatattcttaattcagcacagataaaaacatttttgattgtatttttcttatttctctaccttcataaagagagtacacgcccttcctttcccaataattcaagatcatttttatgatgtagctctaagtatatttgaggatttgttttcttttgcaaaagaccaagggaaaaactaaaaaatttatagggcacattttaaaactatatatataacacacacacacgtatattctggctttttaaaaaacaggaatgtatttgcaactgtgctaggtgtttttttttttattactaaggttgttttaggggggaaggtagggggagaacaaggaggaccaacattacagaaacttccctagtatgtactgctgtatttgagtatgatgctacacttttcaacaaattttgttgatcaacaatata

SEQ ID NO: 5819 - protein, 13 aa, Homo sapien
MMLHFSTNFVDQQ

SEQ ID NO: 5820 - DNA, 892 bp, Homo sapien
cataaaaagtatttgagaaacactgggatttcatttattgggatttgacctacattctttctgggaatattgtcaagatgagatatagtttgtaaatgaggctagtgcagtatgattattctctcaagtttgcatttcatgagtcatttactcatgctgtgttttgtagagtcttcctgaaggtgttgggttctctggtggtgagtatatctttcttaaattgctgctgtggtaggccttggtaaagttcaactgggttggatggggaagttctttgaactctttcaaaaatcaccaaactacagataatcgcaaatctagcagagggaaaatatcagttatttaactttgaaaacaaatccaactttgtattttagaaattacttgcaagacagtaagtccatgattttacaacacaattgcacttgtaggtttaaaattagaagtaaatagcatagtaaatgctcattcaatagttgtttaatgaattaagtaattatattgtttgtataattttgaggaactagaaagatgagtgaggcgatttcaatgtgtacatgagggcaacaatcgtgtataatatctacttggcacttcacagagggcatgactctttccataaaaatatttagtatgttcatgatgtcttttatctaaagaatttcatgctttagatattagtcaattctcaaaacactactctgaggaaggtgagtgacacacccctttatagacgaagaatttgcagttgaggctggttaaatgtgactaactcaagattaacactggtggtaggagacttgtctctggcctcattctgtgcccatgacctgctctttgaccttcaggaagctttatagcctcctcctgtccaacctccctcccttaaaaa

SEQ ID NO: 5821 - protein, 21 aa, Homo sapien
MTCSLTFRKLYSLLLSNLPPL

SEQ ID NO: 5822 - DNA, 978 bp, Homo sapien
agagagaaagtgctattgaaacatcttgtagaatgttggcagttaaaagggcatattactactcaatcaatataaagaacttttgaacaagcagagccatctgaagtttgaatgtgctgctttctgagctcctttagatggaggtgttcaaacagcctaaatcttttgagaataccgtagggcataaatcacaactttttaaaaatgagccagctatttgttctttattatacatgaactaagaatatccagttctctaaaacaaaattttggtttttatactgttcactttctagcaagtaccaaagtaccttgtctgtatataagacatgagtgaagagggaggagatgtgtggaataagatgcataacacatagtccttaagcttaattatgccaccctacattttatgatttacggatttcgtattatccttaggaagtttactgtttacttgggaggtctgattttgtttgtttttatactttaagtaagttgtgtcaaatcattcttgaaacataaagggtaaatatctccaaatgggaaaattagacttatacataataaatagagtaatacatgaaatatcacaaagcaacttgtgactaggtgccaaatgtgtgggatgggcagaagagcaatagggacttaggaaagagaaggaatgtcatgctggtagacttcagggaagtttcataaaaggaagaattttaactcagcgtagaaagatgggtaaattttcctcatgtgaaggtgtactgcctggggtgctgcaggctggagatgagtattaaaataggaggagagtgagtgaaagcacaggaggaggaagggtcaggcaagtttggtgaacacagcaactggctatagaacaggagcagtgggagaaagtccagaaaggtctgctgagcttcagttgtacaaagctgtggagtttggcctttggtcatggctagattaggtctgaaagccttaatt

SEQ ID NO: 5823 - protein, 27 aa, Homo sapien
RESAIETSCRMLAVKRAYYYSINIKNF

SEQ ID NO: 5824 - DNA, 1158 bp, Homo sapien
  Unsure 946-967: Unknown base
gggtatgatccttttttctcacctgctacctaccttttaggcctctttcactcgtgtagtttcaaggaaaatatactcaattatggaatactttctacacatgatacatttatcccaaaaaaacttgaagtaatttatgtaaatgaaattgcttgattaacttcataggaagtgtgctgtttggaatatgatgacacagcatgacagttaccaagcatgacttgagttgtgctaggatataggtgtgcaaagttggggttgtgttctatagcaaaagaatgcactcccagcgtaagcaacactgatggaaggggctcacagggtactggatataatactcttaacaactaatttttggagaatgaaagggcttttctttccctcttgttggctgattgggatggtataattaatgggattgaagagtttgagtaggttaaaaggcagattcatattgggtaacttggatctgccaggattgtatttttgagcactactgggtggttagcatgattgaggaaaaatgatgggaataagaagtggaagtggtctttgtatcacaagttgaatttctcacttggagtagtagtgaagtcactactgtaagagctggtcagtgaatgtggttgcagcatggcctttgggcaagaagtaacccatttaactaaaaccagctggttggccccactcagatttatcaaagggttactgggtccctgggggtggatattgcttatattagacttagaatagcatactgttttaatattatatgaactaaaatgtttctttaaaaaaagagtggtctgttaatggatttatgtagtggtcaagaatttagacttcagagtcaaataaacctatatcagtcctagtcctacagtttactaattgtgagatgtcaagcaagtttttgaactcctctaagcctctgttttcttatctnnnnnnnnnnnnnnnnnnnnnncgggttgagtgaatatttagtaaattcttagtacatactagttatttgtaactgtgagactggttttttggtatggttttcacatttgggagtagaaataccacttcctaaagtctgttttatctcaaattctctatccaggcatagtgtaaagtgaaatacctagatttcttgattaatatacagataat

SEQ ID NO: 5825 - protein, 51 aa, Homo sapien [sequence omitted]

SEQ ID NO: 5826 - DNA, 728 bp, Homo sapien
gactttgtaaactgatttcagagaagcgattaaggaattgtactgtctttaaacaatatttagaatgcttcagtaaaagcatttttaaaaaatttttctaatgatgtagtaaatgtacctaatataaagttaagtggttttatttaatacttttcacctgaccatgattatgttataaataagaggatttatagtttgcatgcctgatataatctatttaatttcctttacaaaatttttgtacatgaaagataaatgtcttcattttaccagctacctccttccagattgaatgcttcagtgcactttgattttcaaattggctattattttttaatgtaattaaccttcacaatttaaattgaaggatattctgatccttaggttataaatatgtgacttgatggtttatgtaacattcaagtagcatgttttctataacaatatgataaaagttttgatacataccttgtatgttgcttgacagatctgttttagaaaacattcctctgccttttgaaatgaagccatgtatttgaaattatttcccaaacaattatatcttaagcgtgtgctacatagtaatcatagtcattttaatttagattataaagctatattttaactttgaggtttgtgaattttcttagacatattaatgactttatagttaatggtgctctcagattttatttttaagttaaaaatttgccaggcgcggtggctca

SEQ ID NO: 5827 - protein, 32 aa, Homo sapien
LCKLISEKRLRNCTVFKQYLECFSKSIFKKFF

SEQ ID NO: 5828 - DNA, 1025 bp, Homo sapien
gggcccatcctctcactgaccctggggagcccttgcagtctgtgtctggcctgccccgtaactccagccctgaggccaggcccccgtcactcagctcttctctgcacataactgcccctgccccacattcaatgtccctaaagggcagccccgcttcctcctgcaggtcaggagcaagcacgtgaggtacagccctctggggggttcataccccacttcccaggagcttgaggggtgcaggaaagccacgcccgctccccagcaggtagcaaaagtcctaggagttctagaaccattcttctccttcacccccttgacgcaaatttgccgagtgtggacctgacaggcacagccaaaccaggccaggttgcaccctcacggggcaccacactgcatgtgcaggaagctactgggtggcaggctcggattcaaacccgggtctgtctgaatgtgggaactgtgggagcaactgctcactaacaacctaatacccagattccccttccttcctaagagaatcctgactcatcctgggaatctacatgcacagctcaaagaccatatatcccagcctcccttgcaattagggaaatgtaaggggaagtttgggggagagacaaatggcgcttcctccagttttctgctgcggatgcagacgcaatggctggagcaccagcagtgttcttgcatcttgaggtgactgtgagggtggaaaccccacttggaggatggcagatcagaaagaaagaaggagccacagtcactgatgatacttgggggcccaggactgctgcttgggtttcttttacatgagacagaaagaaatttgtgtcttgtgttaaatgactgttatttcagttctctgttacttgcagccaagagcaattcctaacaaatacaggagaaaactttattctttatagtttcaaataccatgggcatgggttaatcctctgctgggtttttaccgcttagacaaggtatgaattattaataaaagcactctattaataaagatctcttcc

SEQ ID NO: 5829 - protein, 60 aa, Homo sapien
AHPLTDPGEPLQSVSGLPRNSSPEARPPSLSSSLHITAPAPHSMSLKGSPASSCRSGAST

SEQ ID NO: 5830 - DNA, 698 bp, Homo sapien
gaaattgggagacaaaccctttcaaaccacagttccagataaaggctcagatttccaattccatcaacatggaggactgagcacgtgcagaatcttctcccattacacatacataaatatggtgaattaaagatttgtaggtacctgaaacataaaaggtatttaaaatcacagcaatagactactgcttacgacacatagccaaaggaacttacacttgagcaaagtcctcaagggaaggggctgtcattttaatccctgggcagagatgagagacaattgccttgtgcccatgtgagaagtaaaatatttgcatcaagctggaattcttaaaggtttgcacaggctacaaaaggagactgaacaatcccaccagcctgcccagagaagttacaaggacgcttgctctccgcccaagctctgggatggaggggaaaaaaactctcatctaaaataaaggtctcaactctgtgccgaatttgagtgtggagtctgaatttactctgcccacaaagcaggaaacctgccatcaaataattaagaaaaaaaaattgttcaggactgaaatttctgggccccaggagatcaaatgcaaaactatactctagagaagtatccacacccagggccatgggaatctcacaggaaaatattcttggctaaagatgaccttacattaaaattataagcaacaggct

SEQ ID NO: 5831 - protein, 42 aa, Homo sapien [sequence omitted]

SEQ ID NO: 5832 - DNA, 490 bp, Homo sapien
tcgaattcctaatttttgtgggactccttaagacccacaagtgacttctgtctacactacagatgaactgaattgatcatctaaaatacgtttatagcgttcattgtgccagttgctcatggttctgctaattggcccaggactagttgtgatctgcagactgaagccagagtaagtaagagaattcaaggcactaagacaaccaggaacagttttaccaaggcaagtggaagctgctaggctcagtggttgcatgcctatagatggggtaaatcatcctggtgcaaatatggtattcacaccataaatgtgtagtgcaagtttcctctgtggccaatcacagggctgcaagctgaagccccagtttagcttattctccatacataacttcaaggggactttctggtgaacttttccaagaagctccaagcacagatggttcaaatttgcagtttggctagactttgtgactggatgtacattaaattaa

SEQ ID NO: 5833 - protein, 17 aa, Homo sapien
MVQICSLARLCDWMYIK

SEQ ID NO: 5834 - DNA, 1075 bp, Homo sapien
ctctcggaactggggcagcggcccgctcacctcgtgtccgttgctggccgggatgatttcagactcgttcaccaaggaagacttgatgtcagctaaatcgccttcctcttcgggatgactgatctcggcgaagatcttttccttctgaggatcgccctcgtccttgaaggggatcatctcgtccgtggcgcagagttccgggtcccccccgccgccgccacctcctccggagagttggggcatcccggcggctctgtaatctccgctccgctgtgggagcacccgcgcaacagcaggaaagacagaggggcccctttgtgtgactaaatttggcaagaatatggatctgagccagtctttccacgtgtgctcccagctcccagctgagaaggccaagggttctcttccggatgcagcctttttgaaatttattcttggccaaaagaggaagatagttcaaggattctatcttgcttttggggggcaatggagaaaccctgaaaacacttaaggaaaacctgaggccttctataagaaaataaactccctgaaaggggaggcagggccaaggaatttacttatttttataaatctctttcctgggtggatatggtaatggatgtgtttcttgaattgtggtaaatgtacctcataaaatggatggactggggctatattctcaggcttcctgggctctgttggcattgggcaagcacgtaatgcctggtttgaggctagaagccaaagccacaaccttcttgcagtaccaactgagccatagggagattaatgcagaacaaggtcgttagtctcattgtttatccagttactagctgcatagattttgtgtaaatttcagctacagtggttgcagcctgcctttgatgtgtgtaatctgtacattttagtgctccaggaaagtacctgattgacaagatctacatccaatgcccagaaaacacatcctacacaggcacagtgaagcgtggagttgaagaattttccagtgagttccatcaaagtaaataaaccaacctagagcatctaaaaaaaaaaaaaaaaaaaaaaaaaaaaa

SEQ ID NO: 5835 - DNA, 520 bp, Homo sapien
ttgtttttcacatacacttaataagtatggtacacaatgccaatgccaaatacaaattgataacaaacacagcattcccaacagagctgtaatctagaaaactgagaaggtctgattgataaatcatcaacaacaataattgctctaaaacctccttaactgacttccttgattgtccaatgctctccattacctctgtaaaacagtcagttatcccatgtctagtgggcacccctgcatgcttcttctaaccactgagtgtcacaatgcctaccaagaatgcgtttgcaggttcctaaacctgtttataccagttgctatgtaaaattgttcccaagggaagttgaatgctctgtaaaggcctaataaaagcaaattactgaacaaaacatgttacagtaaattaatgaagtgaagaaggaaaactaagtatggaagagataaaaatcataacactttactattcagaatgcatccaacataaaaaaatattaagatcttaatccaatttttaaaatcc

SEQ ID NO: 5836 - protein, 31 aa, Homo sapien [sequence omitted]

SEQ ID NO: 5837 - DNA, 530 bp, Homo sapien
ggttgtcccaggcttgttctcgaactcctggggctcaaagccagtctgccccgccctgagccctcccaaagtttctggggattacagggtgtgaaccaccatgccccgctgccccttctttacttagctatattttccttactaagagttagttccctagcccatcagaaagattcccaggctggctacttcgggatgacccttgcattttttattgaaatcatttctgaatcttttttccccactagcttttaagacataggaactatatcttgttcagctttgcacttccaattataaaaaaatgcctggcgtgtgttaggcactcagaaaatgtttgaactgaaccaatggtgtgtgtgtctctgcacactctaagttagtgtaaatcagaacagcttgttgttgctgcttgttttgatccaagaccaaagagtgattgataaatgtgctaagtattttctgtgttcttaagtatgtttggtgtaacataatttggcatacacacatattaaattgccttcattctt

SEQ ID NO: 5838 - protein, 84 aa, Homo sapien [sequence omitted]

SEQ ID NO: 5839 - DNA, 1152 bp, Homo sapien
ctgaggcctggtatcccgttggggtaggaatgtgctgattttgcttgggcaacgcaccctctcactgggcctcagactcaattttcctacattggaggatactttagaggcaaaatgagattaatttcatgaggagcctagcacagtgcctggtaccctgggaatgttcaggtcctattacctgcccttctgtctttcccagtgtcctctcctcttttctctctcccatcccagggtccaggttaattgcagtgcaatatttgcatagacgtgagacctcacccggggaaattccccctggtgaccaaccaggtttcctttctgaggtcaggccacatcatcagacactgctccttcctctccggcttgccactgccaccgctggctttcgcccctgtcatctggtgggtttagatcctggcacacagatttaggctcatcctttgaccttgggcactgtccagagggtggggatgtggaggctgggctagggacccagagcaaaacagtgaggggatagatattcagggagaagaggaaagggcagcaggtaggtggtggataggaagcctggattgcaatttgaactcatcagtaactccctggctgcccctggggcacaagccttcccttctctgaaccttagtttccccttctatccagtgagaagattggtcaagataatctctaagctttgttccagatctgatagactaagaagccacttcctttgcttccacttcctttggcagcacagtgttgcaacatctgtacttggatccccttcctttgacaagaatcttgcaacatgccaccctgtattagtttccttggaaagcacaattttgcaaaaggcctccctgaatcccatttttcaaatgctgatagaatgacacatacctcctctccacttagtggcttagcttgcgttttaacttttcctttcacacccatcatacatactgttctgtgactccccgaaagagggattctctctacattctgaaatttgttgtccctatcctggtattgagaagtcaccttcctgatacaaaaagaaggaacaagttgggagaccacagtgactcaacgacagtaagttcctgggatcacctgaatcagaaccagctgttaaaagggcagatttgtctc

SEQ ID NO: 5840 - protein, 87 aa, Homo sapien
MTHTSSPLSWLSLRFNFSFHTHHTYCSVTPRKRDSLYILKFVVPILVLRSHLPDTKRRNKLGDHSDSTTVSSWDHLNQNQLLKGQIC

SEQ ID NO: 5841 - DNA, 454 bp, Homo sapien
tagaattaaggaattaaccttagagaatgtttacattttaaagagtggagaagaatcaaagagtagtcaaatatgatagaaaatcctgggcgactatttctgagttctgttttgttttgtttttttgccctttaagtagctctctttagtaggaaagggaagaatattgacttgggttagttagttctgatttcaaatttcccctttatcacttacttggcagtatttaaccttttcagagtgtttcactgtcagaaaataggaattcagggttgtgaagattacataaaataaatacataaagcacagtgcttgtgacagagtttctttaacttcattagcaccttccctgtgacttcaagtatagacaggacttttatacattagaatggaatatttgtttaactttgtttatgtctcttgttttctccttccttttgcttccacttaaaaa

SEQ ID NO: 5842 - protein, 24 aa, Homo sapien
RIKELTLENVYILKSGEESKSSQI

SEQ ID NO: 5843 - DNA, 990 bp, Homo sapien
cacacatgagttttcaaacattaaaactattacttaatgcccttgtgacaaattagtgttttatgaaaattggtattttaccccacagtaaaatagtagtaaggaaagtgtattgttaccttttagtaacttagtgagacacttaagtttctgtcttgcataaaatactcttttaagataattgttggatttgggatttgcagatggtactataaagttagcattcttctttcttggcaattagctaaaaacaacaaagagagggaaaaactgacacacaaacccagcattccactaaactagaagacagttaaaaaccccaagccacaaaataggtggaaatgttgccaggagcagtggccatcaggctggctgcatgtgggaagaagtaggtaggatgccgtggctgtggagctcagagacaacaagaaacacccatgaaactgcaaggcccccctgaggtataaaacctaaaccccttgtttacaaaagtgaagtgggtttcttcagctcaaggcaggagctttcctgcacctggtttaattctaagaagtcggggaaatgaagccaaacaaggagtcacataaacaagccatttttgcaggaagtaatatgtgtctatctctatagcagttggggaggagatgactgcattgtgaaaaacctccagactgcctgtctgcattggctgttgagaagtaaaatgctaaactgtctcttaggtaaatctctgaatcacgaaaaagttgtcagtccagaactggaggcactctggccttctgcataaacctcctacaaatatcaggttctggacaaccagcacttcttcagagatgaataatcaaaaggaattcattaagcttgactgccacaaatgtttggaaataaaaaaggaagaaagaaacagaaaaacaaaggacagatgaaaaatagaagtaaagtactggtatggagcatcgacatgttcggggtcctctagagtcgcccgag

SEQ ID NO: 5844 - protein, 13 aa, Homo sapien
MEHRHVRGPLESP

SEQ ID NO: 5845 - DNA, 960 bp, Homo sapien
  Unsure 391-407: Unknown base
  Unsure 781-804: Unknown base
cctttcctttctttttaaataggcaatcaatatctgattttatgaatgtctgccattgtgcatgattcagctaagtaagccctaatgagaattcaaaggttatgacgacttagtcataggagtctataatctaatgcagaaaagagatttacaaagcataacaaggcagtgttttatgttatgatataggtacggtgaaatgagtttagggaaggaagccggggaaggcttcgtagtaaaagtggcatttagtagaactcatgacgagctgagggatgccaatagtgaaaaggcaatgatgtcaagactgtaaagctaaggctgtttagtgaatagagtattccagtttacctagagtacaagttatgtgtgtaagtaaggccttgtcctnnnnnnnnnnnnnnnnntcagtctagtgaggaaaaaatgtaaataaacaaatgaatgagtacattttgcattctgagttatgcagaaagtgctttgcaacatagaggaaaaagccctaactgttgtggtggttgagagttgattggaaagcctcatggcgggctgagtcttgatggagcagtactttgcccagtggaaataagaagaaagcatatagaagttctccttatcctttggacttgcaatacacacaaaactttctggggctttctaaggaaattttatttcaagattctgctaggcaataactctccttccttaaattgaagggtaaggactctaagttctgctttttcttttctcactgaatttgcttaggtttttttttcgnnnnnnnnnnnnnnnnnnnnnnnncacctttctcactggtattgatcactttctcttccttagtaaagctccatttgcttctctcctaacctggacattataggaagcactgatgctgtattaaaatttagagaaagctcccagtctgtctttcccaacatcccttcagtttcaataagc

SEQ ID NO: 5846 - protein, 20 aa, Homo sapien
FPFFLNRQSISDFMNVCHCA

SEQ ID NO: 5847 - DNA, 614 bp, Homo sapien
ggacaaggtgaacacgataggttgatgcagtgcattaatgctcatgagcggtttagagaagcagtcagagatgagaggatggcagctagctgaaagataaggacagacaatggaagaccttgagtggctggatgtagatcgagtgacattgcataggttgaacaggtgttttatacagttaatgaaatccatttttgttttgttaacttttagcattttttaaaagtatatattgtatataacattcttggtagaaaagttacaaaatgctcattagtaaatagaaaagatgtcaattactcatactaccaccatccagaaatatcactctgaacatgttggcacacatccttcctaacatttttctctacacataacacgtgtgtaagacttttttttgaacaaaaaatagaatcacaaacatgctgatttattttttcccctttattggtctttagctcccaaatgcctcctcacagatacccactgtgatgtgtttgatgtgtgtcctgaacacgcatgcttccttataaaagggcgtgtagactggcacaaactccctggtaccacacacagtgcccagctgaccttcttatatgtgtcccgtcacagac

SEQ ID NO: 5848 - protein, 30 aa, Homo sapien
MLPYKRACRLAQTPWYHTQCPADLLICVPS

SEQ ID NO: 5849 - DNA, 547 bp, Homo sapien
taaagaaactgctgtttttaagatgatagttatataattgatgtaaaatttcagtagactgaaacttcctacatagtatgctggcgctatatgtaactttgaaggaaagaggaataagcaaagaaacctttcacccaactatgatagttttataaacctctttcaaacaactcgggtgtcaatgtgggctctaatattaattctgtgactggatttctaccttcttcaccagtctcatagggttgtttgatgagcaaatggaagtgtatataggaaaacattctgagcacagtaaagcactgcacaagtgacagataatgaaagacacagctttttactgagtttccaacaccagaaactaccaatggtaacaaaaaaaaaaagaatttggcagcaataaattataagccaccatttattccttaacagtaatggccactacttacagagcacttactgtgtgtcagccactgtgataatggctttatcatttaatcttctcaacaatgagaattaaaaccatttaatcttctcaacaatgcttttg

SEQ ID NO: 5850 - protein, 11 aa, Homo sapien
KETAVFKMIVI

SEQ ID NO: 5851 - DNA, 876 bp, Homo sapien
  Unsure 670: Unknown base
  Unsure 676: Unknown base
  Unsure 679-680: Unknown base
  Unsure 689: Unknown base
  Unsure 694: Unknown base
  Unsure 698: Unknown base
gaatgattatgactagaaaattaaaggctaatttgtgaacaaaaatcaggatggtttttagaggtactcagatgatatatggagcattgtatactcaggtttatagcttcatcagcttattttattaacttttcacatcctgcttggtcatttcccctgttgtcttgagtataccactattaaataataggacacaaactacattaaccagtattttaatgctttttaaaatgtatttaatagggaatttgtcccattataaaaattatttttatatggctttgcaaaatggatatattttccaaattatgagagtatttatatatgcaatatttatcaagggctataaaaaacatcatttttttcatccattatttccagttttgggaatgtattttaaggaaatcattttaaagaaggaaaagctgtgcatacatagttatttatggcagtattatcttcattagtgctacagcaaaatagaacaacttagaaaatgcagtggagaagaaaaccctacataaatgtgaacacagtcatgtaaaaatatgtgtgtaatgtaaacaaaaatgaattttaaaaaagattatccatgtaaaagtacgaggaccagaagggggaacatggagaagtacaatagtcatggttggttaagactatgggtggaaancctccntannattttcctnttttntttntaataataaaattcctaaaagagggttggaaaactgatgttgggttgggaatttgatattttgtgaattattatatggttgactgaggaagcaaaattcttttgtgtgaagaggatttaatgatcagttatcaggtaccacagtatacaagggtgattccctgaagccacaaacctgt

SEQ ID NO: 5852 - DNA, 925 bp, Homo sapien
  Unsure 366-484: Unknown base
gggggccacagcagcccagtgggcagcacggcagaggcatcacagacgaccccgtccagcgatgagaatgttgggtgcacactggagtggctgcgagtcatgacctggagacttcggaaactcaacaagactgcagggcacccaggggcaccagccccggtcaccgcagaggatcagtgcactttgccatctggcagatcaactcatggcacagctgtgacacatcacattcacgcttgtgaaccgagacgccataccccagcggtgccgagagcaacagtgctgtgcaggtctgggcagatgagggcctccaggacacgaggactcactcgctcaccctgcccagtggcagaggggaagtaactnnnnnnnnnnnnnnnnnnnnnnnnnnnnnnnnnnnnnnnnnnnnnnnnnnnnnnnnnnnnnnnnnnnnnnnnnnnnnnnnnnnnnnnnnnnnnnnnnnnnnnnnnnnnnnnnnnnnnnntttgagttaggtcagtgtctcagctgctctatcgggcctataggtttcttaggcatgtttaagaagctgccactaaggatatggatatgctgaacagcttagagcttctcattgaaatttaaccctaacagctccactcttgtctgttttatttggtttatggctttataaaacatcatttgacttttcagttttcactgcaaaaaaactcaaaagtttgaaaatcagaactgatgcctttggtttcatcatctttaaaatatctgattctttccaacatcctaactataaaaacagaaggactttattgccaatagtctaaattaaaaatccacctagtaaataccagttttcattatatcttagtgatttatgagtgatgactgattaaacaaaagttggatacatttttttgagtaaaaaggaaatatatacttgcag

SEQ ID NO: 5853 - protein, 120 aa, Homo sapien [sequence omitted]

SEQ ID NO: 5854 - DNA, 2166 bp, Homo sapien
ggcaagctactggcacctgctgctctcaactaacctccacacaatggtgttcgcattttggaaggtctttctgatcctaagctgccttgcaggtcaggttagtgtggtgcaagtgaccatcccagacggtttcgtgaacgtgactgttggatctaatgtcactctcatctgcatctacaccaccactgtggcctcccgagaacagctttccatccagtggtctttcttccataagaaggagatggagccaatttctatttacttttctcaaggtggacaagctgtagccatcgggcaatttaaagatcgaattacagggtccaacgatccaggtaatgcatctatcactatctcgcatatgcagccagcagacagtggaatttacatctgcgatgttaacaaccccccagactttctcggccaaaaccaaggcatcctcaacgtcagtgtgttagtgaaaccttctaagcccctttgtagcgttcaaggaagaccagaaactggccacactatttccctttcctgtctctctgcgcttggaacaccttcccctgtgtactactggcataaacttgagggaagagacatcgtgccagtgaaagaaaacttcaacccaaccaccgggattttggtcattggaaatctgacaaattttgaacaaggttattaccagtgtactgccatcaacagacttggcaatagttcctgcgaaatcgatctcacttcttcacatccagaagttggaatcattgttggggccttgattggtagcctggtaggtgccgccatcatcatctctgttgtgtgcttcgcaaggaataaggcaaaagcaaaggcaaaagaaagaaattctaagaccatcgcggaacttgagccaatgacaaagataaacccaaggggagaaagcgaagcaatgccaagagaagacgctacccaactagaagtaactctaccatcttccattcatgagactggccctgataccatccaagaaccagactatgagccaaagcctactcaggagcctgccccagagcctgccccaggatcagagcctatggcagtgcctgaccttgacatcgagctggagctggagccagaaacgcagtcggaattggagccagagccagagccagagccagagtcagagcctggggttgtagttgagcccttaagtgaagatgaaaagggagtggttaaggcataggctggtggcctaagtacagcattaatcattaaggaacccattactgccatttggaattcaaataacctaaccaacctccacctcctccttccattttgaccaaccttcttctaacaaggtgctcattcctactatgaatccagaataaacacgccaagataacagctaaatcagcaagggttcctgtattaccaatatagaatactaacaattttactaacacgtaagcataacaaatgacagggcaagtgatttctaacttagttgagttttgcaacagtacctgtgttgttatttcagaaaatattatttctctctttttaactactctttttttttattttagacagagtcgcttgagcccaggaggtggaggttgcagtgggccgagattgtgccactgcactccaacctgggtgacagagtgagattccatctgaaaaacaaaaacaaaaacagaaaacaaacaaacaaaaaacaaaaaatccccacaactttgtcaaataatgtacaggcaaacactttcaaatataatttccttcagtgaatacaaaatgttgatatcataggtgatgtacaatttagttttgaatgagttattatgttatcactgtgtctgatgttatctactttgaaaggcagtccagaaaagtgttctaagtgaactcttaagatctattttagataatttcaactaattaaataacctgttttactgcctgtacattccacattaataaagcgataccaatcttatatgaatgctaatattactaaaatgcactgatatcacttcttcttcccctgttgaaaagctttctcatgatcatatttcacccacatctcaccttgaagaaacttacaggtagacttaccttttcacttgtggaattaatcatatttaaatcttactttaaggctcaataaataatactcataaaaaaaaaaaaaaaaaaaaa

SEQ ID NO: 5855 - protein, 370 aa, Homo sapien
QVSVVQVTIPDGFVNVTVGSNVTLICIYTTTVASREQLSIQWSFFHKKEMEPISIYFSQGGQAVAIGQFKDRITGSNDPGNASITISHMQPADSGIYICDVNNPPDFLGQNQGILNVSVLVKPSKPLCSVQGRPETGHTISLSCLSALGTPSPVYYWHKLEGRDIVPVKENFNPTTGILVIGNLTNFEQGYYQCTAINRLGNSSCEIDLTSSHPEVGIIVGALIGSLVGAAIIISVVCFARNKAKAKAKERNSKTIAELEPMTKINPRGESEAMPREDATQLEVTLPSSIHETGPDTIQEPDYEPKPTQEPAPEPAPGSEPMAVPDLDIELELEPETQSELEPEPEPEPESEPGVVVEPLSEDEKGVVKA

SEQ ID NO: 5856 - DNA, 1126 bp, Homo sapien
gcttaccactttcctccctccccgagcatcatggatgttgggactgtgaatccaggtctccgttatctaaatggttgatgttagtgtttcctgtcatcacgtttagtatgcttgttgcctttactatcattatagctaaaataatactgctttcagagatgtgttgtataatcgcataataatttcagaacgccttcatattgaaccagatatgaagtgatacagtatcatttattcaaactgcctaaaaagtaaaaagtataaaccatatactatttttaaaacaggtaggttagatttaaatcacgtagtttagaactgttggaatggtactttgagtgataggatttatgttaggccttctttagtaatagttaatatcatgtaattagcactcgtttacacacaattttaatgtgttcgaatccctagagtcatcgaattcagaatttatagtattttattttacttagttaatattaacctaaaaaaaaagcaaaatacaggcattatgcagttgagttgtgttaagtgtggactgtaaaacaggatagtatttgttataaaatatgtttttgtatgtgtttaatatatagcttcaaaaggacatgtatgaagaaagatgtctcagcacataggtagttataaaccaagggtttgagagactgactttagaatctagaatgagtaagaaagtgatggatctgtacattcatttgtattgaagtttgattttgctttcagtttcgttaattaagccccgggaatcagggacctttcctggcaccctctacagtgttagtggcctttgtggtaaaagaagttatctcagatactcatttcatgcaattacaggcaaactggaaggcaccttaatggtatgcaagatgtgaaatgaattactatgttgcattccactctgcccccactcatgtacaattatactttgtttaaaagtgcatagtttcagtggtatttattagctagcaaataaaactttaaataaataatgatggtgttgtgaactgtcttttcaggtggttgaatgattcctctttgttcaaaatgaattgttttttttttaaatcagggtacatatgattcatacattttttccatcgtctag

SEQ ID NO: 5857 - protein, 58 aa, Homo sapien [sequence omitted]

SEQ ID NO: 5858 - DNA, 958 bp, Homo sapien
gtgggcggtacccgagggagagttcgagcttttattggcgagtttttatggtcactaggtgggcctgcccgtgggccattcttcccgtccccggggagccggggcgggcgggggagcgggcgttccgccgggcagtccccggctagactccccagcttcttaccactccaggactcagtttcttaatttgagttcctaattggacccgccctcaagttctggacaccccgggtgaagactgtaacgcggcgggtgcgggaggcgcgcgctcccgcccctgctgcgggcggctggtagcctcggtggccgccgccgcgtttgctggtgcctgatcctgcaggcagttctgggcacgcagagatcggctaccgtggcctgccctccgaggaccggaaaattaacaccctttaactagtgtcgcgttatctgccgggtggttcgcaggaagtcctgcgaacacgttgttgccagttctgtaaacgtgtttagatagctaaatatagatcacagtgccacatcttagggggccccacggtcacccctgaggcagtggctgttcacaattgattttagtggattttaatgattaatcacttgctcttgtgggcagcttttcaaaaatcacgtctttgtatttgcagctacagactgggtccaccagctaagaggttggtttttattagggttgtaaaatagatttaaaatctgcttgttgttggctgagatttaaaagcagatttctactatttaaaaaagatagtttgaagatactcccctaaaaagtaaagattcttccatactcggctcggatgagttgttttccttgtttgagggattctaggtcacacacttctatgttttaattcccgtggtaattcaaaatgtttgagaagtgggttgcgactgtgtcgttttaaaattgtacattaagctgacggtaataaaatcttcaagacca

SEQ ID NO: 5859 - protein, 61 aa, Homo sapien [sequence omitted]

SEQ ID NO: 5860 - DNA, 1911 bp, Homo sapien
tcactgtattgcccaggctgagttttcttcttcttttttttacattttgtttgcctagaattgtatttgattgtaatcaaatcatgtgtcacatctttttttcaatttgtgtgattattttgtggcccaatacatgattttttttgcgaatatttcatggacttaaatagataagtcctctctctacacataattaaatggagtgtgtgctttgcattattcagttcctttattcccatccttgcttttgtctgcagatttgtcctattccagaatgggtatactgaaacttgggtaagggtgaggccagcgttctgggtggcccaggctactatcccacccgtgccacagaatccacacagaggcccagcggcggcactgggtggtggggaagggggaggcggacccaggttgggggggcaggcagtcagtgcggttgccaggaagcgggaaagggccacaatggggtctgggaggtgggcggggcggagcggggatgtccagccacgtcgctttgttttcccacgctaggagctaccacaacaggtcagtgcacctcggggcaccgggtcccccacgcaggcccttcccggggcaccctttcccaacagcacgaaaatctcctgcccccaccccacccccaggtgattcccttcaccaagtctgggtctagacttggcccccgcgagttcacgtccctgcctaatgcgcctggagtccgggtgatggccctggatccgctcccggccccaagctccacacagccgggaaggaagctcgcgtttgttttgctggcgccagggatacggtccaggccccgccccgccccgcgctgatcccagggtagtgggaaagtgcgctccccaagaatttgcggtgcaggggccgcggccaccgccttctgtccgcaggtgctgcgagccgtaagcgccccccacccgcgctatgggctcggacgcctgggtgggcctttggcggccacaccggccccgcggccccatcgcggcgcactacggaggccccgggcccaaatacaagctgccgcccaacaccggtagaaggggcaggccccgggattgaggggtgggacggcgcctgggggagggaaggggaagagaccagggaggcctgcgctcggggctgaaccgtgcctgctagaggggagagggggtctgtgccgggggagggtccgtgttgcagatggggcttggggctgggcccggccagacgctaactcggatgctcccaggctacgccctgcatgacccgtcgcggccgcgcgcccccgccttcaccttcggcgcgcgcttccccacgcagcagacgacgtgcggccccgggccaggccacctggtgcccgctcgcatgaccgtgcgcggcaccgacggcgcccccgcctactccatctacggccgcccacgccgctcagcgcccttcctcactccgggacctggcaggtacttcccggagcgagcggggaacgcgacgtaccccagtgcgcctcggcacaccattgctccccgaaactggggtgtccaggcggaacagcagagcccaggtcccgcggcctatacggtgccctcgctcttgggtccgcgcgtcatcggcaaagtctccgccccaacttgctccatctacggccgcagagcggctggcagtttcttcgaggacctcagcaagaccccgggcccctgcgcctatcaggtcgtgagtccaggggtctacaagtcccgggccccccagttcacgattctggcgcggacttcgctcccccaagacaacactcggaagccagggcccgcggcctacaacgtggatcaggtggcctggagcccagggtcaagggtcagagtcaggagagtggggagggcctgaggtcggagtgatgggatcagagtccccgggggtcca

SEQ ID NO: 5861 - protein, 169 aa, Homo sapien
MTVRGTDGAPAYSIYGRPRRSAPFLTPGPGRYFPERAGNATYPSAPRHTIAPRNWGVQAEQQSPGPAAYTVPSLLGPRVIGKVSAPTCSIYGRRAAGSFFEDLSKTPGPCAYQVVSPGVYKSRAPQFTILARTSLPQDNTRKPGPAAYNVDQVAWSPGSRVRVRRVGRA

SEQ ID NO: 5862 - DNA, 1182 bp, Homo sapien
ggcacgagcccccagcacatggaagccctgttacagtccctcgtgatagtcttgcttgggttcaaatccttcttaagtgaagagctgggctctgaggttttgaacctactgacaaataaacagtatgagttgctttcaaagaaccttcgcaagaccagagagttgtttgttcatggcttacctggatcagggaagactatcttggctcttaggatcatggagaagatcaggaatgtgtttcactgtgaaccggctaacattctctacatctgtgaaaaccagcccctgaagaagttggtgagtttcagcaagaaaaacatctgccagccagtgacccggaaaaccttcatgaaaaacaactttgaacacatccagcacattatcattgatgacgctcagaatttccgtactgaagatggggactggtatgggaaagcaaagttcatcactcagacagcaagggatggcccaggagttctctggatctttctggactactttcagacctatcacttgagttgcagtgcctcccccctccctcagaccagtatccaagagaagagatcaacagagtggtccgcaatgcaggtccaatagctaattacctcaacaagtaatgcagaagcccgacaaaatcctccacctaacctcccccctgggtccctggtgatgctctatgaacctaaatgggctcaaggtgtcccaggcaacttagagattattgaagacttgaacttggaggagatactgatctatgtagcgaataaatgccgttttctcttgcggaatggttattctccgaaggatattgctgtgcttttcaccaaagcaagtgaagtggaaaaatataaagacaggcttctaacagcaatgaggaagagaaaactgtctcagctccatgaggagtctgatctgttactacagatcggtgatgcgtcggatgttctaaccgatcacattgtgttggacagtgtctgtcgattttcaggcctggaaagaaatatcgtgtttggaatcaatccaggagtagccccaccggctggggcctacaatcttctgctctgtttggcttctagggcaaaaagacatctgtatattctgaaggcttctgtgtgacaggaaacccaagcctaagaaacaattaagtggttctcatctctaaaaaaaaaaaaaaaaaaaaaa

SEQ ID NO: 5863 - protein, 192 aa, Homo sapien
MEALLQSLVIVLLGFKSFLSEELGSEVLNLLTNKQYELLSKNLRKTRELFVHGLPGSGKTILALRIMEKIRNVFHCEPANILYICENQPLKKLVSFSKKNICQPVTRKTFMKNNFEHIQHIIIDDAQNFRTEDGDWYGKAKFITQTARDGPGVLWIFLDYFQTYHLSCSASPLPQTSIQEKRSTEWSAMQVQ

SEQ ID NO: 5864 - DNA, 4134 bp, Homo sapien
ttggtattatataccgacattttaggttaccaaaatagaattgagaacattttataatggcatctaaatctatcagatactttgcaataagtatactgtttgcacattctgatgtgctatatcattagtagtatgggcattctaatgttttggaaggggtgttccctattctatttttcttcataaaaaaagaagtaggtcttagaagcagtgctttgccaaaaagtatgtaatatacacatctatacattcatgcatcaaaatgtgtggttgtgaatatatttgtgtatattcacacgtatgttttgacaagaaagatggcttagcttcacaattctatcctcgtttaatggaaagaagataatatttagtaagcaataaatttggacataaatcaagatatgagccagatttaccaccattcattcactgaaaatatttgcagacaatttttctgtttgtctgaagaaattcagcccttttaaaatgttatctaaaagtcataatttggggaacatacatggcctggtagaccgaatctatattcaaatgattatgtatttaaaagaaagacctcagaatttaaagaaaccatatatattttttatttactacaaaaaaattatacaattttatttatgccacaccagcatttttatatttgttcatctaatatctctgcttatttttttcatattgagaaagaacacaaactttgatgcttcttttatattaaaagaccacaaataagtttatagagaacagtaacaccagctctcagcatttccttttcaagagtcataatttcatcaaaatcatttcttattctttgagtcctagagttcttattcatcaagttttaattgacagtgtttattttcccacatgttgtctttggaataaggccattcatgaaagcagtttaattagtgagtctgccactctattcaaaccctgaatcaaggctctatctgattttaatttatgtaaaaaaaaataaaaatgtatagtcatttgcaagtataatgtgataactgctgtgtttatttcctttgtctggcataaagggtgagaaaaaggtcatacatgttgttaagggtagcagtttaggaagtgttttctaataatttgttttgttatattgcaaataattgatatgccacttatttctgcaagaaaaataggcttgaagtggttgggatattaatcattttgatagtatctacttaaagcattgatctgttttgacttgtggctctgaaccctgggctaggctgagggataatagtagtggagtagggcaaagatataatatcctatccagtgttttgtgaccacttatttgaagattagtgtgggacatgaggaccttgctacttttttgccaagatgctgcaagtctcccaaatcacttcaactgtgtttttaaaacatgtttaagcaacagaattatttttttgaaattagtctatacgttagacagtctatacatgacaaacatgaagatctaatatcaagatttgggagacgggatcttggaactccacctgtttgaccactaggaccactgaggcacctccaataagctctgtagagtgcctccagcataattcaaaatccactgacctaatccattatggctttacttaacattggagtgatcccgtaaagaatatagtattgtagtctgaactggaacggtaactcgtaagactcaagaaagaccgtttaaggaaaattggcataatacaaactgttcctgttgacttaagaataacagtaggttcacctatctgaggaaattaagtagttgatagtttaatgctaggcatcttttatgataataaagtaagatgtcttcttatgacagttaattgagttgtatcatgatacagaatgacagattttgtttcaaacaattgcgtcagaacctttgtaagcaaatattctaaggagaatcaatcttattttttaattgaactttttaaaattagggatactataataactgataaagatgaatttctgtgtttctaaagaatctaatttcaattactaccattaacatataaatgtgcttccaaaatccaagcaggtccatacaatttagagatttgaacactgttatcatgctttaattcagtcattcattaaaatattatctattcacttatttgatgattccaaacatttgatattgtattgtgtttttataattatttgaaatctgttcaccagtgctttgtaatggttttattaattgtgtagccattgctacttagatagtaacccactgagcaaaggcagtcatttattttcatccttgaagtaggggaagaaaattattaatttattagttctactttttcctgcattgcttattttgtaaacattttattatgaataatctgttctctttcactgtattaaaaggagaagaaaatgaacatttgagaatggaaaaaagtaataatatacaaataatctagtgctataaaatgcattatagtaagacacttttggtgtcttcgagtgcactatgttggaataaattttatacttgttgcttagtaaatctcagtcatacgtttggtttgaagctgttttttttttttaatttgaagtttaattttaaaagtgccacattgtaaaagttaccgttaaatactatgtagtataaaaaaccaacccaagctattgttaatgctctgaatgtttttctttgaaaatttaagtttagagaagaaattccttcatttttctcccctttgctaaaagaaagaaaatctataatatgtaagtctatgaatctttaaataactgaaggaattttagcagtactttgtataataaaaatattttttaaactataacttgccttagagcatggggtttcagaaagttttgacgaaaaactcatcttcattaaagagtctggataacttcatcagatggtaatttaatatgtcatgaaggggacactcaacattgggtcatctaccgtctaaataaatacggatttcatggtggcatttgaagcacattttgcaaacattatgatgttctattgtcttgctgaattctttattataacactacctcaagacaaatgatagactgttggtaaggtaaattgggttttcaatgtcaggaacaaataaaattttgcaaatagaagtcatcaaataattcaacaggaagaccatactggacacagatgttgtcagttacttctggacaatgtggtaacatggatatttcagtcactggtaacaatgtcagggttaacacccaatgaattatttgaaacaatttgggttgcaaaatttgaaattaattagtctattttgagattgattttctacgtgggccaattttatgtccattacctaaagccacaatctcccgctctaaggagttaaaggatgaaaacacccaactgctacactggaatggcagactggatattcaagcattttggcatttaatgcctgctaaatttttgtccgattatatatagatttgatgtatattattacccagtaaattcttcttgggaattttgtatacattatggaatattaggataagtttttgtaggtcagaagaatttcaagtagtttttagacaaaacatatccatgagtgtgaaaaaagctgtgttgacgaatagattacatttcacatttaccagcaagtcagtaaaaaatagtgcttatttacatagtcaatataatttaatgttctaaaaataatatcttcgatctgcccaatatttaatgtatcatttgagatttttaaaaatgcagccgctccattatgtaaacattaagatatgcctatgtttctttaactatacagcctctttacaataaatttcttgatttttgtgcacaggatagtattgcaacctgctatttagcctttggtgccttagaattattataaatatttaacaatatgtacataatgtaaatactgccaagagatcagtaaggccaaatattttctctattcactttttattgctcttgctttctattgctactaaagcctcttttatccagctttgtaatagttccaacattgtagcgaatgtaaatgtttactttcaataaatctgaacttgttcaac

SEQ ID NO: 5865 - protein, 66 aa, Homo sapien
MIMYLKERPQNLKKPYIFFIYYKKIIQFYLCHTSIFIFVHLISLLIFFILRKNTNFDASFILKDHK

SEQ ID NO: 5866 - DNA, 2504 bp, Homo sapien
atgaggtgttcaggttacactccaatcctcattctatcagaatggagctgcccagggggtattcccattggagaattggaacaaaaggattttcaaaaagcaactccaaaggacattttattgggtttaattatacctggaaccttagtcgtaagaagaaagaaaaggtagatttacagatgaaattctgatgtgaagccctatttaaagagtaattttttttctagctgttaaagaatactggtttacatatgaatactgaaagcatgactattgttacttttaattactaatatttaggtaatttgaagctccttttgttaaattttgcccatattaattaagaacaatgacaggctaatagagattaagtgtggtatattcatttagtggaataatatacaacaatgaaaagcagtgaacttataactctaagcagggcagaagaatacatacggtatgatgccgtttttataaagtttaataacaggaataatcagacaatctatttgtaggtttatgtatattatagaaattattaaaataccatagaaaagggatgacagttatgaaaatgagaacagtggttacccatgaagggaaaggcaggcagagggaaaaggagaggagtatggatggatgtgttattgctcacattctagttcttgagtttacaggttcttattatgacattgaacttcataactatcaagctatacttattttgcagaaacaaatatgttaaagttgttctcattatcattaaagataatttgtcatctttatgggttaaataagaaaaaccagaacatgtttcaatagatgccaaaaaggcattttaaatctgtatttcctaattgttcgagaaacataaaagaaatttttggagatgccaagttcaaatatgacaagactctaaggagaaaaactggatattaaaggtttaaaaaaacaagttgacaaggagaacagagaaggcaggtcttgttatctagagctagacaccagctaatatcttggtagtcaactacttgatagagttgctttgtcatctatcagtggagaaagaaagttttctctctgtctgtgatctctctctctccagtggaaagaaggtgcaggcagagttgctggtgttatcaagggtgtgggagtggaggttactttcctttctgagttaacacttgatgttttggagcagtggcattgtaaagtgtcctaggaaaaagtccagtctagaaaggacagattaggggaatgaaaagcagcagttggttgaattttaaaagatgaggttcttagggggcttagggtaataaaactcagaatgcaatagccaagtgattaaagaactaaattgggcccacatcagtagagggttggtacctaagcagccataggaaaagggcagttctttataatacatgaaaagcctagggtttaataaccacttagtaaggtatgttatggatatcttattttagagtaagaatataaggcatagccatatttatgaaggtagtaatactctactaatcaatacttagaagtttttgttatgactaatctgaatgctttttagtttttccttaatctagttatgttggtaatttataagtcagttttcagattaggaaagaaggtatttgagggtgttccatttccactgaatagtaagatgatgcttacttagatttccacagctgtttgaaagctctgtatttggctataacggaaaactttgttagggatgcttgatgttttgtgttttgtttctaaaggaagacagtgttttgttccttctttagaaaacttgaagaatagaataatgagtccaggattaatttgggataaagtcttttacttcataaattctgattctgtaaaaaaaaaaaaatctctaacctctttcaagaatatttaaggtaattggtcaaagggcaagtatcagtgataacctaaaatctagttattatttttatgcagccttcattgtttttctgattgaaaaacaaagtgaataaacatttgtaaagtgtataaaatacacataagaataaagatgagtaataaaagggtccctaatagtgaaaaacagttttattcaatttctttctagtcttttcttcttgctcacacttacatttttaaaattgcaggcttaatgtgtttattgcttttttatattcttttttcattagcatgtatcatgagcattttcctatgttattaaataataaaagttgcttttaaatagctacctaacatttcattttatggatgcactatcatttagccattctcctattacatgtatggtttctgtataacaataatggtatgattaaaatccgtgtgcataaattattattgctatctttatttcctcaggatagattcctagatatggcatttattaggtcagaatacttctaaagttttcaataactgtcaccaaatcatttatccatctgaattccccaaccccagaaagctgctgtgct

SEQ ID NO: 5867 - protein, 62 aa, Homo sapien
EVFRLHSNPHSIRMELPRGYSHWRIGTKGFSKSNSKGHFIGFNYTWNLSRKKKEKVDLQMKF

SEQ ID NO: 5868 - DNA, 1083 bp, Homo sapien
ggcacgagggaggtgtcgagcggcgttatttttttttgcggtttgcctttttttttctttttttttttttggaaccgcggttgtttaaaagcctgagggaacctggaggggggctcccactctctaccttctttcctccgagtttgtgactccgagatggacaaagtgtgtgctgtttttggaggctcccgaggcattggcagagctgtggcccagttaatggcccggaaaggctaccgactggcggtcattgccagaaacctggaaggggccaaagccgccgccggtgacctcggcggagatcatttggcatttagctgtgatgttgctaaagaacatgatgttcaaaatacatttgaagagatggagaaacatttaggtcgagtaaatttcttggtaaatgcagctggtattaacagggatggtcttttagtaagaacaaaaactgaagatatggtatctcagcttcatactaacctcttgggttccatgctgacctgtaaagctgccatgaggactatgattcaacaacagggagggtctattgttaatgtaggaagcattgttggcttaaaaggcaactctggccagtccgtttacagtgccagtaaaggaggattagttggattttcacgtgctcttgctaaagaggtagcaagaaagaaaattagagtgaatgtagttgcaccaggatttgtacacacagatatgacgaaagacttgaaagaagaacatttaaagaaaaatattcctcttgggaggtttggagaaactattgaggtggcacatgcggttgtgtttcttttagaatcaccgtatattacagggcatgttctggtagtggatgggggattacaactcattttgtaatttgcagattattcagttataggggtgattagcatcaagggcacactttggctactgattagacaattatacctacatgggtaacatgtgctaatcaaacctgctgatgctacaaatgttaatttctgtctttataaaaatatgtctcaaaagaaaaaaaaaaaaaaaaaaaaaaaaaaaaaaaaaaaaaaaaaaaaaaaaaaaaaaaaaaaa

SEQ ID NO: 5869 - protein, 237 aa, Homo sapien [sequence omitted]

SEQ ID NO: 5870 - DNA, 875 bp, Homo sapien
gttcactaaagctttggtgaagactcacatgtagaaagatgtagctgttttattgccggcttttgttcagcagaaacaagcaaatagagaatctttgaagggcctctctggtgtcagtaggaaatcctgatttttagctacggttggtgtgcactaagtcatcttcagaagttggtaggattctgtgagtccagaggacagagcttatagaggcattagtattgtaggactaattgtggatcctgggtgccctgttaaagtaacccttgtcatcatttatgctaaagatgatacccttctggcagtttgccacagtacaattcagatgcatctgcttttaacccttttccgttatcattggaagtctgacagtgcgctgcataaacaccttgagtaccacagcattccgtaatatcaatttctagaagaagcctctttctaatagtagtgtggccggtgcttattaatcatctagctactgagttactgtattggattaaaatatataaagagagagcacaccaaatctatgcagattcctttatcctagtatgtcagtttccttttctatctctcatttttaccttatttactgtaacaaagattgttgattttaaagacttatgggtaccgtgctctctttttagttaggtaggttaaatgagtattcataaaagcaaatgttatttttctacattatgcagatattgaaattgtgtattatgagcaccagtttggttaagtactttttgtggaaccagttagagctaatatctaaaaaaggaagaaaatgatttgtggaaccagttagagttaatatctaaaaaaggaagaaaatgaaaatttcgtggtcgaagataatttgtttggacaca

SEQ ID NO: 5871 - protein, 12 aa, Homo sapien
MKISWSKIICLD

SEQ ID NO: 5872 - DNA, 929 bp, Homo sapien
  Unsure 505-595: Unknown base
ttactttgacagcagtataaggagtgagatagacatgaacctgaatttcaatttaaaatcatggaagagagggaaaaaaaaccagcttaagaaaaatcaactgataaactgcaagagaaaaatgcaacttacatcacaaaagctaattgctttattatttagagagtacttaaaaattaaagaccaaacttctctccacccaacaaaaatgggcaaaggacatacagctaggtcaccaagaaagaagggcaaataggtggtgagtacatgtaaagatacttgataggacttttgcttagttgaatctttagcaaatctcttttatttcttgggattttgaagaagtaatttttaaaggaggactagaaactaagtgattgggaattggcctttttagaattaaaatttcccattacaagaaaaaaaaatcctgtgttcttttttttttccagaatggagtaggtcagtgagcaatgtgattaataaatatttcaatgtctgtgannnnnnnnnnnnnnnnnnnnnnnnnnnnnnnnnnnnnnnnnnnnnnnnnnnnnnnnnnnnnnnnnnnnnnnnnnnnnnnnnnnnnnnnnnncttcttaattgcaagaaagctgaaaggtttttttctattatatcagttataatgataaatactgtatatactaactatgagtaaaatactatattgcctaacttgtattattaagcaattctgctaacctgtgaccttacattttcatctgaaaagcaggggctggacaccaattgccctatgaagctattgctagtcctaacattctttgttttgtttgcttttttggcacacttaagtgtgtactatgaagtttatgatgctttaatgaaattttctgtctctaccattgtaatgagaaaggaataaaatactttattttgcaaatctaaaa

SEQ ID NO: 5873 - protein, 84 aa, Homo sapien [sequence omitted]

SEQ ID NO: 5874 - DNA, 957 bp, Homo sapien
gtgagacttctttcttcattgtggctagctttgaaaagaccctctgaacttcctaaagatatcaagatgatatcaccagacttgccctttttgacaattgtcttgatcatagttagttggacaacttgtggagcactagccatacttctttcttatctttactatgtgtttaaggttgttcatctgcaagccagcttaacaacttttaagaatagccagcctgtgaatcccaaacactctagaagaagtgaaaagaaatccaatcatcataaagactcctcaatacaccatcttcgtttatctgccaacgatgctgaagatagccttcgcatgcacagtactgtgattaacttactaacatggattgtattactcagcatgccttctctaatttattggctaaagaatcttaggtattattttaaacttaatcctgatccatgtaaacctttggcatttatccttattccgactatggcaattcttggaaatacttacactgtttcaataaaatcaagtaaattgttgaagactacttcacaatttccacttcctctggctgttggtgtgattgcttttgggtcagcacatttatataggcttccatgctttgtcttcattcctcttttactccatgcattatgcaactttatgtaagattggacttaaggaatgatgaagataatttatgtgtttagggccagtgataagagggaacacacagatccatcagtatggacagcaagatcctttggagaagacaagtctatttttacaatattgaaaataggaaattagttttgtaatgtttgagggaagtagttgaagcatggttttgttttgtggtgtggaatccatgtactaatcatttttgaaaaattcatgaagggatatatggtgatcactatcattgaggactcctgtgcatataaaatagtctgttttatcaactgtaaa

SEQ ID NO: 5875 - protein, 196 aa, Homo sapien
MISPDLPFLTIVLIIVSWTTCGALAILLSYLYYVFKVVHLQASLTTFKNSQPVNPKHSRRSEKKSNHHKDSSIHHLRLSANDAEDSLRMHSTVINLLTWIVLLSMPSLIYWLKNLRYYFKLNPDPCKPLAFILIPTMAILGNTYTVSIKSSKLLKTTSQFPLPLAVGVIAFGSAHLYRLPCFVFIPLLLHALCNFM

SEQ ID NO: 5876 - DNA, 209 bp, Homo sapien
ccatcatcaagcagatctgtgctcagccctgtgctgggctttgaggaagatctagagctggtaccaggccagagagggaatgctctttatcaagttcttactatgctttacccacctgatatcaaggtagaggagcatattcccttttcactgctgacaacacttaatgaaattcagagtgtctgaggtcaccaagctcatgaatcact

SEQ ID NO: 5877 - protein, 61 aa, Homo sapien
PSSSRSVLSPVLGFEEDLELVPGQRGNALYQVLTMLYPPDIKVEEHIPFSLLTTLNEIQSV

SEQ ID NO: 5878 - DNA, 756 bp, Homo sapien
cttcctatagtggtacatgttacatcagttgcgcatatcttgattttacagaatctgtcttaagtaccaattttggtttttcaaatcaatgtttctgaaatttttgaacactgaaagtggttttaaatgaatattctgaatctagttctttagaatcctctttgaattgtgaaatgcaaaataattgttagcagtttaacctgaaagatctttttacatgataaatgggggaggagaaagactgaaatgaaaatgttgaagaccctgatttgaaattgagtgtaaaggtctagatactgtaagttttagagtagctttagagacaaagctagtatcccacttggtgagatcaagtaacttgtggtttaaaatttaaagtaaccagtggccattttaacttcactaatttctcttggaggagctaatttttaattgctcatgattgtaaaacatacttccggatggtaagggagatgttaagatgatttgtcttgaagaatggtaaactttttctttgtttattgcctgtcataaaaagagggaaagtaaaaaaaaaaaggttcataatcttaaatcagtccaaaaatttgaattttctgtatttctgtttaattcaatgcgttaatctttagcattggtcaatacagccaaaagatgaggaaaacaaagactgatagatactaagataagaaataactgcaaccataaatgtatacaggttatgtgtccatgagccatctcttcagtttgcccata

SEQ ID NO: 5879 - protein, 31 aa, Homo sapien
SYSGTCYISCAYLDFTESVLSTNFGFSNQCF

SEQ ID NO: 5880 - DNA, 400 bp, Homo sapien
tgtttcaaatctcccatatactacatcagtggtcttcaaactcttctgttcctagacccaaataattgttttttaaattatgtaactccctgcacatctttaaatagacatctataatttttcatcataaatttgttccttatttcttgttaacagcagatagaaacagtattttataagatgaaatattgtgaggattgactgcaattggagtatttcatggtatggcttgataaaataagttttaactaccttatccataatacactctgatcctcaaataagtaaaattttaatccatgtgttttgaaaacccatggattaaacacacagattaggaaggagtacctatggaatgtgaagacctggaaacggattgcctaagagttatccaagcaaa

SEQ ID NO: 5881 - protein, 38 aa, Homo sapien
CFKSPIYYISGLQTLLFLDPNNCFLNYVTPCTSLNRHL

SEQ ID NO: 5882 - DNA, 908 bp, Homo sapien
ttgtcttcttgataaggccattggcaattagtatacggtagttttaggctaaagctttctcagagattaaagtgctggggtactataaattctcatctccttaatgtcttcttgtacctagataccacaatctactttaaatatataaaatgcattattctacataaaaagtcagttattgaatacatgcttccagtgaaccttcttaaacgtaagatagtgtaacttgttatacaagtattactgttctggattttttgtttactattttaaaactgaaagaaaaaaataggtgtatatacttttggttattacgattacacataatttttttaaaaaacatgtatgaatgggagcctctctgtaccccacccatcactagcttccccctacttcccttaccctcccaggaccccaggttgggcattggctcattttcataaataacctcatcccagacaggggtgagggaaggtgttgtggctgttttgtttaaattggagctgtaagagggatcatgtcatattttatgcccttcctagaaaggggacgggacacctggtttgcattcctgtattgaccactgctgccgtcactcgtcacattgagttcacatctcctgagagtttgtataaattcaggtcagcgctgctcctatgcagccatccagtgtcatagaaaagcaattcactgataactgatctctccattcagaagtgtgcagttttaatgtatagcaataagaaattgttatttatctattacaagcctggtttgattaaaaacaaaaaataaaatgttattatgcttgatgttacatctcataagtaaccagcaattctgtgatatttattgaacatttattttgggtcagatgtaccataccaggtacagaatatgtgccataa

SEQ ID NO: 5883 - protein, 33 aa, Homo sapien
MNGSLSVPHPSLASPYFPYPPRTPGWALAHFHK

SEQ ID NO: 5884 - DNA, 2972 bp, Homo sapien
  Unsure 2187: Unknown base
  Unsure 2189: Unknown base
  Unsure 2423-2542: Unknown base
ttcggctcgaggcgtggggggcgtggcagcccggcccgtgggcgggtttggaggagccagtgtaatgctagaagtcctagaagaaatttggagtgtgcgtgcgcgccgagcggtgagtgctcggggatgggggagagatgcggggcgatcggtgtggacttttccggggtggtgtggtcggttaggaaggtgttagagtgtgtgtgtgtgggatcatgcaaatacgtgataactgcggtgggagctctgatggttgtggagaatagggaccgtgaactcaggtctagagggacggggtgggagttagtgacatcagatccctcgcccccgtggagtccctggacacttgactgcccggggggaagggctcggaagccctctgcgacctgagggagctccctctcaggtcgggactgaaggagcccctgctcccagggtgtttgggtggtctccttaaacacttgaaagaggcagaggttcggaggccggagggaggccctggtagggcaagtcggagggtaccaaagggttggcatgctgatatgagaaaggatggtgttttaatttgtgagacccagagctagtcacattacggctccgggcgtctttctcatgttaaacggaagggtttaggcctcagagtcgtccttgagaatagacgtggggtagcaactattgagtcctgagaggatagggttggggtttgggcagattggctgtgcacgtcttcctgagcccctagaggtggggaggcaccaacagggtgttttggtatctgtctgtacaaacaaccaggccaggcgtctggtaaagttggcctgaggtaaagtagaaaagtgaggaagtgggcttcgtaggaaatcattggggctggtggctgcttgggtgatctcaagcactttgtgagcctgggaaaacgggctatgatgttaagtgtgtggggagtgcaaacagtggcttcggatcaggcctaaggcagagaaaggggttggatggagtctgtgttcctggcaccaaacttagaattggctggatatttgagaggccaggtttgccagtgctggaatgcagcttacaggttggttaacacctcacaggttcctcaagggtaagaaaccagaatgacaagccattattagagttcagatttttgaatcctgggctccatttgttaagagcttgagaccatgttatgaggcactggacaagtttagtaacttccgtgccttagttatcccccatggaatggggataataatacctatctcacggggttgttctggggatgaaataagataatataaagtgcttagcataatgcctgggttatggtgagagatttatgtgaatgctgtggctgggaactagtctcatattctcaagtttttctgcaagttttgatggcgtcccatttctctcttcctggctcgttgttggtcttcaggcagcagtccaaattccctcattcctcccttctagccctctcccaggatccaggccctagactgggccacttgctctgtcccagtttgattttttcatcctaggccccttctcctccctgtccgcgcccctctcccgtttcccccgcgcccgctgtcataataagagattcaggctctgaaggggcttctggaaggtagcaaaggtgcgtcgtgttctctcccagagacaggacctccaacttctccgccctgggtctttggtaccaggccagcagatgtgtacagtttgggagagaggaaaagccagagctgcaggaacaagctgaggagcgggcagatgggagtcctgaaaagagagccaggcgtggtggggggaggtgtggggagggggcccccttcctactaatcctctctccaggaatccctggctttgggacaggacggctgtcgttttgttgggggaggcgcccaggctgggtgcatgtcctgggccaccagccaagagaacatgatgttcccaagtgcgctggccgccgccctctcgggctggccgcctcccaaaccgctgcctctccagtctctccagcctccctgccccacattccgaggcagcttcgccccgcccccttcttccgctttgacgtcactgctgtctcccgccccctcgcctccattgacggcagcagggcctggttactgtggggacggtgaagcaggacaacaagagtcttgggagcaagcngnggctgctggagggctggagccttttgtctatgcaaaagacagggagatggaggcgggagatcaaggactgcctgggttaggggagatcacacctaaatccctgaagggggagaaaaaccatgtttccagggaagaggtatctgcaaacgagataaggccaaagccacagtatgagttggggtggagaggatcattttcagggagaggagactgagaatccaagctcctgaatcnnnnnnnnnnnnnnnnnnnnnnnnnnnnnnnnnnnnnnnnnnnnnnnnnnnnnnnnnnnnnnnnnnnnnnnnnnnnnnnnnnnnnnnnnnnnnnnnnnnnnnnnnnnnnnnnnnnnnnnnagcccggcctccaggctcctgaatcttttgttttcctgtttcgatttttctgggttaatttataacacgatcttgtctcagcttttccacagagccctccccttcacccttccctcattgttcaggaaagcttaggccacgtgacagtgaggggagtgcccccacaatgattatgtcagcagctgcttggaggcctgttcatctactacccacgtttccagggagccctgcgaggaactactcatcacggtcctggatggagggggctgtgtaactgcagctctcctgagcccagactaacattttattgcctgcaaatcgtgcccctgttctctttctaggactactcatctcttttagagaatcagaattcccagccccctttctcctgttgacactcttttcccacctccccaacctatccttgttt

SEQ ID NO: 5885 - protein, 149 aa, Homo sapien
  unsure 79: unknown amino acid
MMFPSALAAALSGWPPPKPLPLQSLQPPCPTFRGSFAPPPSSALTSLLSPAPSPPLTAAGPGYCGDGEAGQQESWEQAXAAGGLEPFVYAKDREMEAGDQGLPGLGEITPKSLKGEKNHVSREEVSANEIRPKPQYELGWRGSFSGRGD

SEQ ID NO: 5886 - DNA, 1096 bp, Homo sapien
gttatgatcaaattagactgtgcctgattgggtggtaagatcactctgaaagaaagctcactgtgaagagatgaaaggtggaggcagagctgtgaggtcatggggaaaagcctgctttccttataagtcctgctgttcatgttggaataaggatctgctcttccttgtttccatgcattttgcaggattccaggtaccattaccacactcttctgacccatgaaaccaactggctgctcacacatcaccaaacaggttgggggttagccttcagcacaggtggatacatctgggattcactgagattcctgccctctcctgcttcctagtggtttgggacaggccctctgcccatcgtcagcagttttttgctttcatacaaacctggaaggcactggcatctgcctaggaaagtggatctgtgaagaacagatgaactcaatcctttctggagtctgacaaagaagggataggcttccttgacattgcctggtcctgacaaggcctccctgacattactcctccaatttcacagttaccttctgtaaatctattttctcatctactgaatagaatcaggcgccctttttgtcttcccacctcttatctcttggcaattttaaggggaattaatgcaagaacaactttagtgtctcttgggaaaacaagccaaccaaatacaaaacccattaagcctactagggtgagtcctcttaacatgggaaggcgatgattatgcaaacaccagagttccctcctcttcagttcctaagaataaagaacaggtatcaagaactttctttaaagttagtgtaactatagttaacaaagtatccattgaagtttagtgcctgtaggactgagccagtgctttatcaacccaacacatcatcaccatgtgcatactctagaaaaaaaaatagcttccttaaaagttacagaggctcttaacgtgttaaaaccgaaaaatcacatttttcttgatttcaaatatgttctacggccttactgttgggatgatatttagtatgtaacttagcattccaatttctcaagaatttttaggccgggtgcggtggctcatgcctgtagtccc

SEQ ID NO: 5887 - protein, 50 aa, Homo sapien
MKGGGRAVRSWGKACFPYKSCCSCWNKDLLFLVSMHFAGFQVPLPHSSDP

SEQ ID NO: 5888 - DNA, 652 bp, Homo sapien
aaaaagaaagaccctagctgtctgaatgatctgagctaagtccccagacgtgcaagtgtggccatcctagaccactgagctccagccaagccagcttgcatcagaagaactgtccagaaaactcacagaatcataagaaataatgcagcgcagcttaacttggactcaccacctatcaagtgctcgacagccacgtgtgcagtggttcctacgtggagcagcatacatccagagatgcaaatattaatgaggacagtgctagtaacagagttgctgagcaatctatgtccccttgtaagaaccagtgccccaggggaagaaacagaactccacaaggtagcagtgtgggtgtagtacccgcatgtgcccatgttatgggaatgtagatggggagtgaccaccgccaacagaagtgtggccatcttgcccgagatgcctgaggacctcctatttttagatgctgctgcccaaggcctgtatttcatgctatggcttttgtcatttgaattatcagtagctgtctcggagctattacgcttcactgggccctggaggatattgtcttatacagtccactgggttttggatatgcagtctgtgcctttcattgccttcctggaaaataataactaaactcttcctcaccaaaaaa

SEQ ID NO: 5889 - protein, 87 aa, Homo sapien [sequence omitted]

SEQ ID NO: 5890 - DNA, 1471 bp, Homo sapien
cacttaagtctactttaatgatagattgtctccaccccgccaccccctacatcttcaggacaaatgcacagctcttccatggtcactgtcgcaggaatgttgaatatgcctggatccatcatggtaccacgttactcctccacggcactacatctggccgctaaaccagcattcggcacataagcttttttgatggttgttaattttttgatggggagtatcaacttcttttcaacaattaataggtagtttatgagtggtttaccctatttcttagtattagttttttccatttctgacttcgcagtattgtttagggaccagaggtgtctctgggaattgctttttgacagtccttatgtccagtcatctttggaaaagattgcttattaaaaatattttgttgttccgtcatctcattgtcattggagcaccaagtgtcattggaactctgaagctctctctgccctttaggtttggaccaagtgctgtcaaagccagagaaagtaggattaaagatactgatcagccaggacagataggggttttctgctggaaactgcgatacctaccctcggtacatggggatagctcacataagtgacttggtcacttggcaagatttcttcgcttctcggatagctgcaggaattaaaacatagtgtatagaatttaggtgttttacactaaaaatgataatgtcttgttccaattaagaatagtaaacaggtccaagtatagacaataaatgagattgggattctgttctcatttctcaatgtgaacagttactcccatatcagcattattttctatttggccttcttaaatacagagaaaaaataggatatattaatagtaggtcacttgaaaaagaaaagaaaaaaagttccccagttttctaactataggagaggagttcctaaggttctacgcatccattagaactcacagaggtacaaggaggcgtactcttgagttttgtttagaaaatcacctcagtaatgccaaacccttctttaaaacacattaatcttttcaaatcttcctgaaagctttgtctatctccagttgattgggacttccgtatgttaaagaaaaatgagaattgtaggaaaagttgagagtatgaggtacattagaagtgactttaacactccaccaaagtaattttaccttatttagagtttggatttgaaatggttcaaaggctgtgaattcaatatttgatgtgattttgggaagtaaaggggaatgtcattatcctttcgataaaattgatattatcaatctgaagaatgtttcttagatcagttgtgtccataacttgggagcattagctgtgagaccttgaaacagattggccatattcttatttcacattgattatttaaatggacaattttaggttactggtctttattcacttgttattgaaaccacatgcacactgacaatcagtgaaaatcac

SEQ ID NO: 5891 - protein, 53 aa, Homo sapien
LKSTLMIDCLHPATPYIFRTNAQLFHGHCRRNVEYAWIHHGTTLLLHGTTSGR

SEQ ID NO: 5892 - DNA, 639 bp, Homo sapien
  Unsure 301-426: Unknown base
cagaaacactgaggtcagatgttattcttgccagtactttatagatgaggtgaaaggaagtaaaactaaggatgcccacatgttaaactctggagaatttgaccatgtttcacaatgtgcaaagtttgcgtatgattaattgtactgagcctgctactcagcggtttagtttacaattcttatgccatgggtctttcagtaatctgccacgaaagcttgtgctcgctatcctaaaataaatggaaatgggtgaatatgagtgttaggaccactgtagtaattgggaagaaagttacattannnnnnnnnnnnnnnnnnnnnnnnnnnnnnnnnnnnnnnnnnnnnnnnnnnnnnnnnnnnnnnnnnnnnnnnnnnnnnnnnnnnnnnnnnnnnnnnnnnnnnnnnnnnnnnnnnnnnnnnnnnnnnttcctggaggacttgttttgagactgtttctcgttaggaaaccaggaatgcttctgaaatattctaaaagtcatgtggagagagtttacctgggaatgtacatttctagtaaccattttatttgttatgaaacaagggattcttatggctttagaaatgtaacaggaagggatttgaagggggcacatggaccaatcttgtcagattggattt

SEQ ID NO: 5893 - protein, 63 aa, Homo sapien
  unsure 16: unknown amino acid
  unsure 17: unknown amino acid
  unsure 18: unknown amino acid
  unsure 19: unknown amino acid
  unsure 20: unknown amino acid
  unsure 21: unknown amino acid
  unsure 22: unknown amino acid
  unsure 23: unknown amino acid
  unsure 24: unknown amino acid
  unsure 25: unknown amino acid
  unsure 26: unknown amino acid
  unsure 27: unknown amino acid
  unsure 28: unknown amino acid
  unsure 29: unknown amino acid
  unsure 30: unknown amino acid
  unsure 31: unknown amino acid
  unsure 32: unknown amino acid
  unsure 33: unknown amino acid
  unsure 34: unknown amino acid
  unsure 35: unknown amino acid
  unsure 36: unknown amino acid
  unsure 37: unknown amino acid
  unsure 38: unknown amino acid
  unsure 39: unknown amino acid
  unsure 40: unknown amino acid
  unsure 41: unknown amino acid
  unsure 42: unknown amino acid
  unsure 43: unknown amino acid
  unsure 44: unknown amino acid
  unsure 45: unknown amino acid
  unsure 46: unknown amino acid
  unsure 47: unknown amino acid
  unsure 48: unknown amino acid
  unsure 49: unknown amino acid
  unsure 50: unknown amino acid
  unsure 51: unknown amino acid
  unsure 52: unknown amino acid
  unsure 53: unknown amino acid
  unsure 54: unknown amino acid
  unsure 55: unknown amino acid
  unsure 56: unknown amino acid
  unsure 57: unknown amino acid
MSVRTTVVIGKKVTLXXXXXXXXXXXXXXXXXXXXXXXXXXXXXXXXXXXXXXXXXXFLEDLF

SEQ ID NO: 5894 - DNA, 5823 bp, Homo sapien
ggtagctgggtgcagacgccgtggcgctggagacccaaacatggcaaacctggaagaaagcttcccccgaggaggtacaagaaagatccacaaaccagagaaagctttccagcagtcagttgaacaagacaacttatttgatatttctactgaagagggatccaccaaaagaaaaaagagccagaaggggccagcaaaaacaaaaaagttgaaaatcgaaaagagagaaagcagcaagtccgcaagagagaagtttgaaatccttagtgttgagtccctgtgtgagggaatgcgtattttgggttgcgtgaaagaggtgaatgaactggaactggtgattagtctccccaatggcctccagggctttgtgcaagtcactgaaatctgtgatgcctacaccaaaaagctgaatgagcaggtgacacaagaacaacctctgaaggacctacttcacttgcctgaacttttctcacctggaatgctggtaagatgtgtggtgagcagtctgggcatcacagacaggggcaagaagagtgtcaagctgtctctgaaccccaaaaatgtcaacagagtgctgagtgctgaggccctgaagcctggcatgctacttacaggtaccgtatccagcctggaagaccatggctacctagtggacattggtgttgatgggaccagagcttttctgccactgctgaaagcccaggagtacatcagacagaagaacaaaggtgctaaactaaaggtgggtcagtacctgaactgcattgttgaaaaggtgaaaggcaacggaggagttgttagtctgtctgttggtcactcagaggtttctacggccattgctactgaacagcagagctggaaccttaataacttgctaccaggactggtggtcaaagctcaggtacagaaggtgactccatttggccttacgctaaacttcctcacattcttcacgggcgtggttgactttatgcacctggatcccaagaaagctggaacatatttctcaaatcaggcagtgagggcctgcatcctttgcgtccatcctcgaaccagagttgtgcacctgagcctgcgccccatcttcctacagcctggacgcccactcacccgactctcttgccagaaccttggagcagtgctggatgatgttcctgtccagggttttttcaaaaaggctggggccacctttaggctgaaggatggggttctggcctatgcccggctcagccatctctctgattctaagaacgtcttcaatcctgaggccttcaagccagggaacactcacaagtgtagaattattgactacagccaaatggatgaactggccttgctctctctacgaacgtctattattgaagctcagtaccttagatatcatgacatcgaacctggggcagtggtaaagggcacagtgctaaccataaagtcatatgggatgctggtgaaggtgggcgagcagatgaggggcctggtacctcccatgcacctggctgacatcctgatgaagaatccggagaagaagtaccacatcggggatgaggtcaagtgccgggttttgctttgtgaccctgaagccaagaagctgatgatgaccctgaaaaaaaccctgattgagtccaaactacctgtcattacctgctatgccgatgccaagcctggtctgcagacacatggcttcatcatcagggtcaaggactatggctgcattgtgaagttctacaacaatgtgcagggactggtgcccaagcatgagctcagtactgagtatatccctgacccggagagagttttttacactggccaggtggtgaaggttgtcgtattgaactgtgagccatccaaagagaggatgctcttatccttcaagctgtcgagtgatccagagccaaagaaagagcctgcaggacacagtcagaagaaaggaaaagccattaacattgggcagttggtagatgtgaaggttttagagaagaccaaagatgggctggaggtggctgtcctgccccacaacatccgtgctttcctccccacatctcatctgtcggaccacgttgccaacggcccattgttacatcattggctccaggcaggtgacatccttcaccgagtcctgtgtctgagccagagcgaggggcgtgttcttctttgcaggaagccagccttggtctccacagtagaaggtggccaggatcccaagaacttctcagaaatccatcctggaatgctgctcattggttttgtgaagagcatcaaggactatggcgtgttcatccagttcccctcaggtcttagcggactggccccaaaagctatcatgagtgacaaatttgtgacctccacaagtgaccactttgttgagggccagacagtagcggcaaaggtgaccaatgtggatgaggagaagcagcggatgctgctgtcactgcggctgtcggactgtggtctgggggacttggctatcaccagcctcctcctcctgaatcagtgcctggaggagctgcagggcgtgcgcagccttatgagcaaccgagactctgtgttgatccagacgctggccgagatgaccccaggaatgttccttgacctagtggtgcaggaggtgttggaagatggctctgtggtattcagtgggggtccagtgcccgacctggtcctgaaagccagcagataccatcgcgcagggcaggaggtggaatctgggcagaaaaagaaggttgttatcttaaatgttgatcttttgaagttggaagtgcacgtttcccttcaccaggacttggtgaatagaaaagctagaaagctgaggaaaggcagcgaacaccaggcgattgtgcagcacttggagaagtcctttgccattgcctccttggtagagacgggccacctggcagctttctccctgacctctcacctcaacgacaccttccgctttgactcagagaaattgcaggtgggacagggtgtctccctaaccctcaagaccacagaaccaggagtgactggccttcttttggctgtggaggggccggctgccaagaggaccatgaggccgacccagaaggactctgagacagttgatgaggatgaagaagtggatccagctctgactgtagggaccataaagaagcacaccctctccatcggggacatggtcacagggactgtcaagtccattaagcctacccatgtggttgtgactctggaagatggcattattggctgtatccatgcctcccacattctagatgatgttccagagggcacctctcctactaccaagctgaaggttgggaagacggtcactgcccgagtgattggcgggcgagacatgaagacattcaagtatctcccaataagtcaccccagattcgttcgaaccatcccggagctgagtgttcggccaagtgagctggaggatggccacactgctcttaacactcactctgttagccccatggagaagattaaacagtaccaggccggccagactgttacttgcttcttaaagaaatacaatgtggtgaagaaatggcttgaggtggagattgccccagacatccgggggagaattcccttattgctcacttctctgagcttcaaggttctgaagcatccagataagaagttccgggttggccaggccctgagggccaccgttgttggcccagattcctccaagaccttcttatgtctgtccctcacaggtcctcacaagcttgaggaaggggaagtggccatgggccgagtggtgaaggtgactcccaacgaggggctgaccgtctccttcccctttgggaagataggaacagtcagtatatttcacatgagtgactcctactccgagacgcccctggaagacttcgtcccccagaaggttgtcagatgttacatcctgtccactgcagacaacgtattgactttgtcgctgcgatcatccagaacaaacccggagacgaaaagcaaagtagaagatccagagattaactccatccaggacattaaggaagggcagcttctgaggggctatgtagggtccatccagccacacggtgtgttctttcgccttggcccctccgttgtgggtttggctcggtactcccatgtctcccagcacagcccgtccaagaaagccctttataacaaacacctccctgaagggaagctgctcacagccagggtcctacgccttaaccaccagaagaacctggtagagctgtctttcctccccggagacactgggaagccagacgtgctttctgcttccttggaagggcaacttacaaagcaagaggagaggaaaacagaggctgaggagagagaccaaaaaggggaaaagaaaaatcagaaaaggaacgagaagaagaaccagaaggggcaggaggaggtggagatgcccagcaaggagaagcaacagccccagaagccacaggcgcagaagcggggcgggcgggagtgccgggagtctgggagtgagcaggaaagagtgagcaagaagccaaagaaagccggcctgtcagaggaggacgacagccttgtggacgtgtactatcgggagggaaaagaggaggcagaagagacgaatgtgctgcccaaggagaagcaaaccaagccagcagaagcgccccggctgcagctgtcttcaggcttcgcttggaatgtgggactagactctctgaccccggccttgccacctctagcagagagctcagacagcgaggaggatgagaagccacaccaagccacgataaagaaaagcaagaaagaaagggagttggagaagcagaaggcagagaaggaactgtcccgcattgaggaggcgctgatggatcctgggcggcagccagagtccgcggatgattttgaccgactggtgctgagctcccccaacagctccattctgtggctgcagtacatggctttccacctgcaggccacggagatcgagaaggcccgtgccgtggctgagagggcccttaagaccatctccttcagagaggagcaggagaagctgaacgtgtgggtggctctgctgaacctggagaacatgtacggctctcaggagtccctgaccaaggtctttgagcgagccgtgcagtacaacgagcctctcaaagtctttctccacctggctgacatctacgccaagtcagagaaattccaggaagctggtgaactctacaaccggatgctgaagcgtttccggcaggagaaagctgtgtggatcaaatacggcgccttccttctgcggaggagccaggctgcagccagtcaccgcgtgctgcagcgagccctggagtgcctgcctagcaaggagcatgtggatgtcattgccaagtttgcccagcttgagtttcagctgggggatgcagagcgggccaaagccatttttgagaacacgctgagcacctacccaaagcgcacagatgtctggtcggtctatatcgacatgaccatcaagcacggcagccagaaggacgtccgggacatctttgagcgggtcattcatctgagcttggcccccaagagaatgaagttcttcttcaagcgctacctggactacgagaagcagcatggcactgagaaggatgtgcaggcagtcaaggccaaggccctggagtatgtggaggccaagagctcagtgctagaggactagtggcaggctggctctgtgggacactgtcaacaatgggccagcccggccccgcctcgagtgcctgggcactcggaaaactgttacctcaggactctatttaaatgctgctttttctgcagcacgcttggggaaatcctgtcaggatgaaaaggaagttgagatttttt

SEQ ID NO: 5895 - protein, 1884 aa, Homo sapien
VAGCRRRGAGDPNMANLEESFPRGGTRKIHKPEKAFQQSVEQDNLFDISTEEGSTKRKKSQKGPAKTKKLKIEKRESSKSAREKFEILSVESLCEGMRILGCVKEVNELELVISLPNGLQGFVQVTEICDAYTKKLNEQVTQEQPLKDLLHLPELFSPGMLVRCVVSSLGITDRGKKSVKLSLNPKNVNRVLSAEALKPGMLLTGTVSSLEDHGYLVDIGVDGTRAFLPLLKAQEYIRQKNKGAKLKVGQYLNCIVEKVKGNGGVVSLSVGHSEVSTAIATEQQSWNLNNLLPGLVVKAQVQKVTPFGLTLNFLTFFTGVVDFMHLDPKKAGTYFSNQAVRACILCVHPRTRVVHLSLRPIFLQPGRPLTRLSCQNLGAVLDDVPVQGFFKKAGATFRLKDGVLAYARLSHLSDSKNVFNPEAFKPGNTHKCRIIDYSQMDELALLSLRTSIIEAQYLRYHDIEPGAVVKGTVLTIKSYGMLVKVGEQMRGLVPPMHLADILMKNPEKKYHIGDEVKCRVLLCDPEAKKLMMTLKKTLIESKLPVITCYADAKPGLQTHGFIIRVKDYGCIVKFYNNVQGLVPKHELSTEYIPDPERVFYTGQVVKVVVLNCEPSKERMLLSFKLSSDPEPKKEPAGHSQKKGKAINIGQLVDVKVLEKTKDGLEVAVLPHNIRAFLPTSHLSDHVANGPLLHHWLQAGDILHRVLCLSQSEGRVLLCRKPALVSTVEGGQDPKNFSEIHPGMLLIGFVKSIKDYGVFIQFPSGLSGLAPKAIMSDKFVTSTSDHFVEGQTVAAKVTNVDEEKQRMLLSLRLSDCGLGDLAITSLLLLNQCLEELQGVRSLMSNRDSVLIQTLAEMTPGMFLDLVVQEVLEDGSVVFSGGPVPDLVLKASRYHRAGQEVESGQKKKVVILNVDLLKLEVHVSLHQDLVNRKARKLRKGSEHQAIVQHLEKSFAIASLVETGHLAAFSLTSHLNDTFRFDSEKLQVGQGVSLTLKTTEPGVTGLLLAVEGPAAKRTMRPTQKDSETVDEDEEVDPALTVGTIKKHTLSIGDMVTGTVKSIKPTHVVVTLEDGIIGCIHASHILDDVPEGTSPTTKLKVGKTVTARVIGGRDMKTFKYLPISHPRFVRTIPELSVRPSELEDGHTALNTHSVSPMEKIKQYQAGQTVTCFLKKYNVVKKWLEVEIAPDIRGRIPLLLTSLSFKVLKHPDKKFRVGQALRATVVGPDSSKTFLCLSLTGPHKLEEGEVAMGRVVKVTPNEGLTVSFPFGKIGTVSIFHMSDSYSETPLEDFVPQKVVRCYILSTADNVLTLSLRSSRTNPETKSKVEDPEINSIQDIKEGQLLRGYVGSIQPHGVFFRLGPSVVGLARYSHVSQHSPSKKALYNKHLPEGKLLTARVLRLNHQKNLVELSFLPGDTGKPDVLSASLEGQLTKQEERKTEAEERDQKGEKKNQKRNEKKNQKGQEEVEMPSKEKQQPQKPQAQKRGGRECRESGSEQERVSKKPKKAGLSEEDDSLVDVYYREGKEEAEETNVLPKEKQTKPAEAPRLQLSSGFAWNVGLDSLTPALPPLAESSDSEEDEKPHQATIKKSKKERELEKQKAEKELSRIEEALMDPGRQPESADDFDRLVLSSPNSSILWLQYMAFHLQATEIEKARAVAERALKTISFREEQEKLNVWVALLNLENMYGSQESLTKVFERAVQYNEPLKVFLHLADIYAKSEKFQEAGELYNRMLKRFRQEKAVWIKYGAFLLRRSQAAASHRVLQRALECLPSKEHVDVIAKFAQLEFQLGDAERAKAIFENTLSTYPKRTDVWSVYIDMTIKHGSQKDVRDIFERVIHLSLAPKRMKFFFKRYLDYEKQHGTEKDVQAVKAKALEYVEAKSSVLED

SEQ ID NO: 5896 - DNA, 2427 bp, Homo sapien; identical to SEQ ID NO: 3940

SEQ ID NO: 5897 - protein, 263 aa, Homo sapien; identical to SEQ ID NO: 3941

SEQ ID NO: 5898 - DNA, 3851 bp, Homo sapien
gtttccacaataaaactttttctaccagatggtatggaagcccggctccgctcagatgtcatccatgcaccattaccaagtcctgttgacaaagttgctgctaacactccaagtatgtactctcaggaactattccagctttctcagtatctacaggaggccttacatcgggaacaaatgttggaacagaagttagccacgcttcagcggctactagccatcacccaagaggcttcagataccagttggcaggctttaatagatgaagatagactcttatcacggttagaagttatgggaaaccaattacaggcatgctccaaaaatcaaacagaagatagtttacgaaaggaacttatagcattacaagaggataaacataactatgagacaacagccaaagagtccctgaggcgggttcttcaggagaaaattgaagtggttagaaaactttcagaagttgagcgaagtctgagtaatactgaagatgaatgtacccatctgaaagaaatgaatgaaaggactcaggaagaattaagagaattagccaacaaatataatggagcagttaatgagattaaagatttatctgataaattaaaggtagcagagggaaaacaagaggaaatccaacagaagggacaggctgagaaaaaagaattacaacataaaatagatgaaatggaagaaaaagaacaggagctccaggcaaaaatagaagctttgcaagctgataatgatttcaccaatgaaaggctaacagctttacaagagcacttgctttcaaagagtggcggggactgcacttttattcatcaattcatagaatgccagaagaagctgatcgtcgaagggcatctaaccaaagcggtagaagaaacaaagctttcaaaagaaaatcagacaagagcaaaagaatctgatttttcagatactctgagtccaagcaaggaaaaaagcagtgacgacactacagacgcccaaatggatgagcaagacctaaatgagcctcttgccaaagtgtcccttttaaaagatgacttgcagggtgcacagtcagaaattgaggcaaagcaagaaatacagcatcttcgaaaggaattgatcgaagcccaggagctagctagaacaagtaaacaaaaatgctttgaacttcaagctcttttggaagaagaaagaaaagcctatcgaaatcaagttgaggaatccactaaacaaatacaggttcttcaagcccaattgcagaggttacacatcgatactgagaatctccgggaggagaaggacagtgaaatcacaagtactagagatgaattgcttagtgcccgagatgaaattttgctccttcatcaagcagcagcaaaggttgcctctgagcgggacactgacattgcttctttacaagaagagcttaagaaggtgagagctgagcttgagcggtggcggaaagcagcgtctgaatatgagaaagaaatcacaagtctgcaaaacagttttcagcttagatgtcaacagtgtgaggaccagcagagagaagaagcaacaaggttgcaaggtgaactagagaagttgagaaaggaatggaatgcattggaaaccgaatgccattctctaaaaagggaaaatgttttgctatcatcagaactgcaacggcaagaaaaagaattgcacaattctcagaagcagagtttagagcttaccagtgatctcagcatccttcaaatgtctaggaaagaacttgagaatcaagtgggatccttgaaagaacagcatcttcgggattcagctgatttaaaaactcttctcagtaaggcagaaaaccaagcaaaggatgtgcagaaagagtatgaaaagacacagactgtactctcagaactgaagttgaagtttgaaatgactgagcaggaaaagcagtcaatcacagatgagctcaaacagtgtaaaaacaacctgaagctgctccgagagaaaggaaataataaaccctggccctggatgcccatgttggctgccctggttgcagtaacagccatcgtgctgtacgtgccaggtctggccagagcttctccatgagagcgttccttgagtccgtacaccgtcctccctctagaagctggcatcacactcatgctggggacaaacagaaccattttcttcctctttacctcttaaaacagcagaagtacaagaatacagctgtagggtcattgctttaaattatataaaatgtatctgtctataaagaagatataaaattgtgactttattctactgtaagcaataatttgcttgcaatttttcatgtaatttttaaattagtatgttaagattctgaatattatggtggcctaaagtaggcttcttggtacaccagattatttataacattaaatttatgagtattttactctgaattctgatcaccagataattcatttttctgatttgataactacccaaaccaaacaaccaatacatacatgggaagagaggccctgtgtgctcagtgcctatcagtttgaaatatatacacatatatatattttttacatatttacgccatttttacttgttatgaaaccactgagctattgggaacaagacttagagacaactatttgcgtggattttttttttttttaaggaaaaatacgtttggaaaataaactgttatggtgataatttggggaatatgtgcacgcttgttcagccttaatgtgacttgaagatgtggaggacatcaactttgaaaaactttccatgagagtatattttcttgagcaaactgaagtatttctgggagcaaaaacatagtaattacacaatttcagtgcagtcaaccaaaatgttgagtcaattggaatgtaatttattaaaccatgtatttaaagagatatttttctttaaaagccaagttactttctcatatacagcattttaggaagcatgattttttttttctatcatctattcctccaagcatgtttaattgaagaaagtattaatatctctttagataagcttgtattgacctaatttggtttatgatgtgtcagagctaattcatgttcagggtgagcgttgtacctaccaacaaatttcctggttgggtatgcaaatggttattttctttttattgttgttaattgggactttctgttaatgaaaagcactattcccaagattaatagtgttctatgcacaatgaagcacctaaaaacactgcttgatattataaatttaaaacacaagtgaaagtttagccatggttttgtgcggcatcatagttatgtcaataaagtttatttaggtcatagaatatcctaaagtatcacatagttaaatttttcagtcagtgaagaccgggagggaatgtcagtgaattggcttgaatgttctgtggcaatccacaggtctagccaaatattgctaggagtttagggtataatttgccttgtgatgtttggcagtcactgtttatactttaaaggttatattttaagctatttgagattgcttttgggaagatcactagatttatggaggaattagtcacaaatgacttgtagaaaatactgtcatatagttcatttcatcattttctgttgcaggaagccactccaccacagaatgctaatatgccagtggtacccagtacctcttgtatataggttattgcaaatattgttctgaaatgcttaacttcagaattacattttttaaagtaaataattgttttaaatctattttgtaaagatataaagtacaatagaatttctggagtacagattaaactatttgcactaacacacgtgacgtgcatgatttaataaaataactttactctccct

SEQ ID NO: 5899 - DNA, 1138 bp, Homo sapien; identical to SEQ ID NO: 4337

SEQ ID NO: 5900 - protein, 223 aa, Homo sapien; identical to SEQ ID NO: 4338

SEQ ID NO: 5901 - DNA, 1761 bp, Homo sapien; identical to SEQ ID NO: 5183

SEQ ID NO: 5902 - protein, 586 aa, Homo sapien; identical to SEQ ID NO: 5184

SEQ ID NO: 5903 - DNA, 1075 bp, Homo sapien
cttattttctcagagatcagcgatggtgtagaggtctccgatgtgctctccgtatgttcagacaacagttatgacacatatgccaacagcaccgccacccctgtgggcccccgagggggtggcagccacaccaagaccctcatagagcggagtgggcgttagctgaagacatgtctgtcccacctgtacctgacacagaagctggggagcctaggagagctggtggaagtgtgtctgaactcggagtgctctgggagcgggctccacagcctccttgtgggctccagccccttgtcagccgcagcctctcttgagggggactccctgtctcctgaggcccagctgggccaggactccatcctttcagatgcccctgcaggcctggggctccttctgggaagtatggggcctagggcttggtccccctcttctgaggccctctcctgtatcccgacctggaagctttgatgggtcatgggccatgccataccccctgtggcaatggagtgtgtggatgctcacctgtgccatctgtcctcctgtctgtgccaggaggcacctgagttctctgctgttatcctgccccaagggcctgggccgagcctctacctgaagcaactctgctcttcctgtcagtctcaaagcacaaggaggttcagcccaggaggaagccagctgcaatgtggagacacgtcctcctccccaacccacctcatgccaccgccaaccccctgccccaggagcgggcctgagccacgtcccctaggagcagctggagatggccaaaagagtgagctcaggactactggatcccatgcccaggtgtccagcagacctcaaggcagaagggtcacctaacccaggagtccacagactgatgtgacctcaggttcccacatcagtggccacagggcagggcccacctggtagaagtgttctggatatggccagggtgggtgtgtggctaagtgggcctgaacagagggaacctagggcccttggccaatgtgattaaagctgccatcttgaaaaaaaaaaaaaaaaaaaaaaaaaaccaaaaaaaaaaaaaaaaaaa

SEQ ID NO: 5904 - protein, 127 aa, Homo sapien
MGHAIPPVAMECVDAHLCHLSSCLCQEAPEFSAVILPQGPGPSLYLKQLCSSCQSQSTRRFSPGGSQLQCGDTSSSPTHLMPPPTPCPRSGPEPRPLGAAGDGQKSELRTTGSHAQVSSRPQGRRVT

SEQ ID NO: 5905 - DNA, 2422 bp, Homo sapien
atttaaaggagtcgggtctctaactgttgatctgtttttttcccttctgagcaatggagcttaccatctttatcctgagactggccatttacatcctgacatttcccttgtacctgctgaactttctgggcttgtggagctggatatgcaaaaaatggttcccctacctcttggtgaggttcactgtgatatacaacgaacagatggcaagcaagaagcgggagctcttcagtaacctgcaggagtttgcgggcccctccgggaaactctccctgctggaagtgggctgtggcacgggggccaacttcaagttctacccacctgggtgcagggtgacctgtattgaccccaaccccaactttgagaagtttttgatcaagagcattgcagagaaccgacacctgcagtttgagcgctttgtggtagctgccggggagaacatgcaccaggtggctgatggctctgtggatgtggtggtctgcaccctggtgctgtgctctgtgaagaaccaggagcggattctccgcgaggtgtgcagagtgctgagaccgggaggggctttctatttcatggagcatgtggcagctgagtgttcgacttggaattacttctggcaacaagtcctggatcctgcctggcaccttctgtttgatgggtgcaacctgaccagagagagctggaaggccctggagcgggccagcttctctaagctgaagctgcagcacatccaggccccactgtcctgggagttggtgcgccctcatatctatggatatgctgtgaaatagtgtgagctggcagttaagagctgaatggctcaaagaatttaaagcttcagttttacatttaaaatgctaagtgggagaagagaaaccttttttttggggggcggtttttttggtttgttgttggtttttttttttttttttggcgggaagaaagagttttgctcttgttgcccaggctggagtgcagtgacgtgatctccgctcactgcaacctccacctcgcgggtttaggcgattcttctgcctcagcctccctagtagctgggattgcaggtgcccaccaccatgcccggctaatttgtatttttagttgagacagggtttcgctacgttggccaggctggtcttgaactcctgatctcaggcaatccacccacctcggcctcccagagtgctgggatgacaggcgtgagcaaccgcacccagcttaaggtttttttgttttgttttgagacggagttttcgctcttgttgcccaggctggagtgcaatgctgtgatctcggcttaccacaacctccacctcccgggttcaagtgattcacctgcctcagcctcctgagtagctggtattacaggcatgcgtcaccacgccggctaattttgtacttttagtagagatggtgtttccccacgttggtcagcctggccaacatggcaaaaccctactaaagatacaaaaaaaaaaaaaaattagccgggcgtggtggtgggtgcctgtagtcccaggtacttggaaggctgaggcaggagaatctcttgaacccagaaggcgaaggttgcggtgagccgagatcatgccattgtactctagcctgggtgacaagagcaagactccgtctcaaaaaaaaaaaaaaaaaaaaaagaagtagagacagggagacggggtctcactgtgttgcctaggccggtcttgaactcctgggctcaagtgattctcccaccttgacctcctaaattgttgggattacaggtgtgagacagtgcacctggccgaaatagctcaagtttctgaaaaacaaatctgaatctatttgttattcttagcgtcactggtctggctttcagaattaacatacaaggttgccacacctagttctgcccagctttatgtctttattccagtattccaccaaagtttgttttcctgcattccagttctcaagtcttaagataaagattgtacttgacagtttagtatatccataaaactatttgaggtggttaaggttcttgggttcattttccttaatactttgctgaatattgtagattgtaggcaatgaaaaagtctactaaattaggaaaaccttgaataattaggtatcctaggtaagagcccctaaacatcaagcaatctgtgagtctgtaaagaaataaatattttttggattattcttatctaattccacccctgttggaagatgatttctttgttctttgcaactatggaagctgtgaaaatcatcacaagtgcctctgaaagcgagtgttaggttggttagagggtttaatattttctgcaatggtttgtaggaattttaataaatgtagtatattttctgagatgattttgtaaaagtactattttaaatatcaaatcaaccaataaattcacatttgtgttaggaacag

SEQ ID NO: 5906 - protein, 244 aa, Homo sapien
MELTIFILRLAIYILTFPLYLLNFLGLWSWICKKWFPYLLVRFTVIYNEQMASKKRELFSNLQEFAGPSGKLSLLEVGCGTGANFKFYPPGCRVTCIDPNPNFEKFLIKSIAENRHLQFERFVVAAGENMHQVADGSVDVVVCTLVLCSVKNQERILREVCRVLRPGGAFYFMEHVAAECSTWNYFWQQVLDPAWHLLFDGCNLTRESWKALERASFSKLKLQHIQAPLSWELVRPHIYGYAVK

SEQ ID NO: 5907 - DNA, 2292 bp, Homo sapien
tctcagggcttcatacaggaaatctattgctgtgtcaagttccagagaaaagcttctgttcgtccaagttactaaccaggctaaaccacatagacgtgaaggaaggggctagaaggaagggagtgccccactgttgatggggtaagaggatcctgtactgagaagttgaccagagagggtctcaccatgcgcacagttccttctgtacctgtgtggaggaaaagtactgagtgaagggcagaaaaagagaaaacagaaatgctctgcccttggagaactgctaacctagggctactgttgattttgactatcttcttagtggccgaagcggagggtgctgctcaaccaaacaactcattaatgctgcaaactagcaaggagaatcatgctttagcttcaagcagtttatgtatggatgaaaaacagattacacagaactactcgaaagtactcgcagaagttaacacttcatggcctgtaaagatggctacaaatgctgtgctttgttgccctcctatcgcattaagaaatttgatcataataacatgggaaataatcctgagaggccagccttcctgcacaaaagcctacaggaaagaaacaaatgagaccaaggaaaccaactgtactgatgagagaataacctgggtctccagacctgatcagaattcggaccttcagattcgtccagtggccatcactcatgacgggtattacagatgcataatggtaacacctgatgggaatttccatcgtggatatcacctccaagtgttagttacacctgaactgaccctgtttcaaaacaggaatagaactgcagtatgcaaggcagttgcagggaagccagctgcgcagatctcctggatcccagagggcgattgtgccactaagcaagaatactggagcaatggcacagtgactgttaagagtacatgccactgggaggtccacaatgtgtctaccgtgacctgccacgtctcccatttgactggcaacaagagtctgtacatagagctacttcctgttccaggtgccaaaaaatcagcaaaattatatattccatatatcatccttactattattattttgaccatcgtgggattcatttggttgttgaaagtcaatggctgcagaaaatataaattgaataaaacagaatctactccagttgttgaggaggatgaaatgcagccctatgccagctacacagagaagaacaatcctctctatgatactacaaacaaggtgaaggcatctcaggcattacaaagtgaagttgacacagacctccatactttataagttgttggactctagtaccaagaaacaacaacaaacgagatacattataattactgtctgattttcttacagttctagaatgaagacttatattgaaattaggttttccaaggttcttagaagacattttaatggattctcattcatacccttgtataattggaatttttgattcttagctgctaccagctagttctctgaagaactgatgttattacaaagaaaatacatgcccatgaccaaatattcaaattgtgcaggacagtaaataatgaaaaccaaatttcctcaagaaataactgaagaaggagcaagtgtgaacagtttcttgtgtatcctttcagaatattttaatgtacatatgacatgtgtatatgcctatggtatatgtgtcaatttatgtgtccccttacatatacatgcacatatctttgtcaaggcaccagtgggaacaatacactgcattactgttctatacatatgaaaacctaataatataagtcttagagatcattttatatcatgacaagtagagctacctcattctttttaatggttatataaaattccattgtatagttatatcattatttaattaaaaacaaccctaatgatggatatttagattcttttaagttttgtttatttcttttaagttttgtttgtggtataaacaataccacatagaatgtttcttgttcatatatctctttgtttttgagtatatctgtaggataactttcttgagtggaattgtcaggtcaaagggtttgtgcattttactattgatatatatgttaaattgtgtcaaatatatatgtcaaattccctccaacattgtttaaatgtgcctttccctaaatttctattttaataactgtactattcctgcttctacagttgccactttctctttttaatcaaccagattaaatatgatgtgagattataataagaattatactatttaataaaaatggatttata

SEQ ID NO: 5908 - protein, 348 aa, Homo sapien [sequence omitted]

SEQ ID NO: 5909 - DNA, 2270 bp, Homo sapien
ggcacgaggttttcctcggcgcttctccatggaggaggcggtgcgaacggcttcagccccgaatgctcgcatctcccactggacggcgacgaaggcggtggccgtgcgagcgcaggactgggcggcctgtgtgggggtgtgagccgcggtgcccaaggctgcgccggcgaggggaagccgcgcggccggccggccgactagggtttgaagactgcttcattctgcctctagtaccagcggtttctctgttctgtgatcaatgtgattcacaggaactccttaagtaacaaacgaaatgagccaggggcgtggaaaatatgacttctatattggtctgggattggctatgagctccagcattttcattggaggaagtttcattttgaaaaaaaagggcctccttcgacttgccaggaaaggctctatgagagcaggtcaaggtggccatgcatatcttaaggaatggttgtggtgggctggactgctgtcaatgggagctggtgaggtggccaacttcgctgcgtatgcgtttgcaccagccactctagtgactccactaggagctctcagcgtgctagtaagtgccattctttcttcatactttctcaatgaaagacttaatcttcatgggaaaattgggtgtttgctaagtattctaggatctacagttatggtcattcatgctccaaaggaagaggagattgagactttaaatgaaatgtctcacaagctaggtgatccaggttttgtggtctttgcaacccttgtggtcattgtggccttgatattaatcttcgtggtgggtcctcgccatggacagacaaacattcttgtgtacataacaatctgctctgtaatcggcgcgttttcagtctcctgtgtgaagggcctgggcattgctatcaaggagctgtttgcagggaagcctgtgctgcggcatcccctggcttggattctgctgctgagcctcatcgtctgtgtgagcacacagattaattacctaaatagggccctggatatattcaacacttccattgtgactccaatatattatgtattctttacaacatcagttttaacttgttcagctattctttttaaggagtggcaagatatgcctgttgacgatgtcattggtactttgagtggcttctttacaatcattgtggggatattcttgttgcatgcctttaaagacgtcggctttagtctagcaagtctgcctgtgtcttttcgaaaagacgagaaagcaatgaatggcaatctctctaatatgtatgaagttcttaataataatgaagaaagcttaacctgtggaatcgaacaacacactggtgaaaatgtctcccgaagaaatggaaatctgacagctttttaagaaaggtgtaattaaaggttaatctgtgattgttatgaagtgaatttgaatatcatcagaatgtgtctgaaaaaacattgtcctcaaataatgttctttaaaggcaatctttttaaagatttcactaatttggaccaagaaattacttttcttgtatttaaacaaacaatggtagctcactaaaatgacctcagcacatgacgatttctattaacattttattgttgtagaagtattttacattttcatcccttctccaaaagccgaatgcactaatgacagttttaagtctatgaaaatgctttattttttcattggtgatgaaagtctgaaatgtgcatttgtcatccccactccatcaatccctgaccatgtaaggcttttttattttaaaaaaacagagttatcccaatacattatcctgtgatttaccttacctacaaaagtggctcctgtttgtttgatgatgattggttttatttttgaaatatttattaagggaaaactaagttactgaatgaaggaacctctttcttacaaaacaaaaaaaagggcagaaatcaccccaaggaacgatttctcaggttgagatgatcaccgtgaatccggcttcctctgagcattcgatggccttagcacctcatcaagccagcacatcctgcctgctgttgcagcctggctgggtttattcttcagttaccctaatcccatgatgcctggaaccttgattaccgttttacatcagctcttgtacttttcagtatattttcataatgagttatattgtcatttagactttgaacagctctgggaaatagaagactagggttgtttcttaaatttagctcatgttataataaaaagttgaaatgaaaaaaaaaaaaaaaaaaaa

SEQ ID NO: 5910 - protein, 360 aa, Homo sapien
MSQGRGKYDFYIGLGLAMSSSIFIGGSFILKKKGLLRLARKGSMRAGQGGHAYLKEWLWWAGLLSMGAGEVANFAAYAFAPATLVTPLGALSVLVSAILSSYFLNERLNLHGKIGCLLSILGSTVMVIHAPKEEEIETLNEMSHKLGDPGFVVFATLVVIVALILIFVVGPRHGQTNILVYITICSVIGAFSVSCVKGLGIAIKELFAGKPVLRHPLAWILLLSLIVCVSTQINYLNRALDIFNTSIVTPIYYVFFTTSVLTCSAILFKEWQDMPVDDVIGTLSGFFTIIVGIFLLHAFKDVGFSLASLPVSFRKDEKAMNGNLSNMYEVLNNNEESLTCGIEQHTGENVSRRNGNLTAF

SEQ ID NO: 5911 - DNA, 526 bp, Homo sapien
gcgaggcggccgctgtcttctgctgcggcttccgcgaccacaagtactgctgcgacgacccgcacagcttcttcccctacgagcacagctacatgtggtggctcagcattggcgctctcataggcctgtccgtagcagcagtggttcttctcgccttcattgttaccgcctgtgtgctctgctacctgttcatcagctctaagccccacacaaagttggacctgggcttgagcttacagacagcaggccctgaggaggtttctcctgactgccaaggtgtgaacacaggcatggcggcagaagtgccaaaagtgagccctctccagcagagttactcctgcttgaacccgcagctggagagcaatgaggggcaggctgtgaactccaaacgcctcctccatcattgcttcatggccacagtgaccaccagtgacattccaggcagccctgaggaagcctctgtacccaaccctgacctatgtggaccagtcccataaacattcaataaatgtctccataccatcaa

SEQ ID NO: 5912 - protein, 134 aa, Homo sapien
MWWLSIGALIGLSVAAVVLLAFIVTACVLCYLFISSKPHTKLDLGLSLQTAGPEEVSPDCQGVNTGMAAEVPKVSPLQQSYSCLNPQLESNEGQAVNSKRLLHHCFMATVTTSDIPGSPEEASVPNPDLCGPVP

SEQ ID NO: 5913 - DNA, 1545 bp, Homo sapien; identical to SEQ ID NO: 4215

SEQ ID NO: 5914 - protein, 296 aa, Homo sapien; identical to SEQ ID NO: 4216

SEQ ID NO: 5915 - DNA, 4440 bp, Homo sapien
agtgccctctgtcatttaatctccacggagtcctgaaggtgcttcccaggtttgtccccatcacacagatgaggcaatcgttctgttaagactgtccttgggtcattatgtcagcaatgaaatcggtgctgccattactaaacccttactgtgtgctggcatttgtgtatgcatgcatgtgtgtgcgtgcacacgtgtgtgtttgcgtgtacatgtgcatgtgtgtgttgtgtgcctgtgtgtgcacatgtagaaagaaagtgatgtgtgggaatggagaattccaacccaggaggagactgtgcctggggctgccacgagaagtggtgacacttcgagaaacgggttccaaatgcacgttgccttccagttctctgtgtgaccttgggcaagtcacttcagctccctgagctttgtttttaaaaatattttttaaatgtataaaaccatggaccattacatatgaagagaaatgtgtgtgcaaacattcagttaataatcacaaggtggaggagtgcctgctcagacccagagctgacacagggaactctcccagaaggctgcagggcttccctcccaaccctccaacggcccacttgctgagcccgtgcttatctgttcagtggaaatgccatgtgccacgttcctcagaagtaaagccactaggtaagtgtgacactctgtgcccagcttggtgcaaagccccttgtgtgtgctatcttattgacctcccaaatagcatggtaaggtcagtactgtcacttcccccactttgaagatgaggagagcacaaattctagatggaaatggaggtcacgcagtggaaataggatccagacagattaatccaatctcaagcctgaattcttccattccacgctacgcttgaagctcaatctctcttcctggttgattctccccacttccccacccccagatatatcccatcgctgcttggtggacagtagccatgactgggttttggtaaaggttgctgaataatcaggctgctggttagtttttacatttcacctttcccagtgaaatggggccccatgaaaaaggcagctcaagttgtaaattactcaaaggaaggacagaaaggtcttctgtttgcacctaccctaaggatttggggtagacactgggaatttactaattatgaattccagtgctttccttgctgaaagagaggcgtggaatcaacgctgagtgaaggcatcaagtttaagctgctaattacttcctgatcatgcagaataaaagctacgtcccttgaaatacaccaggcagctaaacataatctttgcgtttccgtagtgttggttaaggaatccagatgttactgcaataaccactccataaacaaaaggaacacccagctgtgagaactggcttctcagcattcgtcccagcagaggctcttccggggccagccctggaagaacccatcagggttctgatggttgccctgtttcagcacagcccttattggcaggcagacggctacgggcacagccacaggctgaaggtgagtccagcacacaactttctgacagtgaacaggagtaaacatgggacccacccgaaacctttgtctgttgacttcttagcaaatggaggcagctctaggctctggagagttcgggtataggagaccatgacttgagcagactgatataagtggaatgcaaacatatttagatggcacaacttaatttagatttatcagtgctaatatagaaaaagctagtatttattggggcttattagatttttagtctgaatcctcacaacttacgagggggttcgttttacagactatgatcttgcatgatttccccaaagatgctcattaagtatatggtgaaagtagaatttgaatacagaagacctggttctgctactttctgtgtttctatttggttcaaaccagcctttcttctttcaaaacaacttcagtgcaattcatggttttggaaaataaacttgattttgagattcagacaataagtgcatttttaatgtttattcttttatcttgaaaaactgatatatttatgaaatgatatgtgctcactcagtgtcaacacttcaaacaacacagacagtacaatgacaaattggagatcagctctaatctcggcccccaatttaatgcattgctgaatattcttctgaacatagtccatcccacactgtcccatgacacaagacgctccaaggggctgaagatagagggacttctgcagtcaagagagctgggaaactcttggacagtcacaatgtgcatttgggtattaaaggctctgcaaagttctgcaccaaataaacccttggattggcttgatccaatgccatgtttccaaaacctacttgcccgtgggacaccttagtccataacacaggttggcatttcttctagagagtgtgctgtgaaaaacactggtctcacagcaccgtgcattcatccagcaggtatttaccaagcagggactttgggccaggtccgtgctaggctctgcaggtggaccagccagccctgacctccatggtgtctcttctcatgggagaggctgcacagcagtcattgagaaaacgaagaaacacacaggtactttcagatgctgataatgactaccatgtgctaaaagagctccaggtgttgtctgttttgagacaatcttctcgacaatgagatagaatgaaccatgcaaactttgggggctacgatggttttaggaaagagctagagtgaaaaatcctttgacatatatacatacaaataaagatacatgtgtataattttatgtaattgacatcacattatatgctggcacctgccttttttgcttaatgaaaatgtcaaaggtaatattaccaatcaatcaatatatttcaccatcgtgtttaatttctgcagagcacttattcaagcacatactgcatttttcttagtcactcactggtgggaatagaaagttttctcaggcatgcatttttcccacttctgaaatgatctccttagaataaattccccaaattgtattgctgggttcaaaggcatgaacattttacatttttatacaataatgtcaaactaccttccggaaatgatgctcactttactttccctccaagactgtgtgaaaatgcccattttcctaaatgcttactatgactggtttccaactacattttaattcttgttcaatctgataggcaaaaaatgatatttaatttttatttgattgataatgaccttgaacgtgcccattagccttttgcatgtattcttttatgaaacatctgttcctatccttcgtcaatgttcctcttcatatgttaacttttcttattgatttgttagagcactttgtatattgtgaatattagcttttgtgatcagaattatggaattgttgttgtctttagttttgcttatcaagtttaaagccattcagagatgttgtaaatgtgtatgttgttaaatttatgtcttattttgtgttttctgatgctcatatgtttagaatggtcaagcaatcccaacttatgattacataaatattctcccatatttgctcttagcattttttttcttttcatgtaaccctttgttctttcaggaatttactttgcggtaagaaatgggctggcttccagttttatgtttcccaaatggtgattcagctgttccatttccatattctcccttattagaaatgaccactatattatgttctaaaatatctgcgtacttgtgtcccttcctataatctcagttcatctctttgagctatcttttgattcctttttcaaaccacactgctttactgaactgtcatcatcttatacatttttaatactcagcaagacaagtttctcaatgccactctttttcagagtttttctggtggttgtaagatgtttattcttctggataaactttagaatcactctttttgtccaaggtaaaatatatcccacattgagatcatactgaatatacagactaattcaggaaaaaatgtatgtctttattgcattgagtcttcttatccaataaaaaagatatgaatttccatgtattgaaatcttcactgagacttatttttggcttttcacatgtcctgcaaatgtattgttaaatttatttttaggtattttaggggaaatgattttctaaagtttgtattttctagcttgttataatttacatatgagatagtcattgttgtatattatttataactgatcatattactgtatttgtattgttttaatagtttttctattattttgggttttcctggaatacaaccttattatctacaaattatgattgttttgccttttccaatgttcataactgtttttatattcttgtctgattgctttgttcagcacttctagaataaagtcatgcaatactaatga

SEQ ID NO: 5916 - protein, 100 aa, Homo sapien
MSAMKSVLPLLNPYCVLAFVYACMCVRAHVCVCVYMCMCVLCACVCTCRKKVMCGNGEFQPRRRLCLGLPREVVTLRETGSKCTLPSSSLCDLGQVTSAP

SEQ ID NO: 5917 - DNA, 2610 bp, Homo sapien; identical to SEQ ID NO: 2442

SEQ ID NO: 5918 - protein, 199 aa, Homo sapien; identical to SEQ ID NO: 2443

SEQ ID NO: 5919 - DNA, 2043 bp, Homo sapien
cagagaccgaggctgcaccggcagaggctgcggggcggacgcgcgggccggcgcagccatggtgaagattagcttccagcccgccgtggctggcatcaagggcgacaaggctgacaaggcgtcggcgtcggcccctgcgccggcctcggccaccgagatcctgctgacgccggctagggaggagcagcccccacaacatcgatccaagagggggagctcagtgggcggcgtgtgctacctgtcgatgggcatggtcgtgctgctcatgggcctcgtgttcgcctctgtctacatctacagatacttctttcttgcacagctggcccgagataacttcttccgctgtggtgtgctgtatgaggactccctgtcctcccaggtccggactcagatggagctggaagaggatgtgaaaatctacctcgacgagaactacgagcgcatcaacgtgcctgtgccccagtttggcggcggtgaccctgcagacatcatccatgacttccagcggggtctgactgcgtaccatgatatctccctggacaagtgctatgtcatcgaactcaacaccaccattgtgctgccccctcgcaacttctgggagctcctcatgaacgtgaagagggggacctacctgccgcagacgtacatcatccaggaggagatggtggtcacggagcatgtcagtgacaaggaggccctggggtccttcatctaccacctgtgcaacgggaaagacacctaccggctccggcgccgggcaacgcggaggcggatcaacaagcgtggggccaagaactgcaatgccatccgccacttcgagaacaccttcgtggtggagacgctcatctgcggggtggtgtgaggccctcctcccccagaaccccctgccgtgttcctcttttcttctttccggctgctctctggccctcctccttccccctgcttagcttgtactttggacgcgtttctatagaggtgacatgtctctccattcctctccaaccctgcccacctccctgtaccagagctgtgatctctcggtggggggcccatctctgctgacctgggtgtggcggagggagaggcgatgctgcaaagtgttttctgtgtcccactgtcttgaagctgggcctgccaaagcctgggcccacagctgcaccggcagcccaaggggaaggaccggttgggggagccgggcatgtgaggccctgggcaaggggatggggctgtgggggcggggcggcatgggcttcagaagtatctgcacaattagaaaagtcctcagaagctttttcttggagggtacactttcttcactgtccctattcctagacctggggcttgagctgaggatgggacgatgtgcccagggagggacccaccagagcacaagagaaggtggctacctgggggtgtcccagggactctgtcagtgccttcagcccaccagcaggagcttggagtttggggagtggggatgagtccgtcaagcacaactgttctctgagtggaaccaaagaagcaaggagctaggacccccagtcctgccccccaggagcacaagcagggtcccctcagtcaaggcagtgggatgggcggctgaggaacggggcaggcaaggtcactgctcagtcacgtccacgggggacgagccgtgggttctgctgagtaggtggagctcattgctttctccaagcttggaactgttttgaaagataacacagagggaaagggagagccacctggtacttgtccaccctgcctcctctgttctgaaattccatccccctcagcttaggggaatgcacctttttccctttccttctcacttttgcatgtttttactgatcattcgatatgctaaccgttctcagccctgagccttggagaggagggctgtaacgccttcagtcagtctctggggatgaaactcttaaatgctttgtatattttctcaattagatctcttttcagaagtgtctatagaacaataaaaatcttttacttctgaaaaaaaaaaaaaaaaaaaaaaaaaaaaaaaaa

SEQ ID NO: 5920 - protein, 267 aa, Homo sapien [sequence omitted]

SEQ ID NO: 5921 - DNA, 4573 bp, Homo sapien; identical to SEQ ID NO: 2672

SEQ ID NO: 5922 - DNA, 3108 bp, Homo sapien; identical to SEQ ID NO: 3731

SEQ ID NO: 5923 - protein, 343 aa, Homo sapien; identical to SEQ ID NO: 3732

SEQ ID NO: 5924 - DNA, 492 bp, Homo sapien; identical to SEQ ID NO: 5421

SEQ ID NO: 5925 - protein, 163 aa, Homo sapien; identical to SEQ ID NO: 5422

SEQ ID NO: 5926 - DNA, 1125 bp, Homo sapien
caaaaggtgcaggtatgagcaggtctgaagactaacattttgtgaagttgtaaaacagaaaacctgttagaaatgtggtggtttcagcaaggcctcagtttccttccttcagcccttgtaatttggacatctgctgctttcatattttcatacattactgcagtaacactccaccatatagacccggctttaccttatatcagtgacactggtacagtagctccagaaaaatgcttatttggggcaatgctaaatattgcggcagttttatgcattgctaccatttatgttcgttataagcaagttcatgctctgagtcctgaagagaacgttatcatcaaattaaacaaggctggccttgtacttggaatactgagttgtttaggactttctattgtggcaaacttccagaaaacaaccctttttgctgcacatgtaagtggagctgtgcttacctttggtatgggctcattatatatgtttgttcagaccatcctttcctaccaaatgcagcccaaaatccatggcaaacaagtcttctggatcagactgttgttggttatctggtgtggagtaagtgcacttagcatgctgacttgctcatcagttttgcacagtggcaattttgggactgatttagaacagaaactccattggaaccccgaggacaaaggttatgtgcttcacatgatcactactgcagcagaatggtctatgtcattttccttctttggttttttcctgacttacattcgtgattttcagaaaatttctttacgggtggaagccaatttacatggattaaccctctatgacactgcaccttgccctattaacaatgaacgaacacggctactttccagagatatttgatgaaaggataaaatatttctgtaatgattatgattctcagggattggggaaaggttcacagaagttgcttattcttctctgaaattttcaaccacttaatcaaggctgacagtaacactgatgaatgctgataatcaggaaacatgaaagaagccatttgatagattattctaaaggatatcatcaagaagactattaaaaacacctatgcctatacttttttatctcagaaaataaagtcaaaagactatg

SEQ ID NO: 5927 - protein, 266 aa, Homo sapien
MWWFQQGLSFLPSALVIWTSAAFIFSYITAVTLHHIDPALPYISDTGTVAPEKCLFGAMLNIAAVLCIATIYVRYKQVHALSPEENVIIKLNKAGLVLGILSCLGLSIVANFQKTTLFAAHVSGAVLTFGMGSLYMFVQTILSYQMQPKIHGKQVFWIRLLLVIWCGVSALSMLTCSSVLHSGNFGTDLEQKLHWNPEDKGYVLHMITTAAEWSMSFSFFGFFLTYIRDFQKISLRVEANLHGLTLYDTAPCPINNERTRLLSRDI

SEQ ID NO: 5928 - DNA, 1256 bp, Homo sapien
acgaggggagctccggctgcgtcttcccgcagcgctacccgccatgcgcctgccgcgccgggccgcgctggggctcctgccgcttctgctgctgctgccgcccgcgccggaggccgccaagaagccgacgccctgccaccggtgccgggggctggtggacaagtttaaccaggggatggtggacaccgcaaagaagaactttggcggcgggaacacggcttgggaggaaaagacgctgtccaagtacgagtccagcgagattcgcctgctggagatcctggaggggctgtgcgagagcagcgacttcgaatgcaatcagatgctagaggcgcaggaggagcacctggaggcctggtggctgcagctgaagagcgaatatcctgacttattcgagtggttttgtgtgaagacactgaaagtgtgctgctctccaggaacctacggtcccgactgtctcgcatgccagggcggatcccagaggccctgcagcgggaatggccactgcagcggagatgggagcagacagggcgacgggtcctgccggtgccacatggggtaccagggcccgctgtgcactgactgcatggacggctacttcagctcgctccggaacgagacccacagcatctgcacagcctgtgacgagtcctgcaagacgtgctcgggcctgaccaacagagactgcggcgagtgtgaagtgggctgggtgctggacgagggcgcctgtgtggatgtggacgagtgtgcggccgagccgcctccctgcagcgctgcgcagttctgtaagaacgccaacggctcctacacgtgcgaagatgtggacgagtgctcactagcagaaaaaacctgtgtgaggaaaaacgaaaactgctacaatactccagggagctacgtctgtgtgtgtcctgacggcttcgaagaaacggaagatgcctgtgtgccgccggcagaggctgaagccacagaaggagaaagcccgacacagctgccctcccgcgaagacctgtaatgtgccggacttaccctttaaattattcagaaggatgtcccgtggaaaatgtggccctgaggatgccgtctcctgcagtggacagcggcggggagaggctgcctgctctctaacggttgattctcatttgtcccttaaacagctgcatttcttggttgttcttaaacagacttgtatattttgatacagttctttgtaataaaattgaccattgtaggtaatcaggaaaaaaaaaaaaaaaaaaaaa

SEQ ID NO: 5929 - protein, 321 aa, Homo sapien
MRLPRRAALGLLPLLLLLPPAPEAAKKPTPCHRCRGLVDKFNQGMVDTAKKNFGGGNTAWEEKTLSKYESSEIRLLEILEGLCESSDFECNQMLEAQEEHLEAWWLQLKSEYPDLFEWFCVKTLKVCCSPGTYGPDCLACQGGSQRPCSGNGHCSGDGSRQGDGSCRCHMGYQGPLCTDCMDGYFSSLRNETHSICTACDESCKTCSGLTNRDCGECEVGWVLDEGACVDVDECAAEPPPCSAAQFCKNANGSYTCEDVDECSLAEKTCVRKNENCYNTPGSYVCVCPDGFEETEDACVPPAEAEATEGESPTQLPSREDL

SEQ ID NO: 5930 - DNA, 1985 bp, Homo sapien
ggacagctcgcggcccccgagagctctagccgtcgaggagctgcctggggacgtttgccctggggccccagcctggcccgggtcaccctggcatgaggagatgggcctgttgctcctggtcccattgctcctgctgcccggctcctacggactgcccttctacaacggcttctactactccaacagcgccaacgaccagaacctaggcaacggtcatggcaaagacctccttaatggagtgaagctggtggtggagacacccgaggagaccctgttcacctaccaaggggccagtgtgatcctgccctgccgctaccgctacgagccggccctggtctccccgcggcgtgtgcgtgtcaaatggtggaagctgtcggagaacggggccccagagaaggacgtgctggtggccatcgggctgaggcaccgctcctttggggactaccaaggccgcgtgcacctgcggcaggacaaagagcatgacgtctcgctggagatccaggatctgcggctggaggactatgggcgttaccgctgtgaggtcattgacgggctggaggatgaaagcggtctggtggagctggagctgcggggtgtggtctttccttaccagtcccccaacgggcgctaccagttcaacttccacgagggccagcaggtctgtgcagagcaggctgcggtggtggcctcctttgagcagctcttccgggcctgggaggagggcctggactggtgcaacgcgggctggctgcaggatgctacggtgcagtaccccatcatgttgccccggcagccctgcggtggcccaggcctggcacctggcgtgcgaagctacggcccccgccaccgccgcctgcaccgctatgatgtattctgcttcgctactgccctcaaggggcgggtgtactacctggagcaccctgagaagctgacgctgacagaggcaagggaggcctgccaggaagatgatgccacgatcgccaaggtgggacagctctttgccgcctggaagttccatggcctggaccgctgcgacgctggctggctggcagatggcagcgtccgctaccctgtggttcacccgcatcctaactgtgggcccccagagcctggggtccgaagctttggcttccccgacccgcagagccgcttgtacggtgtttactgctaccgccagcactaggacctggggccctcccctgccgcattccctcactggctgtgtatttattgagtggttcgttttcccttgtgggttggagccattttaactgtttttatacttctcaatttaaattttctttaaacatttttttactattttttgtaaagcaaacagaacccaatgcctccctttgctcctggatgccccactccaggaatcatgcttgctcccctgggccatttgcggttttgtgggcttctggagggttccccgccatccaggctggtctccctcccttaaggaggttggtgcccagagtgggcggtggcctgtctagaatgccgccgggagtccgggcatggtgggcacagttctccctgcccctcagcctgggggaagaagagggcctcgggggcctccggagctgggctttgggcctctcctgcccacctctacttctctgtgaagccgctgaccccagtctgcccactgaggggctagggctggaagccagttctaggcttccaggcgaaatctgagggaaggaagaaactcccctccccgttccccttcccctctcggttccaaagaatctgttttgttgtcatttgtttctcctgtttccctgtgtggggaggggccctcaggtgtgtgtactttggacaataaatggtgctatgactgccttccgccaaaaaaaaaaaaaaaaaaaaaaaaaaaaaaaaaaaaaaaaaaaaaaaaaaaaaaaaaaaaaaaaaaaaaaaaaaaaaaaaaaaaaaaaaaaaaaaaaaaaaaaaaaaaaaaaaaaaaaaaaaaaaaa

SEQ ID NO: 5931 - protein, 360 aa, Homo sapien; identical to SEQ ID NO: 4918

SEQ ID NO: 5932 - DNA, 2840 bp, Homo sapien; identical to SEQ ID NO: 2815

SEQ ID NO: 5933 - protein, 218 aa, Homo sapien; identical to SEQ ID NO: 2816

SEQ ID NO: 5934 - DNA, 1290 bp, Homo sapien
cacctgtcaggacttcagaatccttgaccgataccagacttccttgccgtccaggaagggatttcgacaccagaccaccaagtttttgtatcgcttggtaggatcagaagatatggctgtggaccagagtattgtcagcccttatacctctcggatcttgaaaccttatatcaggcgtgattatgaaacaaagccacccaaactgcagctcctgtcacagattcgttcccacctgcacaggagcgaccctcactggacgccggagcccgacgcacctctcgattactgttatgtgcggccaaatcacatcccaacgatcaactccatgtgtcaggagtttttttggcctggcattgacctgtctgagtgtctgcagtacccagacttcagtgttgttgttctttataaaaaagtcatcattgcctttggcttcatggttcctgatgtgaaatacaatgaagcttacatttcatttctgttcgtccaccctgaatggagaagagcagggattgcaactttcatgatctatcatctgattcagacctgcatgggcaaggacgtaacccttcacgtctcagcaagcaaccccgctatgctactgtaccagaagtttggattcaagactgaagaatatgtattagatttctatgataaatattacccattggagagtacagagtgtaaacacgcattctttctgaggctccggcgctgatgcgaatacagctcacagagaaacgcatgtgctattggagaacaggtctttgtggagatctaaaggcagtgattgatttcacagggagctctaatctctgtgattacatggtccttcaaactcccaaccaaagtgagaaaagcggcatgcagtgaaatgagcagtgagcagccctttagcaaaatcgccctccagtccttcctggagatgccttcagccagcatcccagactccacagttatttatgaatgatgtcgtgattctccctccacctgacagtttgtaagagtgaaagagcatctaacctgatgctcttggagagagataacctgtctgtcataacttaaaggatgagaaaatgtggtgtagctattaaagattcatgcagtcccaaaaggcactgtcctgggatgatgagagattataaggtgatttcataaaaggaatccaaccctgtgcccggccattgatgtgttgtcattgaatccaggaggatttctagggcactgaagttttgttgtttcttttgctgactttggttacagtcagaaaaaataaactagatgtttgtgtct

SEQ ID NO: 5935 - DNA, 1844 bp, Homo sapien
gacagtggagggcagtggagaggaccgcgctgtcctgctgtcaccaagagctggagacaccatctcccaccgagagtcatggccccattggccctgcacctcctcgtcctcgtccccatcctcctcagcctggtggcctcccaggactggaaggctgaacgcagccaagaccccttcgagaaatgcatgcaggatcctgactatgagcagctgctcaaggtggtgacctgggggctcaatcggaccctgaagccccagagggtgattgtggttggcgctggtgtggccgggctggtggccgccaaggtgctcagcgatgctggacacaaggtcaccatcctggaggcagataacaggatcgggggccgcatcttcacctaccgggaccagaacacgggctggattggggagctgggagccatgcgcatgcccagctctcacaggatcctccacaagctctgccagggcctggggctcaacctgaccaagttcacccagtacgacaagaacacgtggacggaggtgcacgaagtgaagctgcgcaactatgtggtggagaaggtgcccgagaagctgggctacgccttgcgtccccaggaaaagggccactcgcccgaagacatctaccagatggctctcaaccaggccctcaaagacctcaaggcactgggctgcagaaaggcgatgaagaagtttgaaaggcacacgctcttggaatatcttctcggggaggggaacctgagccggccggccgtgcagcttctgggagacgtgatgtccgaggatggcttcttctatctcagcttcgccgaggccctccgggcccacagctgcctcagcgacagactccagtacagccgcatcgtgggtggctgggacctgctgccgcgcgcgctgctgagctcgctgtccgggcttgtgctgttgaacgcgcccgtggtggcgatgacccagggaccgcacgatgtgcacgtgcagatcgagacctctcccccggcgcggaatctgaaggtgctgaaggccgacgtggtgctgctgacggcgagcggaccggcggtgaagcgcatcaccttctcgccgccgctgccccgccacatgcaggaggcgctgcggaggctgcactacgtgccggccaccaaggtgttcctaagcttccgcaggcccttctggcgcgaggagcacattgaaggcggccactcaaacaccgatcgcccgtcgcgcatgattttctacccgccgccgcgcgagggcgcgctgctgctggcctcgtacacgtggtcggacgcggcggcagcgttcgccggcttgagccgggaagaggcgttgcgcttggcgctcgacgacgtggcggcattgcacgggcctgtcgtgcgccagctctgggacggcaccggcgtcgtcaagcgttgggcggaggaccagcacagccagggtggctttgtggtacagccgccggcgctctggcaaaccgaaaaggatgactggacggtcccttatggccgcatctactttgccggcgagcacaccgcctacccgcacggctgggtggagacggcggtcaagtcggcgctgcgcgccgccatcaagatcaacagccggaaggggcctgcatcggacacggccagccccgaggggcacgcatctgacatggaggggcaggggcatgtgcatggggtggccagcagcccctcgcatgacctggcaaaggaagaaggcagccaccctccagtccaaggccagttatctctccaaaacacgacccacacgaggacctcgcattaaagtattttcggaaaaaaaaaaaaaaaaaaaaaaaaaaaaaaaaaaaaaaaaaaaaaaaaaaa

SEQ ID NO: 5936 - protein, 567 aa, Homo sapien; identical to SEQ ID NO: 5275

SEQ ID NO: 5937 - DNA, 2498 bp, Homo sapien
gttttattgccacaactaacctcctcggactcctgcctcactcatttacaccaaccacccaactatctataaacctagccatggccatccccttatgagcgggcgcagtgattataggctttcgctctaagattaaaaatgccctagcccacttcttaccacaaggcacacctacaccccttatccccatactagttattatcgaaaccatcagcctactcattcaaccaatagccctggccgtacgcctaaccgtaacattactgcaggccacctactcatgcacctaattggaagcgccaccctagcaatatcaaccattaaccttccctctacacttatcatcttgacaattctaattctactgactatcctagaaatcgctgtcgcttaatccaagcctacgttttcacacttctagtaagcctctacctgcacgacaacacataaaaaaaaaaaaaaaaaaaaaaaaaaaaaaaaaaaaaaaaaaaaaaaaaaaaaaaaaaaccttccccgcgccggccgggtcccgcccgttccccggcaccagaagttcctttgcgcgtccgacggcgacatgggcgtccccacggccctggaggccggcagctggcgctggggatccctgctcttcgctcttttcctggctgcgtccctaggtccggtggcagccttaaaggtcgccacgccgtattccctgtatgtctgtcccgaggggcaaaacgtcaccctcacctgcaggcttttgggccctgtggacaaagggcacgatgtgaccttctacaagacgtggtaccgcagctcgaggggcgaggtgcaaacctgttaaaagcgccggcccatccgaaacctaacgttccaggaccttcacctgcaccatggaggccaccaggctgccaacaccagccacgacctggctcagcgccacgggctggagtcggcctccgaccaccatggcaacttctccatcaccatgcgcaacctgaccctgctggatagcggcctctactgctgcctggtggtggagatcaggcaccaccactcggagcacagggtccatggtgccatggagctgcaggtgcagacaggcaaagatgcaccatccaactgtgtggtgtacccatcctcctcccaggagagtgaaaacatcacggctgcagccctggctacgggtgcctgcatcgtaggaatcctctgcctccccctcatcctgctcctggtctacaagcaaaggcaggcagcctccaaccgccgtgcccaggagctggtgcggatggacagcaacattcaagggattgaaaaccccggctttgaagcctcaccacctgcccaggggatacccgaggccaaagtcaggcaccccctgtcctatgtggcccagcggcagccttctgagtctgggcggcatctgctttcggagcccagcacccccctgtctcctccaggccccggagacgtcttcttcccatccctggaccctgtccctgactctccaaactttgaggtcatctagcccagctgggggacagtgggctgttgtggctgggtctggggcaggtgcatttgagccagggctggctctgtgagtggcctccttggcctcggccctggttccctccctcctgctctgggctcagatactgtgacatcccaaaagcccagcccctcaacccctctggatgctacatggggatgctggacggctcagcccctgttccaaggattttggggtgctgagattctcccctagagacctgaaattcaccagctacagatgccaaatgacttacatcttaagaagtctcaaaacgtccagcccttcagcagctctcgttctgagacatgagccttgggatgtggcagcatcagtgggacaagatggacactgggccaccctcccaggcaccagacacagggcacggtggagagacttctcccccgtggccgccttggctcccccgttttgcccgaggctgctcttctgtcagacttcctctttgtaccacagtggctctggggccaggcctgcctgcccactggccatcgccaccttccccagctgcctcctaccagcagtttctctgaagatctgtcaacaggttaagtcaatctggggcttccactgcctgcattccagtccccagagcttggtggtcccgaaacgggaagtacatattggggcatggtggcctccgtgagcaaatggtgtcttgggcaatctgaggccaggacagatgttgccccacccactggagatggtgctgagggaggtgggtggggccttctgggaaggtgagtggagaggggcacctgccccccgccctccccatcccctactcccactgctcagcgcgggccattgcaagggtgccacacaatgtcttgtccaccctgggacacttctgagtatgaagcgggatgctattaaaaactacatggggaaacaggtgcaaaaaaaaaaaaaaaaaaaaaaaaaaaaaaaaaaaaaaaaaaaaaaa

SEQ ID NO: 5938 - protein, 179 aa, Homo sapien [sequence omitted]

SEQ ID NO: 5939 - DNA, 1865 bp, Homo sapien
gcagttgcggctccagggccatggcggaggagcagggccgggaacgggactcggttcccaagccgtcggtgctgttcctccacccagacctgggcgtgggcggcgctgagcggctggtgttggacgcggcgctggcgctgcaggcgcgcgggtgtagcgtgaagatctggacagcgcactacgacccgggccactgtttcgccgagagccgcgagctaccggtgcgctgtgccggggactggctgccgcgaggcctgggctggggcggccgcggcgccgccgtctgcgcctacgtgcgcatggttttcctggcgctctacgtgctgttcctcgccgacgaggagttcgacgtggtagtgtgcgaccaggtgtctgcctgtatcccagtgttcaggctggctagacggcggaagaagatcctattttactgtcacttcccagatctgcttctcaccaagagagattcttttcttaaacgactatacagggccccaattgactggatagaggaatacaccacaggcatggcagactgcatcttagtcaacagccagttcacagctgctgtttttaaggaaacattcaagtccctgtctcacatagaccctgatgtcctctatccatctctaaatgtcaccagctttgactcagttgttcctgaaaagctggatgacctagtccccaaggggaaaaaattcctgctgctctccatcaacagatacgaaaggaagaaaaatctgactttggcactggaagccctagtacagctgcgtggaagattgacatcccaagattgggagagggttcatctgatcgtggcaggtggttatgacgagagagtcctggagaatgtggaacattatcaggaattgaagaaaatggtccaacagtccgaccttggccagtatgtgaccttcttgaggtctttctcagacaaacagaaaatctccctcctccacagctgcacgtgtgtgctttacacaccaagcaatgagcactttggcattgtccctctggaagccatgtacatgcagtgcccagtcattgctgttaattcgggtggacccttggagtccattgaccacagtgtcacagggtttctgtgtgagcctgacccggtgcacttctcagaagcaatagaaaagttcatccgtgaaccttccttaaaagccaccatgggcctggctggaagagccagagtgaaggaaaaattttcccctgaagcatttacagaacagctctaccgatatgttaccaaactgctggtataatcagattgtttttaagatctccattaatgtcatttttatggattgtagacccagttttgaaaccaaaaaagaaacctagaatctaatgcagaagagatcttttaaaaaataaacttgagtcttgaatgtgagccactttcctatataccacacctccctgtccacttttcagaaaaaccatgtcttttatgctataatcattccaaattttgccagtgttaagttacaaatgtggtgtcattccatgttcagcagagtattttaattatattttctcgggattattgctcttctgtctataaattttgaatgatactgtgccttaattggttttcatagtttaagtgtgtatcattatcaaagttgattaatttggcttcatagtataatgagagcagggctattgtagttcccagattcaatccaccgaagtgttcactgtcatctgttagggaatttttgtttgtcctgtctttgcctggatccatagcgagagtgctctgtattttttttaagataatttgtatttttgcacactgagatataataaaaggtgtttatcacaaaaaaaaaaaaaaaaaaaaaaaaaaaaaa

SEQ ID NO: 5940 - protein, 416 aa, Homo sapien; identical to SEQ ID NO: 4623

SEQ ID NO: 5941 - DNA, 1536 bp, Homo sapien
agcaggagcaggagagggacaatggaagctgccccgtccaggttcatgttcctcttatttctcctcacgtgtgagctggctgcagaagttgctgcagaagttgagaaatcctcagatggtcctggtgctgcccaggaacccacgtggctcacagatgtcccagctgccatggaattcattgctgccactgaggtggctgtcataggcttcttccaggatttagaaataccagcagtgcccatactccatagcatggtgcaaaaattcccaggcgtgtcatttgggatcagcactgattctgaggttctgacacactacaacatcactgggaacaccatctgcctctttcgcctggtagacaatgaacaactgaatttagaggacgaagacattgaaagcattgatgccaccaaattgagccgtttcattgagatcaacagcctccacatggtgacagagtacaaccctgtgactgtgattgggttattcaacagcgtaattcagattcatctcctcctgataatgaacaaggcctccccagagtatgaagagaacatgcacagataccagaaggcagccaagctcttccaggggaagattctctttattctggtggacagtggtatgaaagaaaatgggaaggtgatatcatttttcaaactaaaggagtctcaactgccagctttggcaatttaccagactctagatgacgagtgggatacactgcccacagcagaagtttccgtagagcatgtgcaaaacttttgtgatggattcctaagtggaaaattgttgaaagaaaatcgtgaatcagaaggaaagactccaaaggtggaactctgacttctccttggaactacatatggccaagtatctactttatgcaaagtaaaaaggcacaactcaaatctcagagacactaaacaacaggatcactaggcctgccaaccacacacacacgcacgtgcacacacgcacgcacgcgtgcacacacacacgcgcacacacacacacacacagagcttcatttcctgtcttaaaatctcgttttctcttcttccttcttttaaatttcatatcctcactccctatccaatttccttcttatcgtgcattcatactctgtaagcccatctgtaacacacctagatcaaggctttaagagactcactgtgatgcctctatgaaagagaggcattcctagagaaagattgttccaatttgtcatttaatatcaagtttgtatactgcacatgacttacacacaacatagttcctgctcttttaaggttacctaagggttgaaactctaccttctttcataagcacatgtccgtctctgactcaggatcaaaaaccaaaggatggttttaaacacctttgtgaaattgtctttttgccagaagttaaaggctgtctccaagtccctgaactcagcagaaatagaccatgtgaaaactccatgcttggttagcatctccaactccctatgtaaatcaacaacctgcataataaataaaaggcaatcatgttata

SEQ ID NO: 5942 - protein, 273 aa, Homo sapien; identical to SEQ ID NO: 4943

SEQ ID NO: 5943 - DNA, 2025 bp, Homo sapien
agtgcgtgagtttggtggcggccggctgtgcagagacgccatgtaccggctcctgtcagcagtgactgcccgggctgccgcccccgggggcttggcctcaagctgcggacgacgcggggtccatcagcgcgccgggctgccgcctctcggccacggctgggtcgggggcctcgggctggggctggggctggcgctcggggtgaagctggcaggtgggctgagtggcgcggccccggcgcagtcccccgcggcccccgaccctgaggcgtcgcctctggccgagccgccacaggagcagtccctcgccccgtggtctccgcagaccccggcgccgccctgctccaggtgcttcgccagagccatcgagagcagccgcgacctgctgcacaggatcaaggatgaggtgggcgcaccgggcatagtggttggagtttctgtagatggaaaagaagtctggtcagaaggtttaggttatgctgatgttgagaaccgtgtaccatgtaaaccagagacagttatgcgaattgctagcatcagcaaaagtctcaccatggttgctcttgccaaattgtgggaagcggggaaactggatcttgatattccagtacaacattatgttcccgaattcccagaaaaagaatatgaaggtgaaaaggtttctgtcacaacaagattactgatttcccatttaagtggaattcgtcattatgaaaaggacataaaaaaggtgaaagaagagaaagcttataaagccttgaagatgatgaaagagaatgttgcatttgagcaagaaaaagaaggcaaaagtaatgaaaagaatgattttactaaatttaaaacagagcaggagaatgaagccaaatgccggaattcaaaacctggcaagaaaaagaatgattttgaacaaggcgaattatatttgagagaaaagtttgaaaattcaattgaatccctaagattatttaaaaatgatcctttgttcttcaaacctggtagtcagtttttgtattcaacttttggctataccctactggcagccatagtagagagagcttcaggatgtaaatatttggactatatgcagaaaatattccatgacttggatatgctgacgactgtgcaggaagaaaacgagccagtgatttacaatagagcaaggtaaatgaataccttctgctgtgtctagctatatcgcatcttaacactattttattaattaaaagtcaaattttctttgtttccattccaaaatcaacctgccacattttgggagcttttctacatgtctgttttctcatctgtaaagtgaaggaagtaaaacatgtttataaagtacactaagaccctttgatgaaagatagcaataatattaataattcaaacatgaataactaaaccaaaattgcacccaccatgagcatctgtaatttgctctttaaccattccttttttaggttttaactaatactttgtttacgtgttattagtttttaattgttttcatactgttttgaaataattttatacttatagaaaagttgcaagagtagtacaaaggattcacatatcctctttactcagattcccttaatgttagtttaccgcatttgcattacctttctgtctacatatgtgtttgtttctgaaccatttggaaataagttgtagacgtgatacccctttacctataaatatttacatgtgtattttctaaaaacaaggacattcagggccgggtgcagtggctcacgcctgtaatcccaacactttggaaggccgaggtgggtggatcacctgaggtcaggagttcaagaccagcctggccaatgtggtgaaatcaaccctctctctactaaaaatgcaaaaattagccaggtgtggtggcgggtgcctataatcccagccacgcgggaggctgaggcaggagaatcgcttgaacccaggaggtggagttgcagtaagccaagatcgtgcccctgcacttcaggctgggcgaaagagtgagactccatgtcaaaaaaggat

SEQ ID NO: 5944 - protein, 373 aa, Homo sapien [sequence omitted]

SEQ ID NO: 5945 - DNA, 2551 bp, Homo sapien
gcaagagtgacacacaggtgttcaaagacgcttctggggagtgagggaagcggtttacgagtgacttggctggagcctcaggggcgggcactggcacggaacacaccctgaggccagccctggctgcccaggcggagctgcctcttctcccgcgggttggtggacccgctcagtacggagttggggaagctctttcacttcggaggattgctcaacaaccatgctgggcatctggaccctcctacctctggttcttacgtctgttgctagattatcgtccaaaagtgttaatgcccaagtgactgacatcaactccaagggattggaattgaggaagactgttactacagttgagactcagaacttggaaggcctgcatcatgatggccaattctgccataagccctgtcctccaggtgaaaggaaagctagggactgcacagtcaatggggatgaaccagactgcgtgccctgccaagaagggaaggagtacacagacaaagcccatttttcttccaaatgcagaagatgtagattgtgtgatgaaggacatggcttagaagtggaaataaactgcacccggacccagaataccaagtgcagatgtaaaccaaactttttttgtaactctactgtatgtgaacactgtgacccttgcaccaaatgtgaacatggaatcatcaaggaatgcacactcaccagcaacaccaagtgcaaagaggaaggatccagatctaacttggggtggctttgtcttcttcttttgccaattccactaattgtttgggtgaagagaaaggaagtacagaaaacatgcagaaagcacagaaaggaaaaccaaggttctcatgaatctccaaccttaaatcctgaaacagtggcaataaatttatctgatgttgacttgagtaaatatatcaccactattgctggagtcatgacactaagtcaagttaaaggctttgttcgaaagaatggtgtcaatgaagccaaaatagatgagatcaagaatgacaatgtccaagacacagcagaacagaaagttcaactgcttcgtaattggcatcaacttcatggaaagaaagaagcgtatgacacattgattaaagatctcaaaaaagccaatctttgtactcttgcagagaaaattcagactatcatcctcaaggacattactagtgactcagaaaattcaaacttcagaaatgaaatccaaagcttggtctagagtgaaaaacaacaaattcagttctgagtatatgcaattagtgtttgaaaagattcttaatagctggctgtaaatactgcttggttttttactgggtacattttatcatttattagcgctgaagagccaacatatttgtagatttttaatatctcatgattctgcctccaaggatgtttaaaatctagttgggaaaacaaacttcatcaagagtaaatgcagtggcatgctaagtacccaaataggagtgtatgcagaggatgaaagattaagattatgctctggcatctaacatatgattctgtagtatgaatgtaatcagtgtatgttagtacaaatgtctatccacaggctaaccccactctatgaatcaatagaagaagctatgaccttttgctgaaatatcagttactgaacaggcaggccactttgcctctaaattacctctgataattctagagattttaccatatttctaaactttgtttataactctgagaagatcatatttatgtaaagtatatgtatttgagtgcagaatttaaataaggctctacctcaaagacctttgcacagtttattggtgtcatattatacaatatttcaattgtgaattcacatagaaaacattaaattataatgtttgactattatatatgtgtatgcattttactggctcaaaactacctacttctttctcaggcatcaaaagcattttgagcaggagagtattactagagctttgccacctctccatttttgccttggtgctcatcttaatggcctaatgcacccccaaacatggaaatatcaccaaaaaatacttaatagtccaccaaaaggcaagactgcccttagaaattctagcctggtttggagatactaactgctctcagagaaagtagctttgtgacatgtcatgaacccatgtttgcaatcaaagatgataaaatagattcttatttttcccccacccccgaaaatgttcaataatgtcccatgtaaaacctgctacaaatggcagcttatacatagcaatggtaaaatcatcatctggatttaggaattgctcttgtcatacccccaagtttctaagatttaagattctccttactactatcctacgtttaaatatctttgaaagtttgtattaaatgtgaattttaagaaataatatttatatttctgtaaatgtaaactgtgaagatagttataaactgaagcagatacctggaaccacctaaagaacttccatttatggaggatttttttgccccttgtgtttggaattataaaatataggtaaaagtacgtaattaaata

SEQ ID NO: 5946 - protein, 335 aa, Homo sapien; identical to SEQ ID NO: 1445

SEQ ID NO: 5947 - DNA, 822 bp, Homo sapien; identical to SEQ ID NO: 1810

SEQ ID NO: 5948 - protein, 182 aa, Homo sapien; identical to SEQ ID NO: 1811

SEQ ID NO: 5949 - DNA, 1122 bp, Homo sapien
agccctcccagtttccgcgcgcctctttggcagctggtcacatggtgagggtgggggtgagggggcctctctagcttgcggcctgtgtctatggtcgggccctctgcgtccagctgctccggaccgagctcgggtgtatggggccgtaggaaccggctccggggccccgataacgggccgcccccacagcaccccgggctggcgtgagggtctcccttgatctgagaatggctacctctcgatatgagccagtggctgaaattggtgtcggtgcctatgggacagtgtacaaggcccgtgatccccacagtggccactttgtggccctcaagagtgtgagagtccccaatggaggaggaggtggaggaggccttcccatcagcacagttcgtgaggtggctttactgaggcgactggaggcttttgagcatcccaatgttgtccggctgatggacgtctgtgccacatcccgaactgaccgggagatcaagagatgtttcgtcgaaagcctctcttctgtggaaactctgaagccgaccagttgggcaaaatctttgacctgattgggctgcctccagaggatgactggcctcgagatgtatccctgccccgtggagcctttccccccagagggccccgcccagtgcagtcggtggtacctgagatggaggagtcgggagcacagctgctgctggaaatgctgacttttaacccacacaagcgaatctctgcctttcgagctctgcagcactcttatctacataaggatgaaggtaatccggagtgagcaatggagtggctgccatggaaggaagaaaagctgccatttcccttctggacactgagagggcaatctttgcctttatctctgaggctatggagggtcctcctccatctttctacagagattactttgctgccttaatgacattcccctcccacctctccttttgaggcttctccttctccttcccatttctctacactaaggggtatgttccctcttgtccctttccctacctttatatttggggtccttttttatacaggaaaaacaaaacaaagaaataatggtcttttttttttttttaaaaaaaaaaaaaaaaaaaaaaaaaaaaaaaa

SEQ ID NO: 5950 - protein, 111 aa, Homo sapien
MATSRYEPVAEIGVGAYGTVYKARDPHSGHFVALKSVRVPNGGGGGGGLPISTVREVALLRRLEAFEHPNVVRLMDVCATSRTDREIKRCFVESLSSVETLKPTSWAKSLT

SEQ ID NO: 5951 - DNA, 818 bp, Homo sapien; identical to SEQ ID NO: 413

SEQ ID NO: 5952 - protein, 146 aa, Homo sapien; identical to SEQ ID NO: 414

SEQ ID NO: 5953 - DNA, 6893 bp, Homo sapien
ctccgggctgtcccagctcggcaagcgctgcccaggtcctggggtggtggcagccagcgggagcaggaaaggaagcatgttcccaggctgcccacgcctctgggtcctggtggtcttgggcaccagctgggtaggctgggggagccaagggacagaagcggcacagctaaggcagttctacgtggctgctcagggcatcagttggagctaccgacctgagcccacaaactcaagtttgaatctttctgtaacttcctttaagaaaattgtctacagagagtatgaaccatattttaagaaagaaaaaccacaatctaccatttcaggacttcttgggcctactttatatgctgaagtcggagacatcataaaagttcactttaaaaataaggcagataagcccttgagcatccatcctcaaggaattaggtacagtaaattatcagaaggtgcttcttaccttgaccacacattccctgcagagaagatggacgacgctgtggctccaggccgagaatacacctatgaatggagtatcagtgaggacagtggacccacccatgatgaccctccatgcctcacacacatctattactcccatgaaaatctgatcgaggatttcaactctgggctgattgggcccctgcttatctgtaaaaaagggaccctaactgagggtgggacacagaagacgtttgacaagcaaatcgtgctactatttgctgtgtttgatgaaagcaagagctggagccagtcatcatccctaatgtacacagtcaatggatatgtgaatgggacaatgccagatataacagtttgtgcccatgaccacatcagctggcatctgctgggaatgagctcggggccagaattattctccattcatttcaacggccaggtcctggagcagaaccatcataaggtctcagccatcacccttgtcagtgctacatccactaccgcaaatatgactgtgggcccagagggaaagtggatcatatcttctctcaccccaaaacatttgcaagctgggatgcaggcttacattgacattaaaaactgcccaaagaaaaccaggaatcttaagaaaataactcgtgagcagaggcggcacatgaagaggtgggaatacttcattgctgcagaggaagtcatttgggactatgcacctgtaataccagcgaatatggacaaaaaatacaggtctcagcatttggataatttctcaaaccaaattggaaaacattataagaaagttatgtacacacagtacgaagatgagtccttcaccaaacatacagtgaatcccaatatgaaagaagatgggattttgggtcctattatcagagcccaggtcagagacacactcaaaatcgtgttcaaaaatatggccagccgcccctatagcatttaccctcatggagtgaccttctcgccttatgaagatgaagtcaactcttctttcacctcaggcaggaacaacaccatgatcagagcagttcaaccaggggaaacctatacttataagtggaacatcttagagtttgatgaacccacagaaaatgatgcccagtgcttaacaagaccatactacagtgacgtggacatcatgagagacatcgcctctgggctaataggactacttctaatctgtaagagcagatccctggacaggcgaggaatacagagggcagcagacatcgaacagcaggctgtgtttgctgtgtttgatgagaacaaaagctggtaccttgaggacaacatcaacaagttttgtgaaaatcctgatgaggtgaaacgtgatgaccccaagttttatgaatcaaacatcatgagcactatcaatggctatgtgcctgagagcataactactcttggattctgctttgatgacactgtccagtggcacttctgtagtgtggggacccagaatgaaattttgaccatccacttcactgggcactcattcatctatggaaagaggcatgaggacaccttgaccctcttccccatgcgtggagaatctgtgacggtcacaatggataatgttggaacttggatgttaacttccatgaattctagtccaagaagcaaaaagctgaggctgaaattcagggatgttaaatgtatcccagatgatgatgaagactcatatgagatttttgaacctccagaatctacagtcatggctacacggaaaatgcatgatcgtttagaacctgaagatgaagagagtgatgctgactatgattaccagaacagactggctgcagcattaggaattaggtcattccgaaactcatcattgaaccaggaagaagaagagttcaatcttactgccctagctctggagaatggcactgaattcgtttcttcgaacacagatataattgttggttcaaattattcttccccaagtaatattagtaagttcactgtcaataaccttgcagaacctcagaaagccccttctcaccaacaagccaccacagctggttccccactgagacacctcattggcaagaactcagttctcaattcttccacagcagagcattccagcccatattctgaagaccctatagaggatcctctacagccagatgtcacagggatacgtctactttcacttggtgctggagaattcagaagtcaagaacatgctaagcgtaagggacccaaggtagaaagagatcaagcagcaaagcacaggttctcctggatgaaattactagcacataaagttgggagacacctaagccaagacactggttctccttccggaatgaggccctgggaggaccttcctagccaagacactggttctccttccagaatgaggccctgggaggaccctcctagtgatctgttactcttaaaacaaagtaactcatctaagattttggttgggagatggcatttggcttctgagaaaggtagctatgaaataatccaagatactgatgaagacacagctgttaacaattggctgatcagcccccagaatgcctcacgtgcttggggagaaagcacccctcttgccaacaagcctggaaagcagagtggccacccaaagtttcctagagttagacataaatctctacaagtaagacaggatggaggaaagagtagactgaagaaaagccagtttctcattaagacacgaaaaaagaaaaaagagaagcacacacaccatgctcctttatctccgaggacctttcaccctctaagaagtgaagcctacaacacattttcagaaagaagacttaagcattcgttggtgcttcataaatccaatgaaacatctcttcccacagacctcaatcagacattgccctctatggattttggctggatagcctcacttcctgaccataatcagaattcctcaaatgacactggtcaggcaagctgtcctccaggtctttatcagacagtgcccccagaggaacactatcaaacattccccattcaagaccctgatcaaatgcactctacttcagaccccagtcacagatcctcttctccagagctcagtgaaatgcttgagtatgaccgaagtcacaagtccttccccacagatataagtcaaatgtccccttcctcagaacatgaagtctggcagacagtcatctctccagacctcagccaggtgaccctctctccagaactcagccagacaaacctctctccagacctcagccacacgactctctctccagaactcattcagagaaacctttccccagccctcggtcagatgcccatttctccagacctcagccatacaaccctttctccagacctcagccatacaaccctttctttagacctcagccagacaaacctctctccagaactcagtcagacaaacctttctccagccctcggtcagatgcccctttctccagacctcagccatacaaccatttctctagacttcagccagacaaacctctctccagaactcagccatatgactctctctccagaactcagtcagacaaacctttccccagccctcggtcagatgcccatttctccagacctcagccatacaaccctttctctagacttcagccagacaaacctctctccagaactcagtcaaacaaacctttccccagccctcggtcagatgcccctttctccagaccccagccatacaaccctttctctagacctcagccagacaaacctctctccagaactcagtcagacaaacctttccccagacctcagtgagatgcccctctttgcagatctcagtcaaattccccttaccccagacctcgaccagatgacactttctccagaccttggtgagacagatctttccccaaactttggtcagatgtccctttccccagacctcagccaggtgactctctctccagacatcagtgacaccacccttctcccggatctcagccagatatcacctcctccagaccttgatcagatattctacccttctgaatctagtcagtcattgcttcttcaagaatttaatgagtcttttccttatccagaccttggtcagatgccatctccttcatctcctactctcaatgatacttttctatcaaaggaatttaatccactggttatagtgggcctcagtaaagatggtacagattacattgagatcattccaaaggaagaggtccagagcagtgaagatgactatgctgaaattgattatgtgccctatgatgacccctacaaaactgatgttaggacaaacatcaactcctccagagatcctgacaacattgcagcatggtacctccgcagcaacaatggaaacagaagaaattattacattgctgctgaagaaatatcctgggattattcagaatttgtacaaagggaaacagatattgaagactctgatgatattccagaagataccacatataagaaagtagtttttcgaaagtacctcgacagcacttttaccaaacgtgatcctcgaggggagtatgaagagcatctcggaattcttggtcctattatcagagctgaagtggatgatgttatccaagttcgttttaaaaatttagcatccagaccgtattctctacatgcccatggactttcctatgaaaaatcatcagagggaaagacttatgaagatgactctcctgaatggtttaaggaagataatgctgttcagccaaatagcagttatacctacgtatggcatgccactgagcgatcagggccagaaagtcctggctctgcctgtcgggcttgggcctactactcagctgtgaacccagaaaaagatattcactcaggcttgataggtcccctcctaatctgccaaaaaggaatactacataaggacagcaacatgcctgtggacatgagagaatttgtcttactatttatgacctttgatgaaaagaagagctggtactatgaaaagaagtcccgaagttcttggagactcacatcctcagaaatgaaaaaatcccatgagtttcacgccattaatgggatgatctacagcttgcctggcctgaaaatgtatgagcaagagtgggtgaggttacacctgctgaacataggcggctcccaagacattcacgtggttcactttcacggccagaccttgctggaaaatggcaataaacagcaccagttaggggtctggccccttctgcctggttcatttaaaactcttgaaatgaaggcatcaaaacctggctggtggctcctaaacacagaggttggagaaaaccagagagcagggatgcaaacgccatttcttatcatggacagagactgtaggatgccaatgggactaagcactggtatcatatctgattcacagatcaaggcttcagagtttctgggttactgggagcccagattagcaagattaaacaatggtggatcttataatgcttggagtgtagaaaaacttgcagcagaatttgcctctaaaccttggatccaggtggacatgcaaaaggaagtcataatcacagggatccagacccaaggtgccaaacactacctgaagtcctgctataccacagagttctatgtagcttacagttccaaccagatcaactggcagatcttcaaagggaacagcacaaggaatgtgatgtattttaatggcaattcagatgcctctacaataaaagagaatcagtttgacccacctattgtggctagatatattaggatctctccaactcgagcctataacagacctacccttcgattggaactgcaaggttgtgaggtaaatggatgttccacacccctgggtatggaaaatggaaagatagaaaacaagcaaatcacagcttcttcgtttaagaaatcttggtggggagattactgggaacccttccgtgcccgtctgaatgcccagggacgtgtgaatgcctggcaagccaaggcaaacaacaataagcagtggctagaaattgatctactcaagatcaagaagataacggcaattataacacagggctgcaagtctctgtcctctgaaatgtatgtaaagagctataccatccactacagtgagcagggagtggaatggaaaccatacaggctgaaatcctccatggtggacaagatttttgaaggaaatactaataccaaaggacatgtgaagaactttttcaaccccccaatcatttccaggtttatccgtgtcattcctaaaacatggaatcaaagtattgcacttcgcctggaactctttggctgtgatatttactagaattgaacattcaaaaacccctggaagagactctttaagacctcaaaccatttagaatgggcaatgtattttacgctgtgttaaatgttaacagttttccactatttctctttcttttctattagtgaataaaattttatac

SEQ ID NO: 5954 - protein, 2224 aa, Homo sapien; identical to SEQ ID NO: 1415

SEQ ID NO: 5955 - DNA, 1897 bp, Homo sapien
ctcggagtgtgatctaagcaggtcgcgtaccttcctcaggtgactccggccacagcccattgtccgcggccaccggcggagtttagccgcagacctcgaagcgccccggggtccttcccgaacggcagcggctgcggcgggtccatggagaagggccctgtgcgggcaccggcggggaagccgcggggcgccaggtgcagcaatgggttccccgagcgggatccgccgcggcccgggcccagcaggccggcggagaagcccccgcggcccgaggccaagagcgcgcagcccgcggacggctggaagggcgagcggccccgcagcgaggaggataacgagctgaacctccctaacctggcagccgcctactcgtccatcctgagctcgctgggcgagaacccccagcggcaagggctgctcaagacgccctggagggcggcctcggccatgcagttcttcaccaagggctaccaggagaccatctcagatgtcctaaacgatgctatatttgatgaagatcatgatgagatggtgattgtgaaggacatagacatgttttccatgtgtgagcatcacttggttccatttgttggaaaggtccatattggttatcttcctaacaagcaagtccttggcctcagcaaacttgcgaggattgtagaaatctatagtagaagactacaagttcaggagcgccttacaaaacaaattgctgtagcaatcacggaagccttgcggcctgctggagtcggggtagtggttgaagcaacgaagtcaaataaatataataaagggttgagccctctactttcttcttgccacctttttgtggcaatattaaagtgaactgctaatagtgtctgcagaaccatagcttccacgcacctgaacgagcacagaatgaactgacggtggaagacattatgagctgtgtccaacgttttaaccaaagcgtatcgtaccaacgatctgtgaaaatgcactggaagcttctggtcccggtttcctttgtggtctatgtgggtcttgtcctcattgtaactccgtatagatggtataggtattttaatcctggaagctgttgccttattaatgattatcttaaaatttcctccattggggcagcgtgggccaaattaaaacaaacaaaaccgcaactcctccacagaaacacaaacacagttattccatgaagtttagtatttggttgacatagtgctcttcaaattcatcccattaccctaaaagtaataactttgatgcttgctttaactttagtcccatctctgccactttgatgctatttgggttatgatggggcaagatggcagaggtattgggtttttttgtttttttccattcctctctacttctgtttcctagctttttctttctggagtttaagtacagtgatggttggcttgagtacctttttaaatctagcccagtataaacattagcctgcttaatatttagacatttataggtagaattctgagcactcaactcatgtttggcattttaaagtaaaaacaagtgtgacttcgaggaccaaagaaattgtcagctatacatttatctttatgaactcatttatattcctttttaatgactcgttgttctaacatttcctagaagtgttcttataaaggtctaatgtatccacaggctgttgtcttattagtaaatgcaaagtaatgactttgtctgttttactctagtctttagtacttcaaaattaccttttcatatccatgatcttgagtccatttgggggatttttaagaatttgatgtatttcaatacactgttcaaaattaaattgtttaattttatgtatgagtatgtatgttcctgaagttggtcctatttaaattattaaactattgtaactttg

SEQ ID NO: 5956 - protein, 233 aa, Homo sapien [sequence omitted]

SEQ ID NO: 5957 - DNA, 2068 bp, Homo sapien; identical to SEQ ID NO: 1872

SEQ ID NO: 5958 - protein, 524 aa, Homo sapien; identical to SEQ ID NO: 1873

SEQ ID NO: 5959 - DNA, 12436 bp, Homo sapien
cccttctgtaggggcagagaggttctacttcattactgcgtctcctgggaaggccatcaggactgctggctaaagtgggaaccaggactctttgtgagttaagaatttgtgtatttatatgtgtgttatacacattttttaaaaaactgtaacgacatcaggttgagcagtcgtctccgggtggtgaattatgtgtatttttaaattttatactatattgttatttttcaaatgttcgaaattgaatatgtagattgttgttatcagcagaaaaataaacattattcaaatactctattcagtaaagtaatttattgggcgcctttgtcaagcacgcatttgcctagatgtgactctacagataaaattcacttggggcctccccttacagacaatcaggcagtggagactgagtgcctgaatggatagaccagcactcagaccactattttcagtatctgtttttcttaactcagggccgtggttttcaaacgtttttcgccttacggtcacccttagggtcccccgagaccggcccagacagacagatatacaaaaacacatacacagtcatgagcgtccaccatttccccaccaggcgcagcacaggcggcttcccggcactgagatgggggggaggagggagagagcgcgaggggggaggggaaagcagagaacgaaagaggcggaggcggcccccgaaccccgctctggtcttcatcatcaccacccctgggtccccagttcccacccacacaccaacctctaacgataccgggtaattttcctccttcttccctcaaacggctatagcgagacggtagacgacgaccagaactacttctgctcacgtaagcgagtaatcacgtgagcgcctacgtcatgtgagatctcggtcacgtgagcaactctcggcttaaactcgggatcactaaggtgccgcacttccttctggtatggaaatagggcgggtcaatatcaagaaaggaagagggtgattggttagcggaacgtcttacgtgactgattattggtctacctctggggataaccgtcccagttgccagagaaacaataacgtcattatttaataagtcatcggtgattggtccgcccctgaggttaatcttaaaagcccaggttacccgcggaaatttatgctgtccggtcaccgtgacaatgcagctgaggaacccagaactacatctgggctgcgcgcttgcgcttcgcttcctggccctcgtttcctgggacatccctggggctagagcactggacaatggattggcaaggacgcctaccatgggctggctgcactgggagcgcttcatgtgcaaccttgactgccaggaagagccagattcctgcatcaggtatcagatattgggtactcccttccctttgcttttccatgtgtttgggtgtgtttggggaactggagagtctcaacgggaacagttgagcccgagggagagctcccccacccgactctgctgctgcttttttatccccagcaaactgtcccgaatcaggactagccctaaactttctctgtgtgacctttcctgggatgggagtccggccagcggcccctgtttctttctctctctctctctctctcgttctccttctctttctctttctcttctttcctctctctttctctctctccctgcccggttctcttttttcactgctccttgcagagcagggccaccccataggcagtgtgcccaaagtagccctgcccggttctattcagacccttcttgtgaacttctgctcttcctctgccgggtgctaaccgttagaacatctagggtgggtaggaggaatggggaactaagattcgtgccattttttctccttttggggtcgtggatttctcggcagtatctcgagggagttagagagaccataaggtcgctgagatctctcccacctcgcccatgagcgtggcatcaggctggaaggttgacatggaggaactttatacatttacacctttgcgtgagggttgaggctggattagataggtattgaacatatctgaccctcacaatccttatctgtaaattgggattacaaccttttaatttcagggagctgacaaaaaaaatctgaaaaatagttcttatctcacacaggtgagttttcaaggagataacctatttaaagtacatagcacagcgcttgaccattcaactgcgcttacagagcaaatgttcaatgggaaaatgaatgtaaatctacaaatctgaatgaatatgtgtatttttctggagagaggatatttacctttcttcaaattctcaaagggctctgtgatttaaaaaaggttaggaatcactgatagatgttggtaaaaggtggcagtcacagtacatttctgtgtccataagttattcctatgaatatctttatagataaagtcaggatgttggtcagacatcacagaagaaattggccttgtaagtttcatgtgaccctgtggtacagtatgtgtggcaattttgcccatcacggatttttttttattggtatttgcatctgattataaaactaatgcatgatcattgcaaaaaatgtagataaagaagagcaaaatgaaaataaagatttccccccaccgttccaccacccagaaataatcatggtttaaatgttaatatacaaccttacaattgttttctatataaatgaaaacatagatttctttatttcattattttccataaaaaatggatcatgtttatgtcatgtttggctaatggcaagaccctggcacccagtctgggctcaaattctgcctcattgttacttagccctgtgacattgggtaaattacactttttttttttttttttttttgagacggggtctcgctctgtcgcccaggctggagtgcagtggcacgatctcggctcactgcaagtccgcctcctgggttcacgccattcttctgcctcagcctcccgagtagctgggactacaggcgcctgccaccacgcctggctctttttttttttttttttttttttagtacagacggggtttcaccatgttagccagggtggtctcaatctcctgacctcgtgattcgcccgcctcagcctcccaaagtgctggtgtgagccaccgtgcccagccttacttttttttttgagagggggtctcactctgtcacccaggttggagtgcagtggcgcgatctctgctcagtgcaaactccacctcccgggtttaagcagttctcctgtcgtagtctcctgagtagctgggattacaggcacaccaccacggccagctaatttttgtattttcagtagagacgggtttcaccatgttgcccaagctggtctcgaactcctggcctcaagtgatctgcccgccttggcctcccagagtgctgggattacaggtgtgagccaccgcacccggcctcttttttcttttttagtctatcataccttgcaaatacagtggttcttcctatgtgttggttttgatatttatgtaatcaaacacatcagtttttcctttctgatttctgactttggggtcatgctgagaaagtcctttcctacctgaagataatacagtatatacgtttcttactagtatttttgtggatttttaaaatatttaaatctttagtccatctgaacttgttcttctatcagaaatgccacatttaataaataataagtcccatggtatcagatggctggaaggacctctttcgaaactttgtttaattccattaatctgtgtattcttattctaatgctaatagttccacactagcttcctttatcttttttttctttttttttttttttttgagctggagtttcgctcttgttgcccaggctggagtacaatgtcacgatctcggttcaccgcaacctccgcctcccaggttcaagcaattctcctgcctcatcctcgcgagtagctggaattacaggcatgcgccaccacgcctagctattttgtatttttagtagagatggggtttctccatgttggtcaggctggtctcaaactcccagcctcaggtgatctgcctgcctcggcctcccaaaatgctgttattacaggcgtgagccaccacgcccagccttcatcttttaatgaatgtacatgtatgtaatcttttaggtgaactttttgtaatgttgtgccaagttccttaaaaagcccttttggaagctgggcaggtggccacgcctgtaatcccagcattttgggagtctgaggcaggtggatcacttgaggccaggagttcaagactagcctagccaaaatgcaaaaccctgtctctactaaagatacaaaaattagccggatgcgatggcacatgcctgtaatctcagctactcgggaggctgaggtagaagaatcgcttgaaccggggaggcagaggttgcagtgagcaagatggcgccactgcactccagcctgggtgacagagggagactccatctcaaaaaaaaaaaaaaaaaaaaagataaaaaggaaacctaagtactcttgggctttgttaaggattttgttaaatatacaaaggattgcagggaaaattaacttatttttaatattgagtatgcttatccaagagcaaaataatatttctccatttattcaaatcatttaggagcatcatagttttaacatatgggccttgcacgtatcttaaatttatctctaggcattttaggttgttcagttgttcttgtgaatgggatctttttctccaaataggattattgttgatatctgttgattatgttaactttgtagtttctgactttactgaactgtcttcttagatctaatactcttttcaatttcatcatatatttctcattcctattttgtttggggtttttagggcgggaatattaacgggataagagagacaaaagaaaatctggaaaaacaattcattttaccttacattgcttgtgattactaccacactattactgggttggaaaaaattgtgaaatcccaaggtgcctaataaatgggaggtacctaagtgttcatttaatgaattgtaatgattattggaatttctctttcagtgagaagctcttcatggagatggcagagctcatggtctcagaaggctggaaggatgcaggttatgagtacctctgcattgatgactgttggatggctccccaaagagattcagaaggcagacttcaggcagaccctcagcgctttcctcatgggattcgccagctagctaattatgtgagtttatagataatgttcttgttcattcagaggactgtaagcacttctgtacagaagcttgtttagaaacagccctcatggccgggcgtggtggctcacgctgtaatcccaacactttgggaggccgaggcgggtggatcacctgaggtcaagagttcaagaccagcctggccaacatggtgaaaccccaactctattaaaagtacaaaaaattagctgggcatggtggtgaacgcctgtaaccccagctacttgggaggctgaggcaggagaatcgcttgaacccaggaggtggaagtttcagtgagctgagatcacgccattgcactctagcctgggcaacaaaagagaaactccatctcaaaaaaaaaaacaaggaaaaaaagaaacagccctcatgacacttagaaagtagaatagctggctgttatctgaacattgaattgtaaggcttatcaggtggactttgcattccatcagcagacaatttttttttttttttttttttgagatggagtctcattctgtctcccaggctggagggcagtggtgcgatctcggctcactgcaagctccacctcctgggttcatgccattctcctgcctcagcctcccaagtagctgggaccacaggcacccgccaccatgcccagttaattttttgtatttttagtagagacggggtttcaccatgttagccaagatggtctcgatctcctgacctcgtgatccgcccacctcggcctcccaaagtgctgggattacaggcatgagccaccgcgcctagcctacaaatgttttgtaatagctcttgaggcccatcttggagttctccttttgctaaaaccactgaactctctaggaggaaaaaggaacttggttcttgacatatgtgtgcatgtatttccatataacctttaggaagctattgcaatggtactataaactagaattttagaagatagaaggaaaatattctggagatcattgaagagaaatggagtccaacactagttaaagatgatgaagacagatttttttttttgacggagtctcgctctgtcgcccaggctggagtgcagtggcacaatctcagctcactgcaaccctccacctcttgggttcaagtgattctcctgcctcagcctcccaagtagctgggactacaggcgcacaccaccacgcccggctaatttttgtatttttagtagagacaaggtttcaccatattcgccaggctggtctcgaactcctgaccttgtaatccgcccaccttggcctcccaaagtgctgggattacaggcatgagccaccacgcccggccgatgaagacagattttattcagtactaccacagtagaggaaagagccaagttcaattccaaatacaacaaagacaggtggagatttatagccaatgagcagattgagggggtcagtggatggaatatttaagaagacatcaagggtagggagcttcttgctaaagcttcatgtacttaaacaagaagggtgggggatgagggaaattgatcagatatcaatggtggcagtattgacttagcaggattcttgctaagaggtcttgctaggacagacataggaagccaaggtggaggtctagtcgaaaagaaggctcatcagagaagtctaactaaagtttggtcaagaagagtctttgtcaaggtaaatctatcatttccctcaaaaggtaattttcaggatcccatcaggaagattagcatggctgctagctttctcctcagttctgggctatagctcacatgcctagtttgaactagctcagcagaactgggggatttattctttgtcttccaacaaactcatctggatgattttgggggtttgtggggaaaagcccccaatacctggtgaagtaaccttgtctcttcccccagcctggaatggttctctctttctgctacctcacgattgtgcttctacaatggtgactcttttcctccctctcatttcaggttcacagcaaaggactgaagctagggatttatgcagatgttggaaataaaacctgcgcaggcttccctgggagttttggatactacgacattgatgcccagacctttgctgactggggagtagatctgctaaaatttgatggttgttactgtgacagtttggaaaatttggcagatggtaatgtttcattccagagatttagccacaaaggaaagaactttgaggccatggtagctgagccaaagaaccaatcttcagaattttaaataccctgtcacaatactggaaataattattctccatgtgccagagctcccatctcttctctttcagttcattaattaattaattaattcatgtaaaatccatgcatacctaaccatagctaatattgtgcacttataattcaagagggctctaagagttaattagtaattgtaactctctataacatcatttaggggagtccaggttgtcaatcggtcacagagaaagaagcatcttcattcctgcctttcctcaatatacacaccatctctgcactacttcctcagaacaatcccagcagtctgggaggtactttacacaatttaagcacagagcaactgcctgtccctgctgctagtttaaacatgaaccttccaggtagcctcttcttaaaatatacagccccagctgggcatgatggctcatgcctgtaatcctagcactttgggaggctgaggcgggtggattacttgaggtcaggagttcgagaccaccctggccaacatggtgaaaccccatctctagtaaaaatacaaaaattagctgactttggtggcacatgcctgtaatcccagctacttgggaagctgagacagaagagtcacttgaacctgggaaacagaggttgcagtgagccaagatcgcaccactgcactccaccctggatgacagactgaaccccatctcaaaaaattaaaataaaataaaataaaataactatatatatagccccagctggaaattcatttctttcccttattttacccattgttttctcatacaggttataagcacatgtccttggccctgaataggactggcagaagcattgtgtactcctgtgagtggcctctttatatgtggccctttcaaaaggtgagatagtgagcccagaatccaatagaactgtactgatagatagaacttgacaacaaaggaaaccaaggtctccttcaaagtccaacgttacttactatcatcctaccatctctcccaggttccaaccacttctcaccatccccactgctgtaattatagcctaagctaccatcacctggaaagtcatccttgtgtcttcccctttatttcaccattcatgtcctgtctatcaacagtccttccaccagtatctctaaaatatctcctgaatcagcccacttccttccatcttcactacatgcaccctggccttccaagctactatcggctctcaaccagactgctgggaccacctgatctctctgcttccactctgtctcaacccccatctattttccaagcagcactagagttatcatattaaaatgtaaatatcagttttttttttaaagaaaaaaaccctgagacttaacagagttataaaaaatataaatgtcatcatcagttccctgcttaaaacccttaactcgcttccaattgcacttggaatgaaaccaaactgcactgatccagcccttgcctgcctccccaaagtccaaggggtcatggctctttccctggctacactggttttctttctgtccctcaacactgcaagcctattgctgccccagggcctttacacttgctttttttctgcctagaacagttcttccccaaagatttttaaagggccgggctccttaacattgaagtcgcagaccaaacgccacatatgcagacagttcttctctaactactttaaaatagccctctgtccattcattcttcatcacattaacctgtttaattttcttctcagagctccacactatttggaagtatttgttgacttgttaccatgtctccccactagagtgtaagtttcatgagggcagggaccttgtctgactttgactgtatctctcgcatatggttaagtgttaaatagttatttatggaatgaatccctattattccctcattatctctgcaaaatagtcttttttctcaacatcttaaacctgatatcccacctgcctatctacaaactttttttttgcgacagagtctcactgtcacccaggctagagtgcagtggcgccatctcggctcactgcaacctccgcctcccgggtttaagcgattctcttgcctcagcctcccagtagctgggattataggcgtgcgctaccacatctggctaatttttgtatttttagtagagatggtttcaccatgttggccaggcttgtctcgaactcctgacctcagatgatccacctgcctcggcctcccaaagtgctgggattacaggcatgagccaccgtgcccagcctctacaaactttttattccattaacaaactatatgctgggatttaagttttcttaatacttgatggagtcctatgtaattttcgagcttttaattttactaagaccattttagttctgattatagaagtaaattaactttaagggatttcaagttatatggcctacttctgaagcaaacttcttacagtgaaaattcattataagggtttagacctccttatggagacgttcaatctgtaaactcaagagaaggctacaagtgcctcctttaaactgttttcatctcacaaggatgttagtagaaagtaaacagaagagtcatatctgttttcacagcccaattatacagaaatccgacagtactgcaatcactggcgaaattttgctgacattgatgattcctggaaaagtataaagagtatcttggactggacatcttttaaccaggagagaattgttgatgttgctggaccagggggttggaatgacccagatatggtaaaaacttgagccctccttgttcaagaccctgcggtaggcttgtttcctattttgacattcaaggtaaatacaggtaaagttcctgggaggaggctttatgtgagagtacttagagcaggatgctgtggaaagtggtttctccatatgggtcatctaggtaactttaagaatgtttcctcctctcttgtttgaattatttcattctttttctcagttagtgattggcaactttggcctcagctggaatcagcaagtaactcagatggccctctgggctatcatggctgctcctttattcatgtctaatgacctccgacacatcagccctcaagccaaagctctccttcaggataaggacgtaattgccatcaatcaggaccccttgggcaagcaagggtaccagcttagacaggtaaataagagtatatattttaagatggctttatatacccaataccaactttgtcttgggcctaaatctatttttttcccttgctcttgatgttactatcagtaataaagcttcttgctagaaacattactttatttccaaaataatgctacaggatcattttaatttttcctacaagtgcttgatagttctgacattaagaatgaatgccaaactaacagggccacttatcactagttgctaagcaaccacactttcttggtttttcagggagacaactttgaagtgtgggaacgacctctctcaggcttagcctgggctgtagctatgataaaccggcaggagattggtggacctcgctcttataccatcgcagttgcttccctgggtaaaggagtggcctgtaatcctgcctgcttcatcacacagctcctccctgtgaaaaggaagctagggttctatgaatggacttcaaggttaagaagtcacataaatcccacaggcactgttttgcttcagctagaaaatacaatgcagatgtcattaaaagacttactttaaaatgtttattttattgccaactactacttcctgtccacctttttctccattcactttaaaagctcaaggctaggtggctcatgcctgtaatcccagcactttgggaggctgaggcgggcagatcacctgaggtcgggactttgagacccgcctggacaacatggtgaaaccccatttctaataaaaatataaaaattagccaggtgtggtggcgcacctgtggtcccagctactctgggggctgaggcatgagaatcgcttgaacccgggagtggaggttgcattgagctgagatcatgccacctcactccagcctgggcaacaaagattccatctcaaaaaaaaaaaaaaagccaggcacagtggctcatgcctggaatcccagcacttttggaagctgaggcaggcagatcacttgaggttaggatttcaagaccagcctggctaacatagtaaagccctgtctctactaaaaatacaaaaattagccaggtatggtggcgagcttctgtagccccagctactcaggagactgaggcaggagaatcacttgaacccgggaagtgggggggtgcagtgacccaagatcacgccactgcattccagcctgggcaacagagcaagactccatctcaaaaaaaaaagttctatttccttgaataaaattttccgaagtttaaactttaggaataaaactattaaacccgtatttactcatccagatacccaccccccttgttgagattctctcccaattatcaaaatgtgtagcatatttaactaccaagagctaaacatcattaagactgaaatgtattaagaaggatgtataggccaggcacggtgtctcacgcctgtaatcccaacactttgggaggccaagtcgggcggatcacgaggtcaggagatggagaccatcctggccaacatggtgaaaccccctctctactaaaaatacaaaaattagccaggcaggtggcaggcacctgtaatcccagctactccagaggctgaggcaggacaatcacttgaacctgggaggcagaggctgcagtgagctgaggttgtaccaattgcactccagcctaggtaacgagcaacactccatctcaaaaaaagaaaaaaaaaaagatgtataatttggaactgttaagaggcattttaaaga

SEQ ID NO: 5960 - DNA, 3053 bp, Homo sapien
ggcacgaggaaaacatgttcgagttctgggattgggtgggaggacgctactcgctgtggtcggccatcggactctccattgccctgcacgtgggttttgacaacttcgagcagctgctctcgggggctcactggatggaccagcacttccgcacgacgcccctggagaagaacgcccccgtcttgctggccctgctgggtatctggtacatcaactgctttgggtgtgagacacacgccatgctgccctatgaccagtacctgcaccgctttgctgcgtacttccagcagggcgacatggagtccaatgggaaatacatcaccaaatctggaacccgtgtggaccaccagacaggccccattgtgtggggggagccagggaccaatggccagcatgctttttaccagctcatccaccaaggcaccaagatgataccctgtgacttcctcatcccggtccagacccagcaccccatacggaagggtctgcatcacaagatcctcctggccaacttcttggcccagacagaggccctgatgaggggaaaatcgacggaggaggcccgaaaggagctccaggctgcgggcaagagtccagaggaccttgagaggctgctgccacataaggtctttgaaggaaatcgcccaaccaactctattgtgttcaccaagctcacaccattcatgcttggagccttggtcgccatgtatgagcacaagatcttcgttcagggcatcatctgggacatcaacagctttgaccagtggggagtggagctgggaaagcagctggctaagaaaatagagcctgagcttgatggcagtgctcaagtgacctctcacgacgcttctaccaatgggctcatcaacttcatcaagcagcagcgcgaggccagagtccaataaactcgtgctcatctgcagcctcctctgtgactcccctttctcttctcgtccctcctccccggagccggcactgcatgttcctggacaccacccagagcaccctctggttgtgggcttggaccacgagcccttagcagggaaggctggtctcccccagcctaacccccagcccctccatgtctatgctccctctgtgttagaattggctgaagtgtttttgtgcagctgacttttctgacccatgttcacgttgttcacatcccatgtagaaaaataaagatgccacggaggaggttgtaggctcagcctctgattttttttttcctgtgatggtgctttatgtagcagagggcaggagcgctcagcaggacgcaggctgtgcctctgcggacacttaacactaagtggtgagcgggtctagagtggagcaaggtgccctgagaagacaatagtggggtgggggcacaatcagtcaggacggcaacttggcctgtgtcaccaaatcccaagactgttttccactcctcacctctgtgactggagaaattggatactctgttcactcgatggttctaaaaactgcattgagattatgtttgtttcgggtgaattcctggacaagaccgaggatgactgccatctcctggcaagacgctcaggtagttcttttgctttaaaaggcagatattgaaaactggaattttttttttttgagtctcgctctgtcacccagactggagtgcagtggtgcaatctcggctcactgcaacctccgcctcccgggttcaagctattctcctgcctcagcctcccgagtagctgggattacacggcgcacaccaccatacccagctaatttttgtatttttagtagtgaaggggttttaccatgttgggcaggctggtcttgaactcctgacctcaggtgatctgcccgcctcagcctcccacagtgctgggattacaggtatgagccaccacgcccggcccattttttttttttttttgacaacttttttttttttttgagacagggtcttgttccattgcccagactggagtgcagtggcatgatcacagctcactgcagccagtaatcctcttgcctcagcctcccaagtagttgagactacaggttgtaccactatgccctgctagttttttcattttttgtagagagacgggtcttttttttttttgagacggagtctcgctctgtcgcccaagctggagtgcagtagcacggtctcagctcattgcaagctccgcctcccaggttcacgccattctcctgcctcagactcctgtgtagctgggagtacaggcacctgccaccatgcccggctaattttttatatatttttttagcagagacagtgtctcactgtgttagtcaggatggtctcgatctcctgacctcgtgatccgcccgcctcagcctcccaaagtgctgggattacaggcgtgagccaccgcgcccagcaaggcgggtcttgctgtgtttcccagactagactggtcttgaattccagggctcaagagatctcccacctcagcctcccacagtgctgggattacaggcgtgagccgccacacccagcctattcaaaatttttttttcttagagacagggtctttgttgcccaggctggactgcagtgatacaatcatagctgactgaagcctcaaattcccaggctaaggtgatcttctcacctcagccttccaagtagctgggtccgcagatgcatgccagtacacccagctcatttaaaaaaaaatttttttcttttttgagagtcttgctttgttgcccaggctggagtgcagtggtgtgatctcggctcactgcaagctccacctcccggcttcacgccattctcctgcctcagcctcccgagtagctgggactacaggtgcccgccaccacacccggctaattttttgtatttttagtagagacggggtttcaccgtgttagccaggatggtcttgatctcctgacctcatgatccgcctgctttggcctcccaaagtgctgggattacaggcgtgagtcaccgcgcccggctcattttaaaatttttgtagatcagtgtactgttgtaaaaaaaaaaaaaaaaaaaaaaaaaaaaaaaaaaaaaaaaa

SEQ ID NO: 5961 - DNA, 1331 bp, Homo sapien
tcttgctgcgcctccgcctcctcctctgctccgccaccggcttcctcctcctgagcagtcagcccgcgcgccggccggctccgttatggcgacccgcagccctggcgtcgtgattagtgatgatgaaccaggttatgaccttgatttattttgcatacctaatcattatgctgaggatttggaaagggtgtttattcctcatggactaattatggacaggactgaacgtcttgctcgagatgtgatgaaggagatgggaggccatcacattgtagccctctgtgtgctcaaggggggctataaattctttgctgacctgctggattacatcaaagcactgaatagaaatagtgatagatccattcctatgactgtagattttatcagactgaagagctattgtaatgaccagtcaacaggggacataaaagtaattggtggagatgatctctcaactttaactggaaagaatgtcttgattgtggaagatataattgacactggcaaaacaatgcagactttgctttccttggtcaggcagtataatccaaagatggtcaaggtcgcaagcttgctggtgaaaaggaccccacgaagtgttggatataagccagactttgttggatttgaaattccagacaagtttgttgtaggatatgcccttgactataatgaatacttcagggatttgaatcatgtttgtgtcattagtgaaactggaaaagcaaaatacaaagcctaagatgagagttcaagttgagtttggaaacatctggagtcctattgacatcgccagtaaaattatcaatgttctagttctgtggccatctgcttagtagagctttttgcatgtatcttctaagaattttatctgttttgtactttagaaatgtcagttgctgcattcctaaactgtttatttgcactatgagcctatagactatcagttccctttgggcggattgttgtttaacttgtaaatgaaaaaattctcttaaaccacagcactattgagtgaaacattgaactcatatctgtaagaaataaagagaagatatattagttttttaattggtattttaatttttatatatgcaggaaagaatagaagtgattgaatattgttaattataccaccgtgtgttagaaaagtaagaagcagtcaattttcacatcaaagacagcatctaagaagttttgttctgtcctggaattattttagtagtgtttcagtaatgttgactgtattttccaacttgttcaaattattaccagtgaatctttgtcagcagttcccttttaaatgcaaatcaataaattcccaaaaattt

SEQ ID NO: 5962 - protein, 218 aa, Homo sapien
MATRSPGVVISDDEPGYDLDLFCIPNHYAEDLERVFIPHGLIMDRTERLARDVMKEMGGHHIVALCVLKGGYKFFADLLDYIKALNRNSDRSIPMTVDFIRLKSYCNDQSTGDIKVIGGDDLSTLTGKNVLIVEDIIDTGKTMQTLLSLVRQYNPKMVKVASLLVKRTPRSVGYKPDFVGFEIPDKFVVGYALDYNEYFRDLNHVCVISETGKAKYKA

SEQ ID NO: 5963 - DNA, 3003 bp, Homo sapien
gctataaggatcacgcgccccagtcgacgctgagctcctctgctactcagagttgcaacctcagcctcgctatggctcccagcagcccccggcccgcgctgcccgcactcctggtcctgctcggggctctgttcccaggacctggcaatgcccagacatctgtgtccccctcaaaagtcatcctgccccggggaggctccgtgctggtgacatgcagcacctcctgtgaccagcccaagttgttgggcatagagaccccgttgcctaaaaaggagttgctcctgcctgggaacaaccggaaggtgtatgaactgagcaatgtgcaagaagatagccaaccaatgtgctattcaaactgccctgatgggcagtcaacagctaaaaccttcctcaccgtgtactggactccagaacgggtggaactggcacccctcccctcttggcagccagtgggcaagaaccttaccctacgctgccaggtggagggtggggcaccccgggccaacctcaccgtggtgctgctccgtggggagaaggagctgaaacgggagccagctgtgggggagcccgctgaggtcacgaccacggtgctggtgaggagagatcaccatggagccaatttctcgtgccgcactgaactggacctgcggccccaagggctggagctgtttgagaacacctcggccccctaccagctccagacctttgtcctgccagcgactcccccacaacttgtcagcccccgggtcctagaggtggacacgcaggggaccgtggtctgttccctggacgggctgttcccagtctcggaggcccaggtccacctggcactgggggaccagaggttgaaccccacagtcacctatggcaacgactccttctcggccaaggcctcagtcagtgtgaccgcagaggacgagggcacccagcggctgacgtgtgcagtaatactggggaaccagagccaggagacactgcagacagtgaccatctacagctttccggcgcccaacgtgattctgacgaagccagaggtctcagaagggaccgaggtgacagtgaagtgtgaggcccaccctagagccaaggtgacgctgaatggggttccagcccagccactgggcccgagggcccagctcctgctgaaggccaccccagaggacaacgggcgcagcttctcctgctctgcaaccctggaggtggccggccagcttatacacaagaaccagacccgggagcttcgtgtcctgtatggcccccgactggacgagagggattgtccgggaaactggacgtggccagaaaattcccagcagactccaatgtgccaggcttgggggaacccattgcccgagctcaagtgtctaaaggatggcactttcccactgcccatcggggaatcagtgactgtcactcgagatcttgagggcacctacctctgtcgggccaggagcactcaaggggaggtcacccgcaaggtgaccgtgaatgtgctctccccccggtatgagattgtcatcatcactgtggtagcagccgcagtcataatgggcactgcaggcctcagcacgtacctctataaccgccagcggaagatcaagaaatacagactacaacaggcccaaaaagggacccccatgaaaccgaacacacaagccacgcctccctgaacctatcccgggacagggcctcttcctcggccttcccatattggtggcagtggtgccacactgaacagagtggaagacatatgccatgcagctacacctaccggccctgggacgccggaggacagggcattgtcctcagtcagatacaacagcatttggggccatggtacctgcacacctaaaacactaggccacgcatctgatctgtagtcacatgactaagccaagaggaaggagcaagactcaagacatgattgatggatgttaaagtctagcctgatgagaggggaagtggtgggggagacatagccccaccatgaggacatacaactgggaaatactgaaacttgctgcctattgggtatgctgaggccccacagacttacagaagaagtggccctccatagacatgtgtagcatcaaaacacaaaggcccacacttcctgacggatgccagcttgggcactgctgtctactgaccccaacccttgatgatatgtatttattcatttgttattttaccagctatttattgagtgtcttttatgtaggctaaatgaacataggtctctggcctcacggagctcccagtccatgtcacattcaaggtcaccaggtacagttgtacaggttgtacactgcaggagagtgcctggcaaaaagatcaaatggggctgggacttctcattggccaacctgcctttccccagaaggagtgatttttctatcggcacaaaagcactatatggactggtaatggttcacaggttcagagattacccagtgaggccttattcctcccttccccccaaaactgacacctttgttagccacctccccacccacatacatttctgccagtgttcacaatgacactcagcggtcatgtctggacatgagtgcccagggaatatgcccaagctatgccttgtcctcttgtcctgtttgcatttcactgggagcttgcactattgcagctccagtttcctgcagtgatcagggtcctgcaagcagtggggaagggggccaaggtattggaggactccctcccagctttggaagcctcatccgcgtgtgtgtgtgtgtgtgtatgtgtagacaagctctcgctctgtcacccaggctggagtgcagtggtgcaatcatggttcactgcagtcttgaccttttgggctcaagtgatcctcccacctcagcctcctgagtagctgggaccataggctcacaacaccacacctggcaaatttgattttttttttttttttcagagacggggtctcgcaacattgcccagacttcctttgtgttagttaataaagctttctcaactgcc

SEQ ID NO: 5964 - protein, 532 aa, Homo sapien
MAPSSPRPALPALLVLLGALFPGPGNAQTSVSPSKVILPRGGSVLVTCSTSCDQPKLLGIETPLPKKELLLPGNNRKVYELSNVQEDSQPMCYSNCPDGQSTAKTFLTVYWTPERVELAPLPSWQPVGKNLTLRCQVEGGAPRANLTVVLLRGEKELKREPAVGEPAEVTTTVLVRRDHHGANFSCRTELDLRPQGLELFENTSAPYQLQTFVLPATPPQLVSPRVLEVDTQGTVVCSLDGLFPVSEAQVHLALGDQRLNPTVTYGNDSFSAKASVSVTAEDEGTQRLTCAVILGNQSQETLQTVTIYSFPAPNVILTKPEVSEGTEVTVKCEAHPRAKVTLNGVPAQPLGPRAQLLLKATPEDNGRSFSCSATLEVAGQLIHKNQTRELRVLYGPRLDERDCPGNWTWPENSQQTPMCQAWGNPLPELKCLKDGTFPLPIGESVTVTRDLEGTYLCRARSTQGEVTRKVTVNVLSPRYEIVIITVVAAAVIMGTAGLSTYLYNRQRKIKKYRLQQAQKGTPMKPNTQATPP

SEQ ID NO: 5965 - DNA, 5629 bp, Homo sapien
gcgcgaccgtcccgggggtggggccgggcgcagcggcgagaggaggcgaaggtggctgcggtagcagcagcgcggcagcctcggacccagcccggagcgcagggcggccgctgcaggtccccgctcccctccccgtgcgtccgcccatggccgccgccgggcagctgtgcttgctctacctgtcggcggggctcctgtcccggctcggcgcagccttcaacttggacactcgggaggacaacgtgatccggaaatatggagaccccgggagcctcttcggcttctcgctggccatgcactggcaactgcagcccgaggacaagcggctgttgctcgtgggggccccgcgcggagaagcgcttccactgcagagagccaacagaacgggagggctgtacagctgcgacatcaccgcccgggggccatgcacgcggatcgagtttgataacgatgctgaccccacgtcagaaagcaaggaagatcagtggatgggggtcaccgtccagagccaaggtccagggggcaaggtcgtgacatgtgctcaccgatatgaaaaaaggcagcatgttaatacgaagcaggaatcccgagacatctttgggcggtgttatgtcctgagtcagaatctcaggattgaagacgatatggatgggggagattggagcttttgtgatgggcgattgagaggccatgagaaatttggctcttgccagcaaggtgtagcagctacttttactaaagactttcattacattgtatttggagccccgggtacttataactggaaagggattgttcgtgtagagcaaaagaataacactttttttgacatgaacatctttgaagatgggccttatgaagttggtggagagactgagcatgatgaaagtctcgttcctgttcctgctaacagttacttaggtttttctttggactcagggaaaggtattgtttctaaagatgagatcacttttgtatctggtgctcccagagccaatcacagtggagccgtggttttgctgaagagagacatgaagtctgcacatctcctccctgagcacatattcgatggagaaggtctggcctcttcatttggctatgatgtggcggtggtggacctcaacaaggatgggtggcaagatatagttattggagccccacagtattttgatagagatggagaagttggaggtgcagtgtatgtctacatgaaccagcaaggcagatggaataatgtgaagccaattcgtcttaatggaaccaaagattctatgtttggcattgcagtaaaaaatattggagatattaatcaagatggctacccagatattgcagttggagctccgtatgatgacttgggaaaggtttttatctatcatggatctgcaaatggaataaataccaaaccaacacaggttctcaagggtatatcaccttattttggatattcaattgctggaaacatggaccttgatcgaaattcctaccctgatgttgctgttggttccctctcagattcagtaactattttcagatcccggcctgtgattaatattcagaaaaccatcacagtaactcctaacagaattgacctccgccagaaaacagcgtgtggggcgcctagtgggatatgcctccaggttaaatcctgttttgaatatactgctaaccccgctggttataatccttcaatatcaattgtgggcacacttgaagctgaaaaagaaagaagaaaatctgggctatcctcaagagttcagtttcgaaaccaaggttctgagcccaaatatactcaagaactaactctgaagaggcagaaacagaaagtgtgcatggaggaaaccctgtggctacaggataatatcagagataaactgcgtcccattcccataactgcctcagtggagatccaagagccaagctctcgtaggcgagtgaattcacttccagaagttcttccaattctgaattcagatgaacccaagacagctcatattgatgttcacttcttaaaagagggatgtggagacgacaatgtatgtaacagcaaccttaaactagaatataaattttgcacccgagaaggaaatcaagacaaattttcttatttaccaattcaaaaaggtgtaccagaactagttctaaaagatcagaaggatattgctttagaaataacagtgacaaacagcccttccaacccaaggaatcccacaaaagatggcgatgacgcccatgaggctaaactgattgcaacgtttccagacactttaacctattctgcatatagagaactgagggctttccctgagaaacagttgagttgtgttgccaaccagaatggctcgcaagctgactgtgagctcggaaatccttttaaaagaaattcaaatgtcactttttatttggttttaagtacaactgaagtcacctttgacaccccatatctggatattaatctgaagttagaaacaacaagcaatcaagataatttggctccaattacagctaaagcaaaagtggttattgaactgcttttatcggtctcgggagttgctaaaccttcccaggtgtattttggaggtacagttgttggcgagcaagctatgaaatctgaagatgaagtgggaagtttaatagagtatgaattcagggtaataaacttaggtaaacctcttacaaacctcggcacagcaaccttgaacattcagtggccaaaagaaattagcaatgggaaatggttgctttatttggtgaaagtagaatccaaaggattggaaaaggtaacttgtgagccacaaaaggagataaactccctgaacctaacggagtctcacaactcaagaaagaaacgggaaattactgaaaaacagatagatgataacagaaaattttctttatttgctgaaagaaaataccagactcttaactgtagcgtgaacgtgaactgtgtgaacatcagatgcccgctgcgggggctggacagcaaggcgtctcttattttgcgctcgaggttatggaacagcacatttctagaggaatattccaaactgaactacttggacattctcatgcgagccttcattgatgtgactgctgctgccgaaaatatcaggctgccaaatgcaggcactcaggttcgagtgactgtgtttccctcaaagactgtagctcagtattcgggagtaccttggtggatcatcctagtggctattctcgctgggatcttgatgcttgctttattagtgtttatactatggaagtgtggtttcttcaagagaaataagaaagatcattatgatgccacatatcacaaggctgagatccatgctcagccatctgataaagagaggcttacttctgatgcatagtattgatctacttctgtaattgtgtggattctttaaacgctctaggtacgatgacagtgttccccgataccatgctgtaaggatccggaaagaagagcgagagatcaaagatgaaaagtatattgataaccttgaaaaaaaacagtggatcacaaagtggaacagaaatgaaagctactcatagcgggggcctaaaaaaaaaaaagcttcacagtacccaaactgctttttccaactcagaaattcaatttggatttaaaagcctgctcaatccctgaggactgatttcagagtgactacacacagtacgaacctacagttttaactgtggatattgttacgtagcctaaggctcctgttttgcacagccaaatttaaaactgttggaatggatttttctttaactgccgtaatttaactttctgggttgcctttgtttttggcgtggctgacttacatcatgtgttggggaagggcctgcccagttgcactcaggtgacatcctccagatagtgtagctgaggaggcacctacactcacctgcactaacagagtggccgtcctaacctcgggcctgctgcgcagacgtccatcacgttagctgtcccacatcacaagactatgccattggggtagttgtgtttcaacggaaagtgctgtcttaaactaaatgtgcaatagaaggtgatgttgccatcctaccgtcttttcctgtttcctagctgtgtgaatacctgctcacgtcaaatgcatacaagtttcattctccctttcactaaaaacacacaggtgcaacagacttgaatgctagttatacttatttgtatatggtatttattttttcttttctttacaaaccattttgttattgactaacaggccaaagagtctccagtttacccttcaggttggtttaatcaatcagaattagaattagagcatgggagggtcatcactatgacctaaattatttactgcaaaaagaaaatctttataaatgtaccagagagagttgttttaataacttatctataaactataacctctccttcatgacagcctccaccccacaacccaaaaggtttaagaaatagaattataactgtaaagatgtttatttcaggcattggatattttttactttagaagcctgcataatgtttctggatttacatactgtaacattcaggaattcttggagaagatgggtttattcactgaactctagtgcggtttactcactgctgcaaatactgtatattcaggacttgaaagaaatggtgaatgcctatggaactagtggatccaaactgatccagtataagactactgaatctgctaccaaaacagttaatcagtgagtcgagtgttctattttttgttttgtttcctcccctatctgtattcccaaaaattactttggggctaatttaacaagaactttaaattgtgttttaattgtaaaaatggcagggggtggaattattactctatacattcaacagagactgaatagatatgaaagctgattttttttaattaccatgcttcacaatgttaagttatatggggagcaacagcaaacaggtgctaatttgttttggatatagtataagcagtgtctgtgttttgaaagaatagaacacagtttgtagtgccactgttgttttggggggggctttttttctttttccggaaaatccttaaaccttaagatactaaggacgttgttttggttgtacttggaattcttagtcacaaaatatattttgtttacaaaaatttctgtaaaacaggttataacagtgtttaaagtctcagtttcttgcttggggaacttgtgtccctaatgtgttagattgctagattgctaaggagctgatacttgacagttttttagacctgtgttactaaaaaaaagatgaatgtcggaaaagggtgttgggagggtggtcaacaaagaaacaaagatgttatggtgtttagacttatggttgttaaaaatgtcatctcaagtcaagtcactggtctgtttgcatttgatacatttttgtactaactagcattgtaaaattatttcatgattagaaattacctgtggatatttgtataaaagtgtgaaataaattttttataaaagtgttcattgtttcgtaacacagcattgtatatgtgaagcaaactctaaaattataaatgacaacctgaattatctatttcatcaaaaaaaaaaaaaaaaaaaactttatgggcacaactgg

SEQ ID NO: 5966 - protein, 1073 aa, Homo sapien; identical to SEQ ID NO: 530

SEQ ID NO: 5967 - DNA, 2776 bp, Homo sapien; identical to SEQ ID NO: 902

SEQ ID NO: 5968 - protein, 769 aa, Homo sapien; identical to SEQ ID NO: 903

SEQ ID NO: 5969 - DNA, 1487 bp, Homo sapien
ctagcactctgacctagcagtcaacatgaaggctctcattgttctggggcttgtcctcctttctgttacggtccagggcaaggtctttgaaaggtgtgagttggccagaactctgaaaagattgggaatggatggctacaggggaatcagcctagcaaactggatgtgtttggccaaatgggagagtggttacaacacacgagctacaaactacaatgctggagacagaagcactgattatgggatatttcagatcaatagccgctactggtgtaatgatggcaaaaccccaggagcagttaatgcctgtcatttatcctgcagtgctttgctgcaagataacatcgctgatgctgtagcttgtgcaaagagggttgtccgtgatccacaaggcattagagcatgggtggcatggagaaatcgttgtcaaaacagagatgtccgtcagtatgttcaaggttgtggagtgtaactccagaattttccttcttcagctcattttgtctctctcacattaagggagtaggaattaagtgaaaggtcacactaccattatttccccttcaaacaaataatatttttacagaagcaggagcaaaatatggcctttcttctaagagatataatgttcactaatgtggttattttacattaagcctacaacatttttcagtttgcaaatagaactaatactggtgaaaatttacctaaaaccttggttatcaaatacatctccagtacattccgttcttttttttttttgagacagtctcgctctgtcgcccaggctggagtgcagtggcgcaatctcggctcactgcaacctccacctcccgggttcacgccattctcctgcctcagcctcccgagtagctgggattacgggcgcccgccaccacgcccggctaattttttgtatttttagtagagacagggtttcaccgtgttagccaggatggtctcgatctcctgaccttgtgatccacccacctcggcctcccaaagtgctgggattacaggcgtgagccactgcgcccggccacattcagttcttatcaaagaaataacccagacttaatcttgaatgatacgattatgcccaatattaagtaaaaaatataagaaaaggttatcttaaatagatcttaggcaaaataccagctgatgaaggcatctgatgccttcatctgttcagtcatctccaaaaacagtaaaaataaccactttttgttgggcaatatgaaatttttaaaggagtagaataccaaatgatagaaacagactgcctgaattgagaattttgatttcttaaagtgtgtttctttctaaattgctgttccttaatttgattaatttaattcatgtattatgattaaatctgaggcagatgagcttacaagtattgaaataattactaattaatcacaaatgtgaagttatgcatgatgtaaaaaatacaaacattctaattaaaggctttgcaacac

SEQ ID NO: 5970 - protein, 148 aa, Homo sapien
MKALIVLGLVLLSVTVQGKVFERCELARTLKRLGMDGYRGISLANWMCLAKWESGYNTRATNYNAGDRSTDYGIFQINSRYWCNDGKTPGAVNACHLSCSALLQDNIADAVACAKRVVRDPQGIRAWVAWRNRCQNRDVRQYVQGCGV

SEQ ID NO: 5971 - DNA, 2484 bp, Homo sapien
cttggctcttctggcgccaaaatgtcgttcgtggcaggggttattcggcggctggacgagacagtggtgaaccgcatcgcggcgggggaagttatccagcggccagctaatgctatcaaagagatgattgagaactgtttagatgcaaaatccacaagtattcaagtgattgttaaagagggaggcctgaagttgattcagatccaagacaatggcaccgggatcaggaaagaagatctggatattgtatgtgaaaggttcactactagtaaactgcagtcctttgaggatttagccagtatttctacctatggctttcgaggtgaggctttggccagcataagccatgtggctcatgttactattacaacgaaaacagctgatggaaagtgtgcatacagagcaagttactcagatggaaaactgaaagcccctcctaaaccatgtgctggcaatcaagggacccagatcacggtggaggaccttttttacaacatagccacgaggagaaaagctttaaaaaatccaagtgaagaatatgggaaaattttggaagttgttggcaggtattcagtacacaatgcaggcattagtttctcagttaaaaaacaaggagagacagtagctgatgttaggacactacccaatgcctcaaccgtggacaatattcgctccatctttggaaatgctgttagtcgagaactgatagaaattggatgtgaggataaaaccctagccttcaaaatgaatggttacatatccaatgcaaactactcagtgaagaagtgcatcttcttactcttcatcaaccatcgtctggtagaatcaacttccttgagaaaagccatagaaacagtgtatgcagcctatttgcccaaaaacacacacccattcctgtacctcagtttagaaatcagtccccagaatgtggatgttaatgtgcaccccacaaagcatgaagttcacttcctgcacgaggagagcatcctggagcgggtgcagcagcacatcgagagcaagctcctgggctccaattcctccaggatgtacttcacccagactttgctaccaggacttgctggcccctctggggagatggttaaatccacaacaagtctgacctcgtcttctacttctggaagtagtgataaggtctatgcccaccagatggttcgtacagattcccgggaacagaagcttgatgcatttctgcagcctctgagcaaacccctgtccagtcagccccaggccattgtcacagaggataagacagatatttctagtggcagggctaggcagcaagatgaggagatgcttgaactcccagcccctgctgaagtggctgccaaaaatcagagcttggagggggatacaacaaaggggacttcagaaatgtcagagaagagaggacctacttccagcaaccccagaaagagacatcgggaagattctgatgtggaaatggtggaagatgattcccgaaaggaaatgactgcagcttgtaccccccggagaaggatcattaacctcactagtgttttgagtctccaggaagaaattaatgagcagggacatgaggttctccgggagatgttgcataaccactccttcgtgggctgtgtgaatcctcagtgggccttggcacagcatcaaaccaagttataccttctcaacaccaccaagcttagtgaagaactgttctaccagatactcatttatgattttgccaattttggtgttctcaggttatcggagccagcaccgctctttgaccttgccatgcttgccttagatagtccagagagtggctggacagaggaagatggtcccaaagaaggacttgctgaatacattgttgagtttctgaagaagaaggctgagatgcttgcagactatttctctttggaaattgatgaggaagggaacctgattggattaccccttctgattgacaactatgtgccccctttggagggactgcctatcttcattcttcgactagccactgaggtgaattgggacgaagaaaaggaatgttttgaaagcctcagtaaagaatgcgctatgttctattccatccggaagcagtacatatctgaggagtcgaccctctcaggccagcagagtgaagtgcctggctccattccaaactcctggaagtggactgtggaacacattgtctataaagccttgcgctcacacattctgcctcctaaacatttcacagaagatggaaatatcctgcagcttgctaacctgcctgatctatacaaagtctttgagaggtgttaaatatggttatttatgcactgtgggatgtgttcttctttctctgtattccgatacaaagtgttgtatcaaagtgtgatatacaaagtgtaccaacataagtgttggtagcacttaagacttatacttgccttctgatagtattcctttatacacagtggattgattataaataaatagatgtgtcttaacata

SEQ ID NO: 5972 - protein, 756 aa, Homo sapien
MSFVAGVIRRLDETVVNRIAAGEVIQRPANAIKEMIENCLDAKSTSIQVIVKEGGLKLIQIQDNGTGIRKEDLDIVCERFTTSKLQSFEDLASISTYGFRGEALASISHVAHVTITTKTADGKCAYRASYSDGKLKAPPKPCAGNQGTQITVEDLFYNIATRRKALKNPSEEYGKILEVVGRYSVHNAGISFSVKKQGETVADVRTLPNASTVDNIRSIFGNAVSRELIEIGCEDKTLAFKMNGYISNANYSVKKCIFLLFINHRLVESTSLRKAIETVYAAYLPKNTHPFLYLSLEISPQNVDVNVHPTKHEVHFLHEESILERVQQHIESKLLGSNSSRMYFTQTLLPGLAGPSGEMVKSTTSLTSSSTSGSSDKVYAHQMVRTDSREQKLDAFLQPLSKPLSSQPQAIVTEDKTDISSGRARQQDEEMLELPAPAEVAAKNQSLEGDTTKGTSEMSEKRGPTSSNPRKRHREDSDVEMVEDDSRKEMTAACTPRRRIINLTSVLSLQEEINEQGHEVLREMLHNHSFVGCVNPQWALAQHQTKLYLLNTTKLSEELFYQILIYDFANFGVLRLSEPAPLFDLAMLALDSPESGWTEEDGPKEGLAEYIVEFLKKKAEMLADYFSLEIDEEGNLIGLPLLIDNYVPPLEGLPIFILRLATEVNWDEEKECFESLSKECAMFYSIRKQYISEESTLSGQQSEVPGSIPNSWKWTVEHIVYKALRSHILPPKHFTEDGNILQLANLPDLYKVFERC

SEQ ID NO: 5973 - DNA, 3215 bp, Homo sapien
gacaatatcaggtgagctgtggaggtggggtccttggaagctggatgacagcagctggcaaggggataagagagcagtgagcccctccctcaaggaggtctggctttatccatagacagggccctctgaggtggggctgaggtacaaagggggattgagcagcccaggagaagagagatgggggttcccttcttctcttctctcagatgcatggtggacttaggaccttgctgggctgggggtctcactgcagagatgaagctgcttctggccctagcagggctcctggccattctggccacgccccagccctctgaaggtgctgctccagctgtcctgggggaggtggacacctcgttggtgctgagctccatggaggaggccaagcagctggtggacaaggcctacaaggagcggcgggaaagcatcaagcagcggcttcgcagcggctcagccagccccatggaactcctatcctacttcaagcagccggtggcagccaccaggacggcggtgagggccgctgactacctgcacgtggctctagacctgctggagaggaagctgcggtccctgtggcgaaggccattcaatgtcactgatgtgctgacgcccgcccagctgaatgtgttgtccaagtcaagcggctgcgcctaccaggacgtgggggtgacttgcccggagcaggacaaataccgcaccatcaccgggatgtgcaacaacagacgcagccccacgctgggggcctccaaccgtgcctttgtgcgctggctgccggcggagtatgaggacggcttctctcttccctacggctggacgcccggggtcaagcgcaacggcttcccggtggctctggctcgcgcggtctccaacgagatcgtgcgcttccccactgatcagctgactccggaccaggagcgctcactcatgttcatgcaatggggccagctgttggaccacgacctcgacttcacccctgagccggccgcccgggcctccttcgtcactggcgtcaactgcgagaccagctgcgttcagcagccgccctgcttcccgctcaagatcccgcccaatgacccccgcatcaagaaccaagccgactgcatcccgttcttccgctcctgcccggcttgccccgggagcaacatcaccatccgcaaccagatcaacgcgctcacttccttcgtggacgccagcatggtgtacggcagcgaggagcccctggccaggaacctgcgcaacatgtccaaccagctggggctgctggccgtcaaccagcgcttccaagacaacggccgggccctgctgccctttgacaacctgcacgatgacccctgtctcctcaccaaccgctcagcgcgcatcccctgcttcctggcaggggacacccgttccagtgagatgcccgagctcacctccatgcacaccctcttacttcgggagcacaaccggctggccacagagctcaagagcctgaaccctaggtgggatggggagaggctctaccaggaagcccggaagatcgtgggggccatggtccagatcatcacttaccgggactacctgcccctggtgctggggccaacggccatgaggaagtacctgcccacgtaccgttcctacaatgactcagtggacccacgcatcgccaacgtcttcaccaatgccttccgctacggccacaccctcatccaacccttcatgttccgcctggacaatcggtaccagcccatggaacccaacccccgtgtccccctcagcagggtcttttttgcctcctggagggtcgtgctggaaggtggcattgaccccatcctccggggcctcatggccacccctgccaagctgaatcgtcagaaccaaattgcagtggatgagatccgggagcgattgtttgagcaggtcatgaggattgggctggacctgcctgctctgaacatgcagcgcagcagggaccacggcctcccaggatacaatgcctggaggcgcttctgtgggctcccgcagcctgaaactgtgggccagctgggcacggtgctgaggaacctgaaattggcgaggaaactgatggagcagtatggcacgcccaacaacatcgacatctggatgggcggcgtgtccgagcctctgaagcgcaaaggccgcgtgggcccactcctcgcctgcatcatcggtacccagttcaggaagctccgggatggtgatcggttttggtgggagaacgagggtgtgttcagcatgcagcagcgacaggccctggcccagatctcattgccccggatcatctgcgacaacacaggcatcaccaccgtgtctaagaacaacatcttcatgtccaactcatatccccgggactttgtcaactgcagtacacttcctgcattgaacctggcttcctggagggaagcctcctagaggccaggtaagggggtgcagcagtgaggggtatatctgggctggccagttggaaccacggagatctccttgccctagatgagcccagccctgttctgggtgcagctgagaaaatgagtgactagacgttcatttgtgtgctcatgtatgtgcgaagtatataaattggcttttcatgcgtgtgtgttgtctgaacatggggagtgtttcatgggttatgtgtatgtgccatttatgtgagtgtgtgtttgtgctgatgagaatactgagtatgtggaaggcagcagagcggactggtgaggagcacagctcaggaactagactgcctgggttccaatcctggctctgtggcttgctagctatgtgaccttgagcaaattaccctccttaaacaagagttttcttccttgtaaattacatctgtcatggtttcttggagggcccacttgtatcctctggttcttcatttattgagcacctactacatgcaaggcactgtactaggcgtgagaagcatatagaggcaagaaagagataccaagatgccatctgtgtcctggttagcagagctggaccagtggtgccttggagggataagccagctgcagctgggctgtgtggttgacttatgggcccagccagccaggctcaggccatggctcccctttttcttcctcaccctgatttcttgcttattcactgaagttctcctgaagaggaactgggcctgttgccctttctgtaccatttatttgctcccaatgtttatgataataaaggcaccgctgatggggacctcc

SEQ ID NO: 5974 - protein, 745 aa, Homo sapien
MGVPFFSSLRCMVDLGPCWAGGLTAEMKLLLALAGLLAILATPQPSEGAAPAVLGEVDTSLVLSSMEEAKQLVDKAYKERRESIKQRLRSGSASPMELLSYFKQPVAATRTAVRAADYLHVALDLLERKLRSLWRRPFNVTDVLTPAQLNVLSKSSGCAYQDVGVTCPEQDKYRTITGMCNNRRSPTLGASNRAFVRWLPAEYEDGFSLPYGWTPGVKRNGFPVALARAVSNEIVRFPTDQLTPDQERSLMFMQWGQLLDHDLDFTPEPAARASFVTGVNCETSCVQQPPCFPLKIPPNDPRIKNQADCIPFFRSCPACPGSNITIRNQINALTSFVDASMVYGSEEPLARNLRNMSNQLGLLAVNQRFQDNGRALLPFDNLHDDPCLLTNRSARIPCFLAGDTRSSEMPELTSMHTLLLREHNRLATELKSLNPRWDGERLYQEARKIVGAMVQIITYRDYLPLVLGPTAMRKYLPTYRSYNDSVDPRIANVFTNAFRYGHTLIQPFMFRLDNRYQPMEPNPRVPLSRVFFASWRVVLEGGIDPILRGLMATPAKLNRQNQIAVDEIRERLFEQVMRIGLDLPALNMQRSRDHGLPGYNAWRRFCGLPQPETVGQLGTVLRNLKLARKLMEQYGTPNNIDIWMGGVSEPLKRKGRVGPLLACIIGTQFRKLRDGDRFWWENEGVFSMQQRQALAQISLPRIICDNTGITTVSKNNIFMSNSYPRDFVNCSTLPALNLASWREAS

SEQ ID NO: 5975 - DNA, 1085 bp, Homo sapien
ggaatggtactttagagttcacctacaacaatggtgttggttgggttgtgcttcacttctgcggtaaccctgtggactttccctccatagaaaggcttcgtgtggaatatcactgtcgctgagtacccagtcttggcacagttgatgctgacttttcctccgagctccacccacgggatggtgagaatggaccgggcgtaggcactaggcagggtgaatacgtactcctccccgtgttccaggagcctcaacacaccttcccctatcatagagacccccacggacatgcccatgaacttgccctcgtgccgaattcggcacgaggctgcgaaccacgtgggtcccgggcgcgtttcgggtgctggcggctgcagccggagttcaaacctaagcagctggaaggaaccatggccaactgtgagcgtactttcattgcgatcaaaccagatggggtccagcggggtcttgtgggagagattatcaagcgttttgagcagaaaggattccgccttgttggtctgaaattcatgcaagcttccgaagatcttctcaaggaacactacgttgacctgaaggaccgtccattctttgccggcctggtgaaatacatgcactcagggccggtagttgccatggtctgggaggggctgaatgtggtgaagacgggccgagtcatgctcggggagaccaaccctgcagactccaagcctgggaccatccgtggagacttctgcatacaagttggcaggaacattatacatggcagtgattctgtggagagtgcagagaaggagatcggcttgtggtttcaccctgaggaactggtagattacacgagctgtgctcagaactggatctatgaatgacaggagggcagaccacattgcttttcacatccatttcccctccttcccatgggcagaggaccaggctgtaggaaatctagttatttacaggaacttcatcataatttggagggaagctcttggagctgtgagttctccctgtacagtgttaccatccccgaccatctgattaaaatgcttcctcccagcataaaaaaaaaaaaaaaaaaaaaaaaaaaa

SEQ ID NO: 5976 - protein, 152 aa, Homo sapien; identical to SEQ ID NO: 506

SEQ ID NO: 5977 - DNA, 17122 bp, Homo sapien
  Unsure 307: Unknown base
  Unsure 1532: Unknown base
  Unsure 3181: Unknown base
  Unsure 3656: Unknown base
  Unsure 3913: Unknown base
  Unsure 3939: Unknown base
  Unsure 4030: Unknown base
  Unsure 4041: Unknown base
  Unsure 4044: Unknown base
  Unsure 4366: Unknown base
  Unsure 5052-5054: Unknown base
  Unsure 5181: Unknown base
  Unsure 6192-6193: Unknown base
  Unsure 6197: Unknown base
  Unsure 6367: Unknown base
  Unsure 6854: Unknown base
  Unsure 7650-7651: Unknown base
  Unsure 7658: Unknown base
  Unsure 8777: Unknown base
  Unsure 10101: Unknown base
  Unsure 10146: Unknown base
  Unsure 10406: Unknown base
  Unsure 10535: Unknown base
  Unsure 11135: Unknown base
  Unsure 12354: Unknown base
  Unsure 14085: Unknown base
  Unsure 14130-14131: Unknown base
  Unsure 14146: Unknown base
  Unsure 14160: Unknown base
  Unsure 14235: Unknown base
  Unsure 14509: Unknown base
  Unsure 14596: Unknown base
  Unsure 15134: Unknown base
  Unsure 15184: Unknown base
tcttgtttcctatcctttgtgactttttttgcattatatataaggatgccgaaatactgtttattgttgatagtttacaaaattgaatcttacattagtgcataattttggtgaatgttgaagattatggtagattgccttacatttctgcatattgtttgcaccttggaatgatagcactggcatgaattatagagctgaggatctaaagatttttactttgatttatcccattatcatctgcagggaaacaattgcttttactgattaaaaatgcaggctgggcacagcggctcacgcctgtaancccagtactttgggaggccgaggcgggcggatcacaaggtcaagagatcgagaccatcctggccaaccaacatggtgaaacctcatctctactaaaaatacaaaaattagctgggtgtggtggcgcgtgcctgtaatcccagctacttcaggatgctgaggcaggagaatcgcttgaacccgggaggtggaggttgcagtgagccgagatcgcaccactgcactccagcctgggcgacagagcgaaactccgtctcaaaaaaaaaaaaaaaaaaaagaaaaaagaaaattatatagaaataaaattccagctattccaaaacttgcaccttgaatacaggtacagaattgctaaaaccgtgtaccattttgtagttttagcatgcttttgtgtaactgcatctggtgtttgatcctcatgagagccctgttaaggaagggtacatattattgtcctcattttccttcgaaaacacatcagagtttgtattttgactgtcagcattcaaatacaagtcttttatttataaaattttggtctttatactgtggctaaaaatcttaaatcacttgtcatgatttgaaatggtttataccgattttttttgacatttatacacacatacacatatttttaattgtctataataaaatcatgctcatctttgaaaaaatattaggagtactacagtggatacctacatacttgctattcagcatacctggttttttgtttgttttttgagacagtcttctctgtggtccaggttggagtgcagtggcacgatctcagctcattgcaacctccgtctcccaggctcaagtgattgtcctgcctcagcctcccaagtagctgggactgcaggtacacatcaccacgcccagctaattttttgtatttttggtagagacggggtttcaccatgttggccaggctggtctccaactcctgacctcaagtgatcagcccacctcggcctcccagagtgctgggattacaggttgtgagccactgcacctggcctgtttttaaattcacataaatatgttttatatttttcattagggagaagaaggttgtgtctacaatttttaagacattggggagatttagatgccagtagtaacttaaaagagaaataattgcaaattctttttcctcttgagtatactttcatttaaggtacagtgttctgtaagttacttttaccgttaaacttcttaangaagcttattgtttgtcttacatttttaggttggatttttcttaagtcacatgtctaataaaaaaaacccttaaatacctcatttattcgtcttcgttagtgaatgcattgttgtacatattagatttttctctttagataactcagcttcccctattaagtgccacatgtattacaaaattttatttatgttttattgtttaataaactcttgagaactagatacattttaatcatttgtaatacttacattttctaaaacacttcatttttccctggtttcttcaacaaagagatgcatgtagtacaaggatagctttacctgtgttagaagattgtttcacacatttacatcaactgcatagtcctgtttttgttgggccctaatgccagcatcactttttgctactgctgtttctgccttaaaggcaatatgcctctgtctagtttgctgattctgatactctttcccctggaaagtaggtaatcaagtttgtgaggagctgtgtgtttaaggagtccataaatccttgtggggagccctaggtgtatagagcatagctgtagggcagaggcctttgacacttattctggatatgcagtggcctttgcctatggggttcatgggtcagagcgctgttgtgacctttgaataaatgggttgttatgataattgttttaagggaggagagttattctgatatcctttgtattgatattgctcttatttattattgagctggatttaagtattaatcatttaaggtcaaatgtctaatgtatatatgttcttaaatggctacgacccagttaccatagcaatttagtgaaataactataatggaacattttttttcaatttggcttctcttttttttctgtccaccagggagtaactattcccagtcagaggcgctatgtgtattattatagctacctgttaaagaatcatctggattatagaccagtggcactgttgtttcacaagatgatgtttgaaactattccaatgttcagtggcggaacttgcagtaagtgcttgaaattctcatccttccatgtattggaacagttttcttaaccatatctagaagtttacataaaaatttagaaagaaatttaccacatttgaaatttatgcaggagactatatttctgaagcatttgaacaaattaattagctttgttgttcaactcattgggctaaagaagccaaaagcaatgggttttaatgtagtcgaagccaaattatatttatgaaagaaatattctgtgttataaccaccaaatacagcccaattctgactagatgatggaagaacctgtcccatcagaggtccagcatgaggtccagcagaggtccaccagaggagttcagcaatttgctgctcttagggcagggatcaattccttaatatcttaggaagactaggtattgacagtaatggtgacaaagcaatgaaaaggaaaggaagaagtgataagacatggcagcaagctgaagtatgatgagtaaagaataggaatcaaagtatgtggagtgttagagaaaacctggatttagatccagattctagtcctatctctgtcattaatctattgcgtaaccctgagcatatcatctacctctctttgagtttgcttgtcantaaaatgaaagagactttgaaatctgagacttcctggataagtactaaatacagattatgtcactgatgtctgcctctatttatttctcccttttaccctaatctctataagtctacctcagtcatcctgatcctattctacttctctgatgttgttgtcagataggtgtgatcatcctcatcagatcttttctgtattcttagagacagataactttatcaaagaccacagatttattagtatagcatgttaaagtcttctaaagagtctcattgatgctcttttcatctcagtacaatttttaaaactgctgaatgcaaggtactgagctgttggaagtgactgacagatgaatgtaacagattcatagagaagggaaaaaggaagaaaaactcatgctcttcctatagtattgatatcagtgtaagagccaagagaaaggtataaagtatcatgcagatattaaggggaaangaaaacattcactttagtaatctttcctcattttctagtttcctcttatgtactatgatttaatactgtagtaaagttttaataaaatatgagctatatgtaattaagtgggaggttgtggggctaggcacgaggctcacacgtgtaaccccagcactttgggaggctgaggcaggcggatcgcttgatctcaggagttcgagaccagcctggacaacaaggtgaaaccccatctctactaaaaacacaaaaattanctgggcatagtggcacacacctgtantcccagcttcttgggaggctgaggcaggagaatcgcttgaatccaggaggcataggttgcagttagccgagatcatgccactgcactgcancctggacatcngancaagactttgtcttagaaataaataaataaatataaaataaaataaatgggaagttgtgtatataaattataaatgctacattcagaaaagcttttgaaggttgtcagacagtttcttaaaggaagttcaccagttctttattgaacattgaagaaaacatacagtttagactggcattaaaactgaaagaagtggccagacgcagtggtagacgcagtggttcacgcctgtaatcccagcactttgggaggtcaaggtggatggatcacctgaggtcaggagtttgagatcaggctggccgacatggtgaaaccctgtctnttactaaaaatacaaaaattagccaggcatggtgatgcgtgcctgtagtcccagctacttgggaggctgaggcaggagaattgcttgaagccgaaggtggaggttgcagtgagccgagattgcgtcattgcactccagccagggcggtaagagtgaggctccgtcttaaaaaaaaaataagtaaataaattaaaaactactgaaagaagtattacaggcaatgggaaatagcttgagtggaagtgcagcagaaggaaaaagctggacaagaatgtagtgtcagagaataggtatggaacgtgtgagtgactgttagaggatcttgaatggggataacagacttgatttcataaatactgagatgtcatgataatacttgaggactaaaccatgttttaaggacagttgtatgcaaagttgtaatcgcaagaggaaaaaatagtggaaaagaaaccagtaataaaacttgccttaatgcaggtatgctaagacaatcaaatgggatttcattaattttttatttgccatttatagccaaagattttgtaaaagttttgagcccagtcaggtgaaatagtctcagaaagaaagaaaagtgaatctgagacttggagacattaatgttgatattttggttttaaacgtgttttaaatccggtaaaagtgagcttctcacatgacaatannncagtgggtacttgggagtatgggttcgaatctaggtaggagatatatcgatattttgggcatcatcaggaaagggagagtagttaagcctttcatataaataatggtgtggcgtttgtgcatgggangtcttggaggaaaggaagaaaaggagagggtgaggactgagataagaatggcaacttgggtttaggaagaagaagaggaatcaatgtagagaacagatagtgctgaaaaatacagcatcttctgtagggattggcagctttttcttgatttttgtcttaatatttctaagagatggaaaaagctactatattctagacatttaacagggttaaaaatgttactaaaagatgatcaatgtggttttcattcaagactataacaatatgtatatatccaaggaaatttaattctgacttaaaaaaattgttttgcttgtatagatttagggacacaagtgtaattttgttacatgcatagagtgtatagtttcaagtcagggcttttaggttgtccatcatctgaataatatacattgtacccattaagtaatttctcatcttctactcaccgtttcaagtctccactatttatcattccattctttacattctgattttcatttactaggtgtattagtctgtttttgcattgctttaaagaaatacctgagactgagtattaaacaggtttaacctgttttctttatgaattcttctttaattggctcatggttctgcacgctgtacagaaagcatagcagcatctgcttctggggaggcctcaggaagcctccaatcatggctgaaggcaaaaggggagcatggtgagaatgggagcaagaaagagaaggagtggtggggagaaggtgccacccacttttaaatgccagctcacttaccaccaagaggatggcccaagccattcatgtgggatctgccccccatgattcaagcttcttcccacccaggcccccacctctagcactggggattacaattcaacctgagatttgggagggaaagatatccaaactatatcactaggtctggatcttgttatttattttttggaacatagtcatatatatccaaggatatatattgtagaagtccacagaaccatactaatgnngganttctgcttagctaggtcttatctatctgaaacatgatattcatattgcagagaagattattttctttagtgattgaggaaatctttactacttatacatttttaatataatactataatatttgaagatgcacattttagatgtagtttaattgaaacctggaaatactnttaatttgctttttaaagtcctaaaatcaggattatcagattctgaattaatggagtttaaatcaaaaagattacaaggcagtttttcagttttattctggttaattttatcacagctttgggaacctactttgtttatttgcttctttgaagttagatttccccagtgaaatttcaggtatcacataaagtcttatgaaatggctcattgcactttgaactttgagtcaaggaagtgaaatttattgatagattgttggtgtaatatttatcctgtttgtggtagcttttttgaataataagtgtcttagaagaccatgttggagtagcctgcatgcttttatcaaacatattaattatgtgatggctgatactgctttagatattacatagaaatagtagtaggtgtttactaaactggaaatttcatttaacttggtttagctttgccttgttctcagtcacattgataaaaatgtaagacttntgtttatcttttagaataatgacaccttttggtgctgagaattttttgttttatatatatatatatatatacgtaatataaatacaaaatatatttaaatatgtataatatttctcatacactttatgtaactttgtgttcctgtttctctattatcttggcatgttttcttcaaatggcacttcttaacctcctaaggttaataaatttctttgtaatggacttttgttttctaattcctcagcgtatgacaaatgaattatactttgtcaaattatttaggtaactttcagtttttgaagtcctgggatcataacattcatcagtctttaatttctgtcattaaggtcattagctataaatgaatttatgagtagatttaaaaaataaaacatacaatccttcccttaacacactttcccaccatttggttcaactgctagtgtaaaagcatgatgaattttgagaagttatattttaccagttactttattttttaccagttatttaaaacagacatgagccaaagccagaatacttgttaatgaaaatgaggtgttttggaggaaaggaaggttgtgctgcagtttttacttgaaatctgttacatttctttacagaaatttcaaatctcttgtttcctgttatgatggtggcattatatacctttaaaatgtgagctataggaaaatgaatgatggttaattttttaataaatatttagacttgtgtttttgaaattttttataacattgttataggttttatcctctttctcttgtgaacatgtagtggnntgtattntgtgatctttgccgcatgctagagacttaagaatactatagcaaatatctgtcttcgcttacatttaaaaatttttcgtgactactccctgttgatatctgtcttaaaagttacttttgatgtagttcacaaatgtaccagataattatttcatcgtttttaatgcttaaagtttttatttgtattaggatttttagtatgattttaatgttaaagttttgaagttactctgccactagaagtctaattttgggacttactattcatgaaataggaattgacttttatataagtaataggaccttattttgaaggttcaaactggagaaaatcttacattgtttatatttttatttcatttatttcagttgatttgcttgagatcaagattgcagatacagaatccatatttcgtgtatattgctgatattaatcattaaaatcgtttttgacagtttgacagttaaaggcatttccctgtgaaataatactggtatgtatttaaccatgcagatcctcagtttgtggtctgccagctaaaggtgaagatatattcctccaattcaggacccacacgacgggaagacaagttcatgtactttgagttccctcagccgttacctgtgtgtggtgatatcaaagtagagttcttccacaaacagaacaagatgctaaaaaaggtttgtactttactttcattgggagaaatatccaaaataaggacagattaaaagctatattttattttatgacatgtaaggaactataatttgttttctattagatctgccaggtgttttgcttactctggcattggtgagacattataagggtaaataatcctgtttgaaggaaaaggccttatggcattgtaacatgagaggaatttttcttaacaaggatggttaactgagaagaaattagcatgggaccaatattttaaaaattttggtctataggtagaaatgagatctgttctgtggtcttatgtagtgacacaaaccactttttctccattttggcttatgtttctttttctttcctttttttttttttcctttttgttagagagagggtcttgttctattgcccaggctgagtagctaagactacaacatntgccaccacacccagctaattttttttatttttatttttgtagggacagggtctcactatgttgcccaggctggtctcaaactcctgggcacaagcagtcctcacgctttggcatcccaaagagttggaattacaggtgtgcgccatcatgcctggccttaacgtttcttaagacttgattattttctatttagcttctgtggatttacttgattaatttttttaataggagagaaatcagtatgaagaggaagtaataaagaatgaaaacatggtatttaaatgtgcaggtttagaaagttaatgaagtttgaatttgattgatctgtatttagagaaggcaacgtcttattattttaaaaccaactatccgccctgtgcggtggctcacgcctgtaattccagcactttgggaggctgaggtgggcagatcagctgaggtcaggagttcgagaccagcctggccaacatggttaaaccccatctctactaaaaatacaaaaaaattagccgggtgtggtggcaggcgcctgttttccccagtaattcaggaggcttggaggcagaaaattgctgaacccgagaggcggaggttgcagtaagccaaggatgcaccattgaactccagcctggggcaacaagagtgaactccattcaaaaaaaagaaaaaaaaaacaacaactatcttcatttaaaatattaaatgtgaatatttaaagtgagactaaggtgcaacatttttagatagtaatgaagaaaaggactaactttgtagtgttgctgccttgttaaacatactagatagcatattgccaatctttaaacattctcaatgataggatttattactttttctgatttttagcttttcttttgaaagaaaataagaggaagtttcatttactgcaaaattttaaatgctgctttgatgtatcagtagagatataattttcctttatccagaatccaagtagctggaaaaaaaaatcaaaatatgctgaacttttttttttttagccagaaacccatttcctatcgtctgtacaaataaaagttaaatatatctcaataacttagaaaaattattttttgataatccaggaagtattagcaactgttttaaaattaagataactagtaagttttatttagctttcaaaaataggcatctacatcatcatctctgcatacctttaggaatttcctaattcttatttcccttcatctgtactttaacacatgcaaaattgaaggttagattaaatatttatgatttatttgtttatcccttgactacataaattcccattttattgattttccntgccttatttaagaatatgctatgattaaaacacaaaaaattttngtataacccatatatatatagaattcacctttttgttatttaaatattattggcttattttcttctaagtaaaatacaattactggctaaaataattgaaataagcaaaaaaaaaattttaaagaccttgtatacaagattactttgccaggtactgttaaaagatgcaatgacatttaagacgtaacatccttaaggatcttattttctgggggataaaaaactttaaggtaaattagaataaaagatttaaatggcantttaaggtaccaggtaccagataagatgtcacaaggctgtatatcattaattgccaaatgatttatacaggccagatttctttgttggtccattggaggtttaaagtgatgacttctgttgtgtttttnttattaagaaggtattatcttattagtaggaagtgattttttttaagaacaagcattttataacatcaaaagaaatcagtagtactctttcctaccccctcatatttattctgaaagtattcaagcattatattgtcatgtaagaaactggagcttctcatgtttgtattgctgtagaagtaaacatgtatttgccatgcgtcatcagggaagttgcactcaccgtccaagaacttttgttaaagtaaatcttggaataggtagctcatttgaaatgtagaaaaaattaaatccatatctgaattttgtttatatgtatgtacacgtaaactaaaaacgtatttaaagctagtattagatgagaaaagaggtttttttacttaaaattttaaggcaaaagtagtttatcttagatcttgtgagattgtatttttggtttaaaatttgagaatttgagtgaagaaaaatcatgtgaatgaaaatgcaacagataactcagattgccttataatagtctttgtgtttacctttattcagaatatcaaatgatagtttattttgttgactttttgcaaatgtttaacataggtgacagatttncttttttaaaaaaataaaacatcattaattaaatatgtcatttcatttctttttcttttcttttttttttttttaggacaaaatgtttcacttttgggtaaatacattcttcataccaggaccagaggaaacctcagaaaaagtagaaaatggaagtctatgtgatcaagaaatcgatagcatttgcagtatagagcgtgcagataatgacaaggaatatctagtacttactttaacaaaaaatgatcttgacaaagcaaataaagacaaagccaaccgatacttttctccaaattttaaggtcagttaaattaaacattttgtgggggttggtgacttgtatgtatgtgatgtgtgtttaattctaggagtacagctgatgaagaacttgcttgacaagtttttaacttatgtattatttcgaagcagtgtttacgtagcagtaacatgaaagtttctaataaaatacccaatgtacacaagcgtcaaaaaagctgcatttttccttttcctaattctttgttgtttgctgaaatctggggcaaaggtgcgcggagggggctaaatgactgggatatgaagtaggaatgggagaggaaagaaatagatgggaactcaggtcatttgggaatgattcatatggaatgtttttactgcttccactcctgtctgccttccaatttattctcaatccctcagagtgatcttaaaaatagacttgattgtgtcacttctgtttacactttataaggaccttgtgttttttttttttaccatgacctacaaggcccagcataatttagcacagggctacctcctacatcagcactagtcaccttctctccttgtttcttgagattcagtcatactggtctttcttcagttcttcaaaatgctaagcttctgcctcttctagtctttccagttattttccttctccctgtaccttttcatctcagccttttcccctgaccttccatagctatcttcatatttccagccttagcttcaatctcatattctctgaagtcctttgattgtcctcccgttattctttttttaaaaatcctatttccttatattgtatcttagaattatttggtttgtttcatttttgcctatgtgtgatatatgtatttccacataggtatatatatctacttatagacaagaattcttcagattaaaaaaatctgatttgtaaacattcccaagtggntgtttaccatttttttcttcccccttcttattctacctgattttcccctgttcattcaccacactcgtttctttctcttttttactctctcttaatttttcattcaatttttataacatgtaataaatctaactgtagcgtctgagtattaagaatattgctagtaatacttcacctgtaatcccagcactttgggaggctaaggcaggcggatcacttgaggcccaggagtttaagaccagccggccaatatggcgaaaccctatctgcactacaaatacaaaaattagctgggcatggtgtcgcacacctgtaatcccagctacttgggaggctgaggcacaagaattgcttgagcctgtgagatggaggttgcagtgagccgagatcacaccagtgcacgtgcacttcagcctgggcaacagagcaagactctgtcttaaaaaaaaaaaaaaaaaaaatatatacacacacacacacacacacacacacacacacacacacactattactaccaatatacatacatatatgtatgtatgtatgtatgtatattggtagtaatagtaatacttgggcccctgcacgttttaagtgaaaatagatctaatattaaatgtctttagcccttaaattttttttaagtgttcagaagtttccctttaaaaaaatttttaatatataataattgtacatatttatgggatacagagtgatattttcatgtatgcagtgtgtgatgatcaaatcaggataattagcatatggatcacctcaaacatttgtcatttctttgtgttaggaacattcaaaattctgtcttctagctatttgaaaatatacagtaaattattgttgactagttacagttctatagaacactataatttattcctcctgtgtgtaattttttatcttttaaccaacatctccctatcctcccctcccactccctttcccggcctcttaataaccacactcttatgagctcaacttttttagcttccatatatgagtgagaacatacggtatttatctttctgtacctgacttattttacttaacatcatgtcctccgggctagacattctctttagaatccacaggtttcctttcttttctctaaatctgcattttgctcagccattaacttttaaaatgtctttttccctttagttttattgttttctattttaatattgcaagatgttttatatttgtgattacaaataaaaactccattattagtaaacaaatacaatgtcatatagtagtaagtgctataaaaaatagacaggatagaaagtaatcttggtttgtatgttttttgttttttagcaaagatgattagagaaggcccaaccaagcagataacatttaagcagaggcctaaatcatataagtgagttatacaaatatctgggaaaaggagttaagagtacagatgcaaaagcccttagacaagagaatgagcttggtatatctgaagagtggataagtcattttgactgaaacagagtggacaagaaaaccagtccaagtgtaaagatactagtgtgtgttcagcataggaaggatgtaatctgaattttgtgtttaatattccctgtgttcatgctttcaaaatacagatgagtgaggaaagtagggagaaggggtaataaaggaagctgagagatcagttaagaggtacttgaatagtttagtaaagatgagagaagatgtttgctncttgttgcccctcactgcttagaatagtggcagtgaagggtaccnngaagctgtcagattnacttaaagagtttnctgatgcagtggatgttggttgtaagagaagaattgataatgactcttggataataggggagggaggggctgtcnatataatataatgaagaagggatttgaagtcatttctgatttaaatctcacatccactacctacttttaatagatatgtagcctttaacaagttccctaacctttctgggccttagctacctccccttggaaatggaaatacctaacatgtaaggttgttttgacagttattttcactaggcatgtaaaggcacttgactctctgttatagaccactgtattatgttaatgtccctctccttcctccctttaggtaaagtttttagggctaatnaatcccgaatatcaatgttgatcagtagtttgtgtttgtgtagtgttgtttatatcaaaactacattgaagccgggcacagtggttnaacgcctaaaatcgcaacactttgggaggccaaggtgggccttccccacttgactaaggagtttgagaccagcctgggcaacatggtgaaatcccatctctacaaaaaatataaaagctagctgggtgtggtggcatgcacctgtagtcctagctacttgggaggctgaggttgatcctgggagtttgagcctgcagtgagctgtgaagatgccactgcactctagtctgggtgacagagcaagaccctgtctcaaaaacacacacacacacacacacacacacaaagaaatacattgatttttcacataggtagtaagagaaacattctttttgaactcagctgtttgtgaattgaattttgtaattcaaatgctatattatgtaaactattgatgactttcaatctgcatttattttgtataattatttagttaatatttgccacttatattccttaaaaaataaaattgaggttgggcgtggtggctcacacttgtaatcccagcactttgggaggctgaggcaggcagattgcntgagctcaggagtttgagatcagcctgggcaacatcatgaaccccatttntactaaaatacaaaaattatctgggcatggtggtgtacacctgtagccctagctgtttgggaggctaaggcacgagattgcttgaacccgggaggcagaggttgcagtgagccaagatcatgccactgcactccagcttggcaacagagcaagactcttgtctccagaaataaaaataaataaattgtattaacatcctgatagtttatctgtttagtacctagcaagaaagaaaatgttgaacatcttaagaagagggtcatttaaaaggcctcttaaagatcatgtttgttacagtgcttaaaaattaatatgttcatctgcaaaatggaataaaaaatctgttaaaaatatatttcactaaatagttaagatgagtcatatttgtgggttttcattttaaattttctttctctaggtgaagctgtacttcacaaaaacagtagaggagccgtcaaatccagaggctagcagttcaacttctgtaacaccagatgttagtgacaatgaacctgatcattatagatattctgacaccactgactctgatccagagaatgaaccttttgatgaagatcagcatacacaaattacaaaagtctgaatttttttttatcaagagggataaaacaccatgaaaataaacttgaataaactgaaaatggacctttttttttttaatggcaataggacattgtgtcagattaccagttataggaacaattctcttttcctgaccaatcttgttttaccctatacatccacagggttttgacacttgttgtccagttgaaaaaaggttgtgtagctgtgtcatgtatatacctttttgtgtcaaaaggacatttaaaattcaattaggattaataaagatggcactttcccgttttattccagttttataaaaagtggagacagactgatgtgtatacgtaggaattttttccttttgtgttctgtcaccaactgaagtggctaaagagctttgtgatatactggttcacatcctacccctttgcacttgtggcaacagataagtttgcagttggctaagagaggtttccgaaaggttttgctaccattctaatgcatgtattcgggttagggcaatggaggggaatgctcagaaaggaaataattttatgctggactctggaccatataccatctccagctatttacacacacctttctttagcatgctacagttattaatctggacattcgaggaattggccgctgtcactgcttgttgtttgcgcatttttttttaaagcatattggtgctagaaaaggcagctaaaggaagtgaatctgtattggggtacaggaatgaaccttctgcaacatcttaagatccacaaatgaagggatataaaaataatgtcataggtaagaaacacagcaacaatgacttaaccatataaatgtggaggctatcaacaaagaatgggcttgaaacattataaaaattgacaatgatttattaaatatgttttctcaattgtaacgacttctccatctcctgtgtaatcaaggccagtgctaaaattcagatgctggtagtacctacatcagtcaacaacttacacttattttactagttttcaatcataatacctgctgtggatgcttcatgtgctgcctgcaagcttcttttttctcattaaatataaaatattttgtaatgctgcacagaaattttcaatttgagattctacagtaagcgttttttttccttgaagatttatgatgcacttattcaatagctgtcagccgttccacccttttgaccttacacattctattacaatgaattttgcagttttgcacattttttaaatgtcattaactgttagggaattttacttgaatactgaatacatataaatggttatataaaaaaagacattttgggttaaaaaggaaattagagtt

SEQ ID NO: 5978 - DNA, 2691 bp, Homo sapien
gcttgcccgtcggtcgctagctcgctcggtgcgcgtcgtcccgctccatggcgctcttcgtgcggctgctggctctcgccctggctctggccctgggccccgccgcgaccctggcgggtcccgccaagtcgccctaccagctggtgctgcagcacagcaggctccggggccgccagcacggccccaacgtgtgtgctgtgcagaaggttattggcactaataggaagtacttcaccaactgcaagcagtggtaccaaaggaaaatctgtggcaaatcaacagtcatcagctacgagtgctgtcctggatatgaaaaggtccctggggagaagggctgtccagcagccctaccactctcaaacctttacgagaccctgggagtcgttggatccaccaccactcagctgtacacggaccgcacggagaagctgaggcctgagatggaggggcccggcagcttcaccatcttcgcccctagcaacgaggcctgggcctccttgccagctgaagtgctggactccctggtcagcaatgtcaacattgagctgctcaatgccctccgctaccatatggtgggcaggcgagtcctgactgatgagctgaaacacggcatgaccctcacctctatgtaccagaattccaacatccagatccaccactatcctaatgggattgtaactgtgaactgtgcccggctcctgaaagccgaccaccatgcaaccaacggggtggtgcacctcatcgataaggtcatctccaccatcaccaacaacatccagcagatcattgagatcgaggacacctttgagacccttcgggctgctgtggctgcatcagggctcaacacgatgcttgaaggtaacggccagtacacgcttttggccccgaccaatgaggccttcgagaagatccctagtgagactttgaaccgtatcctgggcgacccagaagccctgagagacctgctgaacaaccacatcttgaagtcagctatgtgtgctgaagccatcgttgcggggctgtctgtagagaccctggagggcacgacactggaggtgggctgcagcggggacatgctcactatcaacgggaaggcgatcatctccaataaagacatcctagccaccaacggggtgatccactacattgatgagctactcatcccagactcagccaagacactatttgaattggctgcagagtctgatgtgtccacagccattgaccttttcagacaagccggcctcggcaatcatctctctggaagtgagcggttgaccctcctggctcccctgaattctgtattcaaagatggaacccctccaattgatgcccatacaaggaatttgcttcggaaccacataattaaagaccagctggcctctaagtatctgtaccatggacagaccctggaaactctgggcggcaaaaaactgagagtttttgtttatcgtaatagcctctgcattgagaacagctgcatcgcggcccacgacaagagggggaggtacgggaccctgttcacgatggaccgggtgctgacccccccaatggggactgtcatggatgtcctgaagggagacaatcgctttagcatgctggtagctgccatccagtctgcaggactgacggagaccctcaaccgggaaggagtctacacagtctttgctcccacaaatgaagccttccgagccctgccaccaagagaacggagcagactcttgggagatgccaaggaacttgccaacatcctgaaataccacattggtgatgaaatcctggttagcggaggcatcggggccctggtgcggctaaagtctctccaaggtgacaagctggaagtcagcttgaaaaacaatgtggtgagtgtcaacaaggagcctgttgccgagcctgacatcatggccacaaatggcgtggtccatgtcatcaccaatgttctgcagcctccagccaacagacctcaggaaagaggggatgaacttgcagactctgcgcttgagatcttcaaacaagcatcagcgttttccagggcttcccagaggtctgtgcgactagcccctgtctatcaaaagttattagagaggatgaagcattagcttgaagcactacaggaggaatgcaccacggcagctctccgccaatttctctcagatttccacagagactgtttgaatgttttcaaaaccaagtatcacactttaatgtacatgggccgcaccataatgagatgtgagccttgtgcatgtgggggaggagggagagagatgtactttttaaatcatgttccccctaaacatggctgttaacccactgcatgcagaaacttggatgtcactgcctgacattcacttccagagaggacctatcccaaatgtggaattgactgcctatgccaagtccctggaaaaggagcttcagtattgtggggctcataaaacatgaatcaagcaatccagcctcatgggaagtcctggcacagtttttgtaaagcccttgcacagctggagaaatggcatcattataagctatgagttgaaatgttctgtcaaatgtgtctcacatctacacgtggcttggaggcttttatggggccctgtccaggtagaaaagaaatggtatgtagagcttagatttccctattgtgacagagccatggtgtgtttgtaataataaaaccaaagaaacata

SEQ ID NO: 5979 - protein, 683 aa, Homo sapien
MALFVRLLALALALALGPAATLAGPAKSPYQLVLQHSRLRGRQHGPNVCAVQKVIGTNRKYFTNCKQWYQRKICGKSTVISYECCPGYEKVPGEKGCPAALPLSNLYETLGVVGSTTTQLYTDRTEKLRPEMEGPGSFTIFAPSNEAWASLPAEVLDSLVSNVNIELLNALRYHMVGRRVLTDELKHGMTLTSMYQNSNIQIHHYPNGIVTVNCARLLKADHHATNGVVHLIDKVISTITNNIQQIIEIEDTFETLRAAVAASGLNTMLEGNGQYTLLAPTNEAFEKIPSETLNRILGDPEALRDLLNNHILKSAMCAEAIVAGLSVETLEGTTLEVGCSGDMLTINGKAIISNKDILATNGVIHYIDELLIPDSAKTLFELAAESDVSTAIDLFRQAGLGNHLSGSERLTLLAPLNSVFKDGTPPIDAHTRNLLRNHIIKDQLASKYLYHGQTLETLGGKKLRVFVYRNSLCIENSCIAAHDKRGRYGTLFTMDRVLTPPMGTVMDVLKGDNRFSMLVAAIQSAGLTETLNREGVYTVFAPTNEAFRALPPRERSRLLGDAKELANILKYHIGDEILVSGGIGALVRLKSLQGDKLEVSLKNNVVSVNKEPVAEPDIMATNGVVHVITNVLQPPANRPQERGDELADSALEIFKQASAFSRASQRSVRLAPVYQKLLERMKH

SEQ ID NO: 5980 - DNA, 2984 bp, Homo sapien; identical to SEQ ID NO: 1576

SEQ ID NO: 5981 - protein, 476 aa, Homo sapien; identical to SEQ ID NO: 1577

SEQ ID NO: 5982 - DNA, 2335 bp, Homo sapien
gaattccccccccccccccccgagagactggatggacccacaagggtgacagcccaggcggaccgatcttcccatcccacatcctccggcgcgatgccaaaaagaggctgacggcaactgggccttctgcagagaaagacctccgcttcactgccccggctggtcccaagggtcaggaagatggattcatacctgctgatgtggggactgctcacgttcatcatggtgcctggctgccaggcagagctctgtgacgatgacccgccagagatcccacacgccacattcaaagccatggcctacaaggaaggaaccatgttgaactgtgaatgcaagagaggtttccgcagaataaaaagcgggtcactctatatgctctgtacaggaaactctagccactcgtcctgggacaaccaatgtcaatgcacaagctctgccactcggaacacaacgaaacaagtgacacctcaacctgaagaacagaaagaaaggaaaaccacagaaatgcaaagtccaatgcagccagtggaccaagcgagccttccaggtcactgcagggaacctccaccatgggaaaatgaagccacagagagaatttatcatttcgtggtggggcagatggtttattatcagtgcgtccagggatacagggctctacacagaggtcctgctgagagcgtctgcaaaatgacccacgggaagacaaggtggacccagccccagctcatatgcacaggtgaaatggagaccagtcagtttccaggtgaagagaagcctcaggcaagccccgaaggccgtcctgagagtgagacttcctgcctcgtcacaacaacagattttcaaatacagacagaaatggctgcaaccatggagacgtccatatttacaacagagtaccaggtagcagtggccggctgtgttttcctgctgatcagcgtcctcctcctgagtgggctcacctggcagcggagacagaggaagagtagaagaacaatctagaaaaccaaaagaacaagaatttcttggtaagaagccgggaacagacaacagaagtcatgaagcccaagtgaaatcaaaggtgctaaatggtcgcccaggagacatccgttgtgcttgcctgcgttttggaagctctgaagtcacatcacaggacacggggcagtggcaaccttgtctctatgccagctcagtcccatcagagagcgagcgctacccacttctaaatagcaatttcgccgttgaagaggaagggcaaaaccactagaactctccatcttattttcatgtatatgtgttcattaaagcatgaatggtatggaactctctccaccctatatgtagtataaagaaaagtaggtttacattcatctcattccaacttcccagttcaggagtcccaaggaaagccccagcactaacgtaaatacacaacacacacactctaccctatacaactggacattgtctgcgtggttcctttctcagccgcttctgactgctgattctcccgttcacgttgcctaataaacatccttcaagaactctgggctgctacccagaaatcattttacccttggctcaatcctctaagctaacccccttctactgagccttcagtcttgaatttctaaaaaacagaggccatggcagaataatctttgggtaacttcaaaacggggcagccaaacccatgaggcaatgtcaggaacagaaggatgaatgaggtcccaggcagagaatcatacttagcaaagttttacctgtgcgttactaattggcctctttaagagttagtttctttgggattgctatgaatgataccctgaatttggcctgcactaatttgatgtttacaggtggacacacaaggtgcaaatcaatgcgtacgtttcctgagaagtgtctaaaaacaccaaaaagggatccgtacattcaatgtttatgcaaggaaggaaagaaagaaggaagtgaagagggagaagggatggaggtcacactggtagaacgtaaccacggaaaagagcgcatcaggcctggcacggtggctcaggcctataaccccagctccctaggagaccaaggcgggagcatctcttgaggccaggagtttgagaccagcctgggcagcatagcaagacacatccctacaaaaaattagaaattggctggatgtggtggcatacgcctgtagtcctagccactcaggaggctgaggcaggaggattgcttgagcccaggagttcgaggctgcagtcagtcatgatggcaccactgcactccagcctgggcaacagagcaagatcctgtctttaaggaaaaaaagacaagggaattc

SEQ ID NO: 5983 - protein, 272 aa, Homo sapien; identical to SEQ ID NO: 1751

SEQ ID NO: 5984 - DNA, 3597 bp, Homo sapien; identical to SEQ ID NO: 1031

SEQ ID NO: 5985 - protein, 825 aa, Homo sapien; identical to SEQ ID NO: 1032

SEQ ID NO: 5986 - DNA, 3189 bp, Homo sapien
tttccagccatggctgccattacctgaccagcgccacagccggtctctctgcaggcgccgggagaagtgaccagagcaatttctgcttttcacagggcgggtttctcaacggtgacttgtgggcagtgccttctgctgagcgagtcatggcccgaaggcagaactaactgtgcctgcagtcttcactctcaggatgcagccgaggtgggcccaaggggccacgatgtggcttggagtcctgctgacccttctgctctgttcaagccttgagggtcaagaaaactctttcacaatcaacagtgttgacatgaagagcctgccggactggacggtgcaaaatgggaagaacctgaccctgcagtgcttcgcggatgtcagcaccacctctcacgtcaagcctcagcaccagatgctgttctataaggatgacgtgctgttttacaacatctcctccatgaagagcacagagagttattttattcctgaagtccggatctatgactcagggacatataaatgtactgtgattgtgaacaacaaagagaaaaccactgcagagtaccaggtgttggtggaaggagtgcccagtcccagggtgacactggacaagaaagaggccatccaaggtgggatcgtgagggtcaactgttctgtcccagaggaaaaggccccaatacacttcacaattgaaaaacttgaactaaatgaaaaaatggtcaagctgaaaagagagaagaattctcgagaccagaattttgtgatactggaattccccgttgaggaacaggaccgcgttttatccttccgatgtcaagctaggatcatttctgggatccatatgcagacctcagaatctaccaagagtgaactggtcaccgtgacggaatccttctctacacccaagttccacatcagccccaccggaatgatcatggaaggagctcagctccacattaagtgcaccattcaagtgactcacctggcccaggagtttccagaaatcataattcagaaggacaaggcgattgtggcccacaacagacatggcaacaaggctgtgtactcagtcatggccatggtggagcacagtggcaactacacgtgcaaagtggagtccagccgcatatccaaggtcagcagcatcgtggtcaacataacagaactattttccaagcccgaactggaatcttccttcacacatctggaccaaggtgaaagactgaacctgtcctgctccatcccaggagcacctccagccaacttcaccatccagaaggaagatacgattgtgtcacagactcaagatttcaccaagatagcctcaaagtcggacagtgggacgtatatctgcactgcaggtattgacaaagtggtcaagaaaagcaacacagtccagatagtcgtatgtgaaatgctctcccagcccaggatttcttatgatgcccagtttgaggtcataaaaggacagaccatcgaagtccgttgcgaatcgatcagtggaactttgcctatttcttaccaacttttaaaaacaagtaaagttttggagaatagtaccaagaactcaaatgatcctgcggtattcaaagacaaccccactgaagacgtcgaataccagtgtgttgcagataattgccattcccacgccaaaatgttaagtgaggttctgagggtgaaggtgatagccccggtggatgaggtccagatttctatcctgtcaagtaaggtggtggagtctggagaggacattgtgctgcaatgtgctgtgaatgaaggatctggtcccatcacctataagttttacagagaaaaagagggcaaacccttctatcaaatgacctcaaatgccacccaggcattttggaccaagcagaaggctaacaaggaacaggagggagagtattactgcacagccttcaacagagccaaccacgcctccagtgtccccagaagcaaaatactgacagtcagagtcattcttgccccatggaagaaaggacttattgcagtggttatcatcggagtgatcattgctctcttgatcattgcggccaaatgttattttctgaggaaagccaaggccaagcagatgccagtggaaatgtccaggccagcagtaccacttctgaactccaacaacgagaaaatgtcagatcccaatatggaagctaacagtcattacggtcacaatgacgatgtcggaaaccatgcaatgaaaccaataaatgataataaagagcctctgaactcagacgtgcagtacacggaagttcaagtgtcctcagctgagtctcacaaagatctaggaaagaaggacacagagacagtgtacagtgaagtccggaaagctgtccctgatgccgtggaaagcagatactctagaacggaaggctcccttgatggaacttagacagcaaggccagatgcacatccctggaaggacatccatgttccgagaagaacagatgatccctgtatttcaagacctctgtgcacttatttatgaacctgccctgctcccacagaacacagcaattcctcaggctaagctgccggttcttaaatccatcctgctaagttaatgttgggtagaaagagatacagaggggctgttgaatttcccacatacactccttccaccaagttggaacatccttggaaattggaagagcacaagaggagatccagggcaaggccattgggatattctgaaacttgaatattttgttttgtgcagagataaagaccttttccatgcaccctcatacacagaaaccaattttcttttttatactcaatcatttctagcgcatggcctggttagaggctggttttttctcttttcctttggtccttcaaaggcttgtagttttgggtagtccttgttctttggaaatacacagtgctgaccagacagcctccccctgtcccctctatgacctcgccctccacaaatgggaaaaccagactacttgggagcaccgcctgtgaaataccaacctgaagacacggttcattcaggcaacgcacaaaacagaaaatgaaggtggaacaagcacagatgttcttcaactgtttttgtctacactctttctcttttcctctaccatgctgaaggctgaaagacaggaagatggtgccatcagcaaatattattcttaattgaaaacttgaaaaaaaaaaaaaaaa

SEQ ID NO: 5987 - protein, 738 aa, Homo sapien
MQPRWAQGATMWLGVLLTLLLCSSLEGQENSFTINSVDMKSLPDWTVQNGKNLTLQCFADVSTTSHVKPQHQMLFYKDDVLFYNISSMKSTESYFIPEVRIYDSGTYKCTVIVNNKEKTTAEYQVLVEGVPSPRVTLDKKEAIQGGIVRVNCSVPEEKAPIHFTIEKLELNEKMVKLKREKNSRDQNFVILEFPVEEQDRVLSFRCQARIISGIHMQTSESTKSELVTVTESFSTPKFHISPTGMIMEGAQLHIKCTIQVTHLAQEFPEIIIQKDKAIVAHNRHGNKAVYSVMAMVEHSGNYTCKVESSRISKVSSIVVNITELFSKPELESSFTHLDQGERLNLSCSIPGAPPANFTIQKEDTIVSQTQDFTKIASKSDSGTYICTAGIDKVVKKSNTVQIVVCEMLSQPRISYDAQFEVIKGQTIEVRCESISGTLPISYQLLKTSKVLENSTKNSNDPAVFKDNPTEDVEYQCVADNCHSHAKMLSEVLRVKVIAPVDEVQISILSSKVVESGEDIVLQCAVNEGSGPITYKFYREKEGKPFYQMTSNATQAFWTKQKANKEQEGEYYCTAFNRANHASSVPRSKILTVRVILAPWKKGLIAVVIIGVIIALLIIAAKCYFLRKAKAKQMPVEMSRPAVPLLNSNNEKMSDPNMEANSHYGHNDDVGNHAMKPINDNKEPLNSDVQYTEVQVSSAESHKDLGKKDTETVYSEVRKAVPDAVESRYSRTEGSLDGT

SEQ ID NO: 5988 - DNA, 3579 bp, Homo sapien
agtttcctcggcagcggtaggcgagagcacgcggaggagcgtgcgcgggggccccgggagacggcggcggtggcggcgcgggcagagcaaggacgcggcggatcccactcgcacagcagcgcactcggtgccccgcgcagggtcgcgatgctgcccggtttggcactgctcctgctggccgcctggacggctcgggcgctggaggtacccactgatggtaatgctggcctgctggctgaaccccagattgccatgttctgtggcagactgaacatgcacatgaatgtccagaatgggaagtgggattcagatccatcagggaccaaaacctgcattgataccaaggaaggcatcctgcagtattgccaagaagtctaccctgaactgcagatcaccaatgtggtagaagccaaccaaccagtgaccatccagaactggtgcaagcggggccgcaagcagtgcaagacccatccccactttgtgattccctaccgctgcttagttggtgagtttgtaagtgatgcccttctcgttcctgacaagtgcaaattcttacaccaggagaggatggatgtttgcgaaactcatcttcactggcacaccgtcgccaaagagacatgcagtgagaagagtaccaacttgcatgactacggcatgttgctgccctgcggaattgacaagttccgaggggtagagtttgtgtgttgcccactggctgaagaaagtgacaatgtggattctgctgatgcggaggaggatgactcggatgtctggtggggcggagcagacacagactatgcagatgggagtgaagacaaagtagtagaagtagcagaggaggaagaagtggctgaggtggaagaagaagaagccgatgatgacgaggacgatgaggatggtgatgaggtagaggaagaggctgaggaaccctacgaagaagccacagagagaaccaccagcattgccaccaccaccaccaccaccacagagtctgtggaagaggtggttcgagaggtgtgctctgaacaagccgagacggggccgtgccgagcaatgatctcccgctggtactttgatgtgactgaagggaagtgtgccccattcttttacggcggatgtggcggcaaccggaacaactttgacacagaagagtactgcatggccgtgtgtggcagcgccatgtcccaaagtttactcaagactacccaggaacctcttgcccgagatcctgttaaacttcctacaacagcagccagtacccctgatgccgttgacaagtatctcgagacacctggggatgagaatgaacatgcccatttccagaaagccaaagagaggcttgaggccaagcaccgagagagaatgtcccaggtcatgagagaatgggaagaggcagaacgtcaagcaaagaacttgcctaaagctgataagaaggcagttatccagcatttccaggagaaagtggaatctttggaacaggaagcagccaacgagagacagcagctggtggagacacacatggccagagtggaagccatgctcaatgaccgccgccgcctggccctggagaactacatcaccgctctgcaggctgttcctcctcggcctcgtcacgtgttcaatatgctaaagaagtatgtccgcgcagaacagaaggacagacagcacaccctaaagcatttcgagcatgtgcgcatggtggatcccaagaaagccgctcagatccggtcccaggttatgacacacctccgtgtgatttatgagcgcatgaatcagtctctctccctgctctacaacgtgcctgcagtggccgaggagattcaggatgaagttgatgagctgcttcagaaagagcaaaactattcagatgacgtcttggccaacatgattagtgaaccaaggatcagttacggaaacgatgctctcatgccatctttgaccgaaacgaaaaccaccgtggagctccttcccgtgaatggagagttcagcctggacgatctccagccgtggcattcttttggggctgactctgtgccagccaacacagaaaacgaagttgagcctgttgatgcccgccctgctgccgaccgaggactgaccactcgaccaggttctgggttgacaaatatcaagacggaggagatctctgaagtgaagatggatgcagaattccgacatgactcaggatatgaagttcatcatcaaaaattggtgttctttgcagaagatgtgggttcaaacaaaggtgcaatcattggactcatggtgggcggtgttgtcatagcgacagtgatcgtcatcaccttggtgatgctgaagaagaaacagtacacatccattcatcatggtgtggtggaggttgacgccgctgtcaccccagaggagcgccacctgtccaagatgcagcagaacggctacgaaaatccaacctacaagttctttgagcagatgcagaactagacccccgccacagcagcctctgaagttggacagcaaaaccattgcttcactacccatcggtgtccatttatagaataatgtgggaagaaacaaacccgttttatgatttactcattatcgccttttgacagctgtgctgtaacacaagtagatgcctgaacttgaattaatccacacatcagtaatgtattctatctctctttacattttggtctctatactacattattaatgggttttgtgtactgtaaagaatttagctgtatcaaactagtgcatgaatagattctctcctgattatttatcacatagccccttagccagttgtatattattcttgtggtttgtgacccaattaagtcctactttacatatgctttaagaatcgatgggggatgcttcatgtgaacgtgggagttcagctgcttctcttgcctaagtattcctttcctgatcactatgcattttaaagttaaacatttttaagtatttcagatgctttagagagattttttttccatgactgcattttactgtacagattgctgcttctgctatatttgtgatataggaattaagaggatacacacgtttgtttcttcgtgcctgttttatgtgcacacattaggcattgagacttcaagcttttctttttttgtccacgtatctttgggtctttgataaagaaaagaatccctgttcattgtaagcacttttacggggcgggtggggaggggtgctctgctggtcttcaattaccaagaattctccaaaacaattttctgcaggatgattgtacagaatcattgcttatgacatgatcgctttctacactgtattacataaataaattaaataaaataaccccgggcaagacttttctttgaaggatgactacagacattaaataatcgaagtaattttgggtggggagaagaggcagattcaattttctttaaccagtctgaagtttcatttatgatacaaaagaagatgaaaatggaagtggcaatataaggggatgaggaaggcatgcctggacaaacccttcttttaagatgtgtcttcaatttgtataaaatggtgttttcatgtaaataaatacattcttggaggagc

SEQ ID NO: 5989 - protein, 770 aa, Homo sapien
MLPGLALLLLAAWTARALEVPTDGNAGLLAEPQIAMFCGRLNMHMNVQNGKWDSDPSGTKTCIDTKEGILQYCQEVYPELQITNVVEANQPVTIQNWCKRGRKQCKTHPHFVIPYRCLVGEFVSDALLVPDKCKFLHQERMDVCETHLHWHTVAKETCSEKSTNLHDYGMLLPCGIDKFRGVEFVCCPLAEESDNVDSADAEEDDSDVWWGGADTDYADGSEDKVVEVAEEEEVAEVEEEEADDDEDDEDGDEVEEEAEEPYEEATERTTSIATTTTTTTESVEEVVREVCSEQAETGPCRAMISRWYFDVTEGKCAPFFYGGCGGNRNNFDTEEYCMAVCGSAMSQSLLKTTQEPLARDPVKLPTTAASTPDAVDKYLETPGDENEHAHFQKAKERLEAKHRERMSQVMREWEEAERQAKNLPKADKKAVIQHFQEKVESLEQEAANERQQLVETHMARVEAMLNDRRRLALENYITALQAVPPRPRHVFNMLKKYVRAEQKDRQHTLKHFEHVRMVDPKKAAQIRSQVMTHLRVIYERMNQSLSLLYNVPAVAEEIQDEVDELLQKEQNYSDDVLANMISEPRISYGNDALMPSLTETKTTVELLPVNGEFSLDDLQPWHSFGADSVPANTENEVEPVDARPAADRGLTTRPGSGLTNIKTEEISEVKMDAEFRHDSGYEVHHQKLVFFAEDVGSNKGAIIGLMVGGVVIATVIVITLVMLKKKQYTSIHHGVVEVDAAVTPEERHLSKMQQNGYENPTYKFFEQMQN

SEQ ID NO: 5990 - DNA, 316 bp, Homo sapien
cggctctgcccaggttaagggccacggcaagaaggtggccgacgcgctgaccaacgccgtggcgcacgtggacgacatgcccaacgcgctgtccgccctgagcgacctgcacgcgcacaagcttcgggtggacccggtcaacttcaagctcctaagccactgcctgctggtgaccctggccgccgacctccccgccgagttcacccctgcggtgcacgcctccctggacaagttcctggcttctgtgagcaccgtgctgacctccaaataccgttaagctggagcctcggtggccatgcttcttgccccttgggcc
